United States Patent Application Publication US 2006/0135758 A1 - sequence listing, part 2

SEQ ID NO: 1969 - DNA, 2756 bp, Glycine max
gcaagttaagttagtataagaccatctcctcccgcgcctccccgccccctctctccctcactctcaccatggaggcgcaaccaccaaccccctcgactgcgccgccgcctctgccgccacacctcagctaccccgactccgtggaatcctcgcctcgctcccgcaacaccgactcctgggacgagcccttcgcgccggcgtccaccaagctccgtctcatgtgcagctacggcgggcacatcgtcccccgcccccacgacaagtccctctgctacgtgggtggcgacacgcgcatcatcgtgtccgaacgcgccacctcactcgcagacctctccatgcgcctctcgaaaactttcctgaacggaagacccttcacgctcaagtaccagctccccaacgaggacctcgattccctcatctccgtcaccaccgacgaggacctcgagaacatgatcgacgagtacgaccgcaccgccgcctccgccacctccgccgtcaaaccctcccgaatccgcctcttcctctttcccaccaaacccgaatccactcactctatccctccccaaattcttgacacgtcagccaaatcggacgattggtttttgaatgcgttaaacggcgccggattgcttaaccgcgggttttcggactctgcctctgttaattgccttcttggacttgacgacgaggttgccgggaacaacctcgaacccggttcgaaggacggtgtggatggtggtgtttggcggtgttggtggcggtggtgcttcgcagggtggatctttcgggaacgggaagaatttgaagcaggatgttcactccattcccgattcgcccatgctcgaaacgacgtcgtcgtttgggtccacttcttcgtcgccttcgcttgcgaacttgccgccgattagggttcatgttgtggaggatcagaaggtgttggggattgaggagcagttcgcgcagatgggggttggtgtggggcagaagcagcagcagcaggatgagggttttgttttgctatcttcgccgcctcccccgccggttcccgcgaccctcgccgccgtgggtgtgccaattgggcccgccacggtggttgctggggagtatcataaccgcgttgtctccgatgatgagagatcagatcatggggtttctgttgggtatagaaaaccacccactcctccaccacaggttcagtcacagacacaagcacagtcacaggcacaaacgcaaacacttgctcctcaatttcaacagaagtcaactggtggtggcgccgttgttgatttgccttctcctgattcagtttcaagtgatagtagtcttgcgaatgcaatctcgcgttcgaaacctgctgtttatcaagaacaagttcagattcaatccgggactacaagggttcccagtaaccctgtggatccaaagcttaatgtgtctgatccgcacggtcggatccagatgcagcaacatgtacaggaccctggatatttgttgcaacaacaatttgaacagcaccagcagttgcagtcacaacaaccgcaacagcaatttgaacagcaacatcaccagcaccagcagacactaccgcaacagcagcaacagtttattcatggcacacactttattcaccataaccctgctattcctgcatattatcctgtatatccttcccagcaacatccccagcatccacaggtttactatgtgactgcgagacaggcgcaggcttacaacctgcctgtgcagcaggctaatatgggtgagtctgcagggaacatcgcctctagccgaccacaaactccaccaaatccttctacattggttcaacaacctgctacttacaaccccatcagaaatgctcccatgcctaaaactgaaatgaatgcttacagagctgcaactgcaggcacccctcaacttgttcaagttcctacgagccaacatcagcagcagtatgtcacatactcacagattcaccatccttctcagtccatggctcccaattctgctgcccctgccaattatgcttttgattatgcggatcctgctcatgctcaaatatactactctcaacctatggcacccacaatgccttcacagtaccagactatgatgatgcaggaaggttcagctcagcatccctcagacagcgtgaagcagcagcagataagaacctcacaaccattataagccagtccttaaaaaaaaaagaaacaattttgaaaaaaatgggtttgtttccctttaagtttttatatgcagttcttgtcgtcatgtttgataaaactgtttgtggtatgtatttggatagggaaaaaaaagaataataagaaactgtgatcatcttgtactttttcttgtatgtcataatttataatttatataggaaatgaaattggtccaaagattatactgtaaaaggtcaagtctgaaacattgtattgtgaaaattcaaatatcaattcctgaaatgattgtcatataaaaaaattagcgggtattctttctagctctggtcttgtgatccgtggttcatgataaaactattcaattctgttgataagtgcaatggatgttgccatttgaagttttggactacttgcagtttgtcctcggtcccttatatgaccaaagccatgcatgaaggaccactagtttgcacttgtgcgtgtagtctataaatcctacatcggtctggtcgcattttcaatccccttgttcgttttatagacaagaaaatctcgtttctgctgatt

SEQ ID NO: 1970 - DNA, 1150 bp, Glycine max
cgaagcttaatgtgtctgatctgcatggtcggatccagatgcattaacatggacttccccccggggatttgttgcaacagcaatttgaacagcaccagcagctgcaatcacggctccagcagcaatttgaacagcacctgcagctgcaatcacaaccgcaacatcaatttgaacagcaccaacaccaacaccaacagacactgccgcaacagcagcaacagtttattcatggcgcacactttattcaccataaccctgctattcctgcatattatcctgtatatccttcccagcaacatccccagcatccccaggtttactatgtgaccgcgagacaggcgcaggcttacaacctgcctctgcagcaggctaatatgggcgagtctgcagggaacatcgcttctagccggccacaaactccaccaaatccttctacattggttcaacagcctgctacttacaaccctattagaaatgctcccatgcctaaaactgaaatgaatgcttacagagctgcaactgcaggcaaccctcaactagttcaagttcctacaagccaacatcagcagcaatatgtcacctactcacagattcaccatccttctcagtccatggctcccaattctgctgcccctgcgaattatgcttttgattatgcggatcctgctcatgctcaaatatactactctcaacctatggcacccacaattccttcacagtaccagactatgactgctgctgctgtgatgatgcaggaaggttcagctcagcatccctcagacagcgtgaagcagcagcagcagataagaacctcacaaccattataaaccattccttaaaaaaaaacaattttgaaaaaaatgggtttggtttccctttaagtttttatatgcagttcctatcgtcatgtttgataaactgtttgtggtatgtgtatttggatagaaaaaaaaaaaaaaagaaactgtgatcatcttgtactttttcttctatgtcataatttataatttatataggaaatgaaattggtccaaggttatactgtaaaaggtcaagtctgaaacattgtattgtgaagttcaaatatcaattcctgaaattattgtcataaactactaaaaatagtgggtattctttcttgctctggtct

SEQ ID NO: 1971 - DNA, 1115 bp, Glycine max
ttttttttaccaaaacaaacgtaatttaattagccgatgcatttatagcaaaggaatcatacccatgaccacactatttttaaaattttaatcaactaatcttaatggaaaaaagaaaaagaaaacctatatagtgtaacgagaaagaaaagaaaaaagaaaaagaaattttctgtaaaacacaaccggcacacatcaaattaaaggggggtgttactaagattgcccatgtatgatacaaaatattaatgaaactatgatttcagctgaactctattatgttgttgaagtggtgagtcatgagtgagttgtactactcagtgatgatgttgagcatgcgggggtggtgctgctgccatgggtggtggagttggggccttgcattggtagcacttggcaaagagcccaaatgtgtcaatttgcctaatgaagttggtcatgctggcccatcctccaaacccaaacccaaccaccaaaacccacaccacaatgaatgcattaaagacatacattgcagtccagcttggcataaagaaaggaggcttctcagcagcattctgtcttgctgaggcttttctgtaagtgagcatatgagctgtggcggggatgatgtagactgtgaaactaacgagaagagctccaactgcagagtttatgggcccaaagaaagggaagattatggccaaaaaccatatgggtatcaccactggcaaccttgctagtgcccttatgcaaatgctttttgtgtcatgcatcccaattaccttctcccagacaaagtacagtggagtactagcaaaaccgaatgtgatgaactggtgaatgagcatgaggattacagcagcatcacgaaatcgatttttggggaggagagagaatgcattggcctgattgagaagttcatcaccaaaagcccagtaaacggcagcagcagaaggaatcgttagtgtgaaaacgtacaaagtggccagcaagtatatgtacttgaacttctgtggcttccacatggcgtgcataatctctacagtaactgcatgtccaccaaacgtgtacagtgtgttggtggctcctgtgaagtacagcactagcttcgttggacccgtgcggacgcgtgg

SEQ ID NO: 1972 - DNA, 2139 bp, Glycine max
aaaaaagcaagaattatagacatgaaaactagcattactcaaaactgatacttcccatttattaatggaaagaatttacgaagacaactaatgatttcgatacacaagcccaataaataatctgcattttttttacgatcaaaagaaaacaaagatcgaccatgcttggttgatagatacaccattgcaaaacgacagtgtccatcaaagccacattaccatgctaaatactagtctccaatatcccctaccacaacctggtatggaatttgttgtagccagcaaaaatcaacaatcaacctcccaagtagaagctttaatcaaaacttttattttctgccagatcaaaaattaataacaaagcctttcctgagttttttcaaatccagctgatttttctcgctcctcatgacactgttgatgccccactaatggtctgtttagccacatatatttgctttacctttgttgaggaaaagtttttgtctgaacccagagattgatttctaccttggtaccctctacgatgggaccattcacccccagaattattcctctgagaaataccacccctctgataattaccatgccctgaggaatggtcaaattgtgagggctgattcttgaaagaagaacttgcattctggttattactactatggctattgccattcagaacatcaaccttcaaagtatctgtaatggggatcacagatggagtcttgttgacaacactctgtgctgaagtcttggtaggagttgagtttgaagtgtcccctaacccaagttcatcgggcaattggttgacattcacatcagtggctctaggaaaattcctatcgccctcagaagatgttgaagctcgagaaccggtaaaccttttggcatttaatggctgatcaacagaagggacatggctgaactgagaagtctgtatcccttcttgttgctgcaatggcattgacagaggaagttgtgaattaggaacatgtgaccatcgagcttgtaccgacatctcagtagagggctggaaaggagaaacatcaaacattgccacaggggaagccattggcataagtggtgaaccaggagcaagatgttgaattggagaaggcatgttagcaggattccgcaatgaagatgccatattcatactgttcatatcgccttcaccagctcccacagcagatgatgtagggatgtgtttccaatcaggctgctttccagagggtatataagtggttcccatgaaactcaagccaacttgaccaaattgcccaacaggagcaaaatggttataaacaaccatgtgtggtggcccctggactcctggaatgcctccaggaggagcaataaaaggcccagtgaaccctgttggaggtccataaaaagattccacaccagaatggcactgttgccagctcccaattggccttgatgctgatgtagtacttttttgaggctgtgactgtgttgtagatgcagactcatcatgaggtccaaaagcaaagacaggaccacccatcataggattcatttcatagaaaggaaaatgagaaggagggcctgaaggaaaatgaggagggacagaaggaaaatgcgaaatcatttgacccgaagaattttgggtacttggtaagggaggccacaaggaaattggcggagtctcaacagataaatctgctggaagagatacgctaagaggctcctcagatctagattgattagctgattgctgctcacaacctactcctgctactaccctatcaatatctgcagctacaaaacttttaccatctgaagcagggacagaacaagcacccaatccatttccaacaatctcgtcactactaatggcagcaacagcaacagctgaagcagctgcttcagcttcagcttctgcatcatgatcttctaagtgaccatgagattcattaccatgtttctctttatcaaagaaaagactgcaatcgttatcagatgcagtaagattgtgggacatttgcatgtctgatctagatgatcgaggtcgaccaatgccatgagacacaacacggggggggggcctacgtagtgcccgagatgttactgccccaaactgaattttctctccagcaagcaaggaattaattgggctgg

SEQ ID NO: 1973 - DNA, 1133 bp, Glycine max
atagacatgaaaactagcattactcaaaactgatacttcccatttattaatggaaagaatttacgaagacaactaatgatttcgatacacaagcccaataaataatctgcattttttttacgatcaaaagaaaacaaagatcgaccatgcttggttgatagatacaccattgcaaaacgacagtgtccatcaaagccacattaccatgctaaatactagtctccaatatcccctaccacaacctggtatggaatttgttgtagccagcaaaaatcaacaatcaacctcccaagtagaagctttaatcaaaacttttattttctgccagatcaaaaattaataacaaagcctttcctgagttttttcaaatccagctgatttttctcgctcctcatgacactgttgatgccccactaatggtctgtttagccacatatatttgctttacctttgttgaggaaaagttcttatctgatcccagagattgatttcttccttggtacactctacgatgggaccattcgcccccagaattatttctctgagaaacaccacctctctgataattaccatgtcctgaggaatggtcagattgtgagggctgattcttgaaagaagaacttgcgttctggttgttattactactgctgctattgccattctgaacatcaaccttcacagtatctgtaatggggatcacggatggagtcttgatgacaacagtctgtgctgaagtcttggtagcagtgaaatttgaattgtccaccaatccaagttcatcaggcaattggttgacattcacatcagcagctctaggaaaattcctatccccatcagaagatgttgaagctcgagaactagtaaaccttttggcatttagcggctggtcaacagaaggagcatggctaaactgagaagtttgtaccccttcttgttgctgcaatgggattgacagaggaagttgtgaattaggaacatgcggccatcgagcttgtactgacatctcagtagagggctggaaaggagaaacatcaaacatagccacaggagaagccattggcataagtggtgaaccggggggggggcctacgtagctgaaaggcatggggggggggccctacgtagctactcga

SEQ ID NO: 1974 - DNA, 2000 bp, Glycine max
aaagtaactgaaaacgttccaaatttcactgccagcgaggcagagagagaaactagagagagagagagagcgaacacaccgttcatttctccttcgtcgtcgtcgtcgtttcgccgtcgcattttccggcgaggtttctctgttttgtttaaccgaaatggaggatccgtacgttctcggttggattctgtgctccgtcctgagcctcttggcgctctacagcctggccttcggcggagcgggccgtcgccgcgcttcgccggagaagaggaacgagttatcggagaccgtgacgacctccgccggagaatgcagatcggagaaacgaaacggcgacgctgacgtcatcattgtcggagccggcgtcgccggcgccgccctggcgcacactctcggaaaggatgggcgtcgagtacacgtcattgaaagagacctgagtgagcctgatcgaattgttggagagttgctacaacccggtggctatctcaaattaattgagctcggacttgaagattgtgtggacaaaattgatgctcagcaagtgtttggttatgcacttttcaaggatgggaaacatactcgtctctcttaccccttggagaagtttcactcagatgtctctggcagaagctttcataatgggcgctttattcagaggatgcgggagaaagccgcctccattcccaatgtacgattggagcaaggaacagtcacttccctaattgaagagaaggggacaattaaaggtgtgcaatataagaccaaagatggtcaggaattggcaacatatgcacctcttaccattgtttgtgatggctgcttctcaaacttacgccgttctctttgtaatcctaaggtggatattccctcatgctttgttggtttagttttagagaactgtgaacttccatgtgcaaatcatggccacgtcatactgggagacccttcgccaatcttattctaccctataagcagtacagagattcgctgtctggtcgatgtacctggacagaaggttccttctatttcaaacggtgaaatgggaaagtacttgaagacaacggtggctccacagattcccccccagctttatgatgccttcattgctgctgttgacaaaggcaacataaggacaatgccaaacagaagcatgccggcagatcctcatcctacacctggagcccttttgatgggagatgcattcaacatgcggcatccactaaccgggggcggaatgacggttgcattgtctgatattgtggtgctgagaaatcttctaagccctttgtctgacctgaatgatgcacccacactctgtaaataccttgaatcattttataccttgcgtaagcctgtggcatccaccataaatacattggcaggtgctctttacaaagtattttgtgcatcccctgatctggcaaggaaggaaatgcgccaagcttgcttcgattatctcagccttggaggcctattctcggaaggaccagtctctttactttctggattaaaccctcgtcccttgagcttggttctccatttctttgctgttgcaatatacggtgttggccgtctattgttaccatttccttcacctaagagagtatggatcggagcccgactaatctcgggtgcatctgcaatcatcctccccataattaaggctgaagggattcgtcagatgtttttccctgccactgttccagcttattacagaacacctccagttgcacaatagtgagtatatgtgaaattagtgaatatattttgaaaaatttaaggtgctgtcgataacatatggtagcttatcctgctttttgtcagaattgagggaaggttcagttcgtagttctgtaagcattttggcttctttattgtgtattctttgtagtctgtaactcaatgttataagtgaatgtatgatctctctttcctttttggtacaccagaaattaaaaaaaaaatcttaaactaaaaaaaaaaaaaaaaaaaaaaaaaaa

SEQ ID NO: 1975 - DNA, 1075 bp, Glycine max
gggacaaatcagacaatgacattacagctcttcaatagctggaaaacttgaatctctcgtatggtcatatgtaaaattgtatcaaaaccacaacttggatgaatggttctgctagcattaacataactgatgacaattccatactaaataattaaattctataataatatcattcccatgacaaagcgtactgcaactttatccatttatatgtcagcagcaaggaagttaccggacagtgctaccttctcgcccaatttgaaggcaggcagtcccttgtaagggcaggtactgcacctgaaagcatcccctagcccacaattgccacaagctgattgaggattattaatctgttctgttgtcaatcctaacttcaatactttttcctcttcctcagccctcccacaggtgcaatttttgcaggcttttcttgtgctcccaatttcacaatcaccaggtggcagctggggtttctttaaatcttcttcagtcaagagactatcctcatcaattagatccgaatcaaaatcaatttgcattttaggtgaactctttatcaccttctttagcgcaaaagatgaaccaattttccatgaaggctttttagctttgatcccagttaattgtaaaacttgtgtttctgtaaaccctgccaacaataacttgttctcaagagcagatattatcttatcaaatgaacccacagcagactgagatgacttgcgaataagaattgtaccatctacttttaacactctaagaatttcgtgaatcagttggtccacaggacaatcaattgacagccaaattaaaatcagaaaatcaacagaggaagaatccactggcaacttgctcaagagtgaggcagaagtaagaactagaggatcccattgctcaactccttcattcccaagctctctaattgcatcaaacacttgactgacgggaagaactgctccatctgtacatgccaacacagcaccatgtgtctttgcaccatccattctgattctgatgggaagtaaaagcaacaacacagaatcgaagcttcaagttgccgactgcagaaaattat

SEQ ID NO: 1976 - DNA, 1096 bp, Glycine max
tttttttttgagacaatgacattgcagctctataatatccggaaaactcgaatccctcgtgttgtcatacgtaaaattgtatcaaaacaactctgatgaattgttctgctagcattaacataattgatgacaattccatactaaataaaaaattatataataccattcccataacaaatcgttaccgcaactttatccatttatatgtctgcagcaagaaagttaccggacagtgcaaccttctcgcccaatttgaaggcaggcagtcccttgtaagggcaggtactgcacctgaaagcatcccctagcccacaattgccacaagctgattgaggattatcaatctgttctgttgtcaatcctaacttcaatactttttcctcctcttcagccctcccacaggtgcaatttttgcaggcttttcttgtgctcccaatttcacaatcaccaggtggaagctggggtttctttaaatcttcttcagtcaaaagactatcttcatcaatcagatctgaatcaaaatcaatttgcattttaggtgaactcctaatcaccttctttagcgcaaaagacgaaccaattttccatgaaggctttttagctttgatcccagctgattgtaaaacttgtggttctgtaaaccctgccaacaataacttgttctcaagagaagatattatcttatcaaatgaacccacagcagactgagatgacttgcgaataagaattgtaccatctacttttaacactctaagaatttcttgaatcagttgatccacaggacaatcaattgacagccagattaaaatcacaaaatcaacagaggaagaatccacaggcaacttgcttaagagtgaggcagaagtaagaacaagaggatcccattgctcaagccctccattcccaagctctctaattgcatcaaacacttgactgacgggaagaactgctccatctgtacatgccaacacagcaccatccattctgattcagcaacagcacagaatagaagcttcaagagaaagggaagagttgccgactgcagaaattgaagaaacagagagagatccggcgcggggccctacgtagctgactc

SEQ ID NO: 1977 - DNA, 2220 bp, Glycine max
agcatgactcgtggatgtgataaccatgacctaatatcgcatagttgaattataaaactttatatatccctagtgacaatacaaagctgtattaattcaaaaagcaggatatgaagcaggaaaataaagaaaatttctacaagtccaattctttgatcatttactctatcttcgcccagcaacagagctaaacgaagcatgtgcagacaactcaaacactctcattttcacctcagccttcaccttatgccaaataacattggccgtgtcaactgggccacatgatcacttcagaaacatatgagaaacttgataattgcctgtatcatgatataagaacttggtgttcataacaccatgtcagccaaacttttaatttgaggcaaaatgtaaaaatgccaccaaagtctgacatttatcatgccaggaacagagaaacgtttcaacccttttacctgtcacactgaactgttaagtacattttatagttgcatgatcaaaccatccttaaaaaaaatctctactaccaacccagaatgccaaaagcaaatggcaaggcttgattacctttgtgatgagagatgtatgattaaaggcatctaaaacgcagcttcagcaccaagtgattaagagaactagagtcctcaaaccaaaaaaaattaagctcatcaccaaaactataaacaagttagaatcagttgtgaatgaactaaaagtctaaaacaactgaatgtgacaacagaaaagtatcaacatgaaacaccaggaaccagctgccataagagaccaaacaaactttcaaaaggaaacattagcgaccagacattaagtcctacatgacaagaaatgattaataacaatcataactataatatgcttttttgacttctgccatatgaagactgctatcaacttctatcccgaatctctgcaaatttcataacagtacagcaaggttaaagaagtgagtcccaaacttcgaagaaagacatggcaagaggttaagaaatcaggttcacaagagctccaagaaacatcaggccttttggaacactgaaccaaaattgatcaaaatcatttcatctctgccatgaacttctcatactctgaatcagctgatgaagcaggaggaggcactgatggatttgtggccctaggcacatttccaatgctatgggattgattgtctgctgatgaagcaggaggtgggacgagagaattactggcccaaggcacatttgcaatgttgtgggattgatctgaagttgagacaggcatgggggcagaagggggaggtggtggaggaactgcattatagtaaggtggatatccataagatgcaggatatgtaggttgaggtggaattggaggtcctgagttaccatacatattagctggtacagactgagttgagttattgttgtcagactgcactccgggtgggtaactctgctgcacttcactagaagttgcaggctgggatggggcaccgggagggccagtcggcacaggaggaggatattgaaccccataaggaggcatatgttgaccttgcataggtggatacatagttgacccaggtggaggaggagcatagggagcatatggaggaggaacagggggtccccatggcactggggcaccaccgtaactcccagggggagcagtcccaatggggccaccggcagcatactgttgggatggatatgcaccaagtggctgacttggaacaggataagttggcacagcagatgccggtggtccaggaggtacaacaggctgaggaggcttaccagcaactctcactgcaattgttcgaccctcaaggcgataaccgttcatggccaagattgcattgtttgccattgtaatatcagcatacttcacaaaaccatatcctttacttaaacccgacattcgatccttgataacttttgccataacaatctcaccaaattgttgaaataattggatcaggccatcgtcatcaagagtgggcggcaagtaccctatgtacaaattcgtatcatcaatttccttcttaattgcagcagcccctaagccagcttgaggtgcactgcctgcagtaccagaattgttagcccaaggaggattgcttccagaagtgcctgcaccaattgccaatgtactggtttgctttgttgcagattcaggaaccgaacctcccaactctgcaggggggggggcctacgtagctga

SEQ ID NO: 1978 - DNA, 1831 bp, Glycine max
tttttcaacttccgctgtgtatttaggagagggagcaaaatctttttttttcttttaaaatacgatgtgctaattgtatacatgttgattgataatacatagaatacggagatcatatgcaacgtttctcatactatccattaactgaaatttgttaggacttaggactcacaaaatgacatgggtctcgatttttatttaactactatcactcgtaatttcctgagtctcaacaaattttagccaagagtgaaaagtatgctaaaaaaaagtagattaaagaatacgttgctgttatttctcatatgactacaatttacatttactactatgttgaaagccaaattactagtggcatctgagcggtggctccattgaactgatgaggtagatatcaatattatgcatcattctcgtctaacggaaatttgccacatcaaactcggatccgtttgacatcactttctgggacactgatatcaagcctatctccactgcttgaactagcagtttgtcctgagacagtttcatccggaactactgcatatctctcagataaggaggcaccacttttccctgacaatagatcagtgtttgaggattctatgtgcggcccggaagatccatccacactcaatgcctcaataatctttggagaattccggtcaacggtatccccatgcccaagttgcccatttgtgcctcttccccaagaaaatacattttccttttcagttacagcaattgtgtgtctccacccacatgagatctgaactactttctgatcatgggggaacttcacttgcacaggagagcaacgatcaacattgtcaccaactccaacctgtccaaacttattccaaccccatccatatagtagtccagtagacgtcagtgccatactatgcctccaaccacccgatacctgactgattaacttatcactcaaggcttgaagcttttgaggcacaagagaatcctcaaaatttccatgtcctaactggccatatttgctccacccatatgtgtataagccacccaaagatgaaacagaaattgtatgccgccaaccacaagcaaccatgaccatcttgtcacaatcaacagaagaaactttctcaggaatccagcgatcatttctatcccccaaccccaaatttccatatcggccccaacccccatccatacagttctccattttcagtaatagctacactgtgttctgcacctgcagcaaccattttgataggtactccctgaaatgtttgaatcttttgtggcacaagagaatcctccgaggtgccaagtccaagttgaccattttgattcctcccccaactctgaacctcgccttccatggtaactgccaaacagtggctatccccacaggcaatttgctttatccttagaccttgcaatgctataataggctgaggaatgagcaaatcactagaattgccatgacccaaccttccaaaatcaccccatccccaactatagagttcattgcgtgattcggaatacgcaagggtatgatcagctccacatgcaatagaatcaatttgttgagcatccaatgcactgagatgagtgggtaagagtctatcatcggtgtcaccatggcctaactgtccatcctctccgcgaccccacgagcacacaacattcccagagagaagggcaacggtgtggctggcaccggcggagatgaggagaacgcgagaaggtggagaagtagcggcggtgacttccaattccatggtaatgggagggaaggcgtggggtcaagaggagcaaggagtttatatcattgatgcatgaaagaattcta

SEQ ID NO: 1979 - DNA, 2717 bp, Glycine max
actgcaaatctaaagaaagttcattgctccatgataagcgcccttttcttcttttgttgtacaactgctgattttatatatcattttaacaagacttgccaagagatatatcccttaaagccaagagcacttatgtttcgatttgagacacctctatttattccacttacatttgaaaaataaaaatattacattcaccaaactgggaaatgggaaatatcaaaacgtatagaagtgagccgtggaaggaattgtaaacaagttatgacaaaaaccagaacctattcctttgtgcctattttaccagcttttcaagaatagtacaaaattaccaagaaaaaaaaatgatgcaacgtattttcaccacatttatttttctctctcatcaatgctggcttcttctgtttcgttgcataaaattgcagcaggattcggaggatctgatgctgatggctctgtctttctaacttgtaggccagtaaagcgcgctaggtcaatccattgctgggttccccaatatgaattgactgtccgtgctacaaaagaaagcatatttacaaagaatgtttgagaagcaaactgttcagaaatccgatgctccactatcccagcaattatctgataacggagatttgcagatattccaagaaagcatgcatatataaatgcagttttgagtattggggacctcataatccgttgttcagtgacaactgctggattaaggactttacgaattgcatatagagaatttgatgaagcgacagctcctatgcttgaaataaatcccacactagcaagttttaaaccaccaaatacaactgatgcaatcctatgattgagattccagtttatccctgccggattcttttgaaatgcattgtccgggatggagccaagaagtcccattagagaaccaatgttgtcgggtgctttcatctcatcagcatatgaaaggaatgacaaagttggtgcaggaagccacactgtaaagaaatcaacaactgatcctctgacggtgtccgtaataacatagtcaatctcttggaaaaagttttctttcctcttttcatactgtgccaataatgtagttgttatcgatatagcttcttctatggctaatctgtgcaagaatttgggatctgccaacaatctttccctgaatccctggaaacggtgagtgagttctgaaatcagaggatactgctctagatcaaagaagttctgcaatacctctggtgatactaaaccaagatcaattcccttttgaagatcctgtgggagggcatctctcctctgcccagcagcattcataacccgagcaatctcagcacggtcaaagcaatttctactacagggtctggcagcagaataccacaaaaaatcagcaacaggacctccgtagctgacgcgaatgaattgtctttcagggtcaagtaatataactgcatggtttttcttttgtatttttcctgaaattcttaaagaaaatacagttcctctagatccatatgtaacatggcttgcaccagtgacaactattaacataccagtgacccctccatcaagcacattttgtaagataatctgggacatagaatactcatcaactactcgagcctgtgcagaaaggtatgagcttggaccaaaaggaatagacagattttgagtactatcaacagaagatctgcgtgagatagaagtaaagccagatatgaagcctgaaccagctggaggtgcatatagtttacgttcatcctttgtaagcccacgaattccttctgcttggacagttcttaagatcttcagtggtgtaccacaagcaacaagatgaattccattttcgcgacagtagctcagaataggttcatactcctgccatctttgaggcggccaatgcaacgtgtaagacttcaaggtgtctccatctatcttcttatccatatactgattgagcggttcctgaagattagcgggaaaaacttcaagcgccagagacaatagtttttccttctccaaacagcgcctatgcaaattcttcacaatctcaagctccaattccctatcgtctcgaaccggaacttgctctgcttcacctaaatacaccactcgagcattcatcaacttctcccacactttccctttctctttccctatcgccaacggttctcctatcaccgtcgcgtcgtaaatcctcgaagttatcacttcctcctcctccttcttcttcggcggctcctccggcttcggcgccgaagccagaggagattccgctgccttctcctccgccctcgccgtcgccgccgagagcaggattgatgcgccggcgactaagaacggcgccatcagcacgccgcgccggctgctccgagctcgagtatcgccgtcgccgtcggaaccaccgggattcgaggcggcggtgacgcgactcgcgtggcagacggaaaggctgacgcggcggcgtttggcggtcgagacgcggcggaattcgaggcctccgggggcgtcatgaggagggtccgatggcgcggcacgtgcggcagtggcgccgcggaagtaaggcacgtgcgggagacgagtgacgaaagaagaagccggagtgtggggcttcattagtttcgttggcttcagtctggccttatcatcaaccgcaacaaggtttaagttttgtcagttcacttttttcaactgcaacacaaaacacgaacaaggattcc

SEQ ID NO: 1980 - DNA, 867 bp, Glycine max
ttttttttttttttttaaaagttttatgttaaaatcgaatttgaagaggtttaacaagtaggttgatgcaagaggctaagcattaatcagaatttgaaaggcattgttatacttcttatccatatactgattgagcggttcctgaagattagcggggaaaacttcaagagccagagacaatcgtttttccttctccaaacagcgcctatgcaaattcttcacaatctcaagctccaattccctatcgtctcgaaccggaacttgctctgcttcacctaaatataccactcgagcattcatcaacttctcccatatttttcctttctctttccctatcgccaacggttctcctatcaccgtcgcgtcgtaaatcctcgacgttatcacttcctcctcttctttcttcttcggcggctcctccggcgccgccggagccggagccgattccgccgccttctcatccgctctcgccgtcgccgtcgccgccgagagcaggattgacgcgccggcgactaagaacggcgtcatcagcacgccgcgccggcagctccgagctcgagtgtcaccatcgccgtcggaaccgccgggattcgacgccgcggtgacgcgactagcgtggcggacggagaggttgatgaggcggcgtttggatgtcgagacgcgtcggaattcgaggcctccggcggagtcatgatgaggctccgatggagtggcacgtgcggcagtggtgccgcggaagcaaggcacgtgcgggagactagtggcgaaagaagaagccgtagtgtggggcttcattagtttcgcttgaatcagggcttgtcatcaaccgcaaaggtttaagttttctcagatcactttttcaacttt

SEQ ID NO: 1981 - DNA, 1917 bp, Glycine max
aacccgggcgtccgttcagctgcgtgaggcccccccccccccaacctaattgagcagcgaaaatcctctgatactgttgttttcctgaaactatgacaaccatgtcaacctcatcctcttcccaaagcctcaaaattggcattgttggattcggcaactttggccagtttctggccaagacaatgattaaacaaggccacactctcacagcaacttctcgatctgattactctcaactttgtctccaaatggggatccattttttcagggatgtcagcgcattcctcgccgcagacatagatgttatagtgttgtgcacatcgatattatcgctatccgaggttgtagggtcaatgccactcacttccctgaagcgaccaacgctctttgttgatgttctttctgtgaaagagcacccaagagagcttctactacgagagttgccagaggattcagacatactctgcacgcacccaatgtttggtcctcagactgccaataatggatggacagatcacactttcatgtatgacaaagttcggataagagacgaagctacttgctctagtttcatccaaatctttgctactgaggtaggttaaatgcctttaggcctgtttgaataaggtataagtgtttttaagaattttcttactgaaaatatagaattttttcggatagagaaatttttagaagttatcaaaaagaacttttagcctatatccaaacaggtccaatattgtcaatacccgtcaatgacgaaagaagaaagaaacatttttttcattgggccaggtaaattgtgttaatcaagacggaagaaacagagagggtggaagctaagtaacgttagacgttgagtttgcatttgataaatcaagatatatgatatctatattgggaaaaatataagtatcagtctcacatctattagagacaaaatggtcaaaatagtgtatataaatagaaacaaccatcaccttaccttaaagttggtttatgagattaaattatgcctaaattcaaatctaagattgtatcaaggcttatcaacagatcacttatcttactaccaaatccaataatactagtcgtgaaggggtgtattatcgactatagttaagactaaagtagtgtatatacttggggagcaaatctcatatcctaagtcaagtgagattaaattaggttaaagtccaaattgaaagaatctaaccatacgatcctacagccaaggttatagaacctcagggtcattactgaaaataaatgtttagtatacaattcaatctcaaaaaaaaaaaaaaaaaaagctcgaatagattcttcataagtttagcccattgttgcttgggtttacaaaagaatcacaaaattcagttatgaaggccttacatttatggactcatccctggtagatctatttcactgtgttttgttacttttgtattaagcagggttgcaagatggtacagatgtcctgtgaggaacatgacagagcggctgctaagagccaatgtatcacacacacaattggcaggacattgggagaaatggatattcaatccacacctattgacactaagggctgtgagacacttgttaaattgaaggagactatgatgagaaatagttttgatttgtacagtggattattcgtgtataacagattcgccagacaagagttggaaaaccttgaacatgccttttacaaagtcaaagaaacgctgatgatacaaaggtcgaatggggagcagggtcataaaagaaccgaaagttgatgcatatatattttataagatattttctttaattatcaaattcctcctgtagttccaatcataaattactcacatttcggttttctagtaccaaattgaagttcaaacaacaaaccaaagagactggtttatgttc

SEQ ID NO: 1982 - DNA, 952 bp, Glycine max
gctagctacctgtccgtcattcttttgcccttttttttctccctcgtttgttttccaacaaggaggttaaactccatttaagcaattccacgtcattcactaacgttgagtcatttgataaagatgatgaatcttcccgtaattgacaactcttaatcccaatatcccatagaggttagcttttccaaatacttatctaaactgtgtgtaagcacacatgttcttggagggcataaaaagtaaattgtaatacatgaaatacaactcagactttgtgcagcatgtgttcgcaataagttgaaagtttcagggcaacctccatcaatcttggatattgagttacattgggtaactgggtgccctacactaaactatctagttcttgtcttggcaaacttgggtctcgatgccttcttctccatcttttctctcttcttgcgggtcttttcatcttcaaatgattcctctgaaccccctggcaaaaatcctttaatgaaaccaaaggactggtatgctccaaaagccggtatcacaagatatgtgtaccagaactttccagagacgatggacatgacttgcacaaagcatgttatgtagataacatcatgtaaatatccacaaactccacctgtagacatatcaaatccaccatctaaaagttcaccatcttcagcgtaagcaggggtcgccatcttcgcgagctgttgatagggaataacatatgccaaagaagtcacaatcaacccaatccagtgcttccaggtgaagctcgaatggaacaccaacattcttagcaacacatagataacgttgcaggcgatgatgatttggcggagcctagccatgtgacgagcgttctcttccttgcgtttcttagcaccctgattcgccatcgctttctctcttcttcccccaacaaccgcacgctaccgcagttctgattcttcgcgtg

SEQ ID NO: 1983 - DNA, 2260 bp, Glycine max
  misc_feature (458)..(458): n is a, c, g, or t
cagtaattggtggtggattcgaaaaagatgaaggtttggagatgggtggtgagtttgatgttagtggggttactgcccgtgtcaacaatgggtcgattcgtggtggagaagaacagcctgagagtgacatcgccggagaaaataagagggacacacgacagtgccattggcaacttcggaatacctcaatacggtggtagcatggccgggaacgtaatttaccctaaggataacaaaaagggttgcaaagagttcgatgagttcgggatttccttcaaatcaacccccggtgctcttcccaccattgttctactcgatcgcggaagtggcttctttgctttgaaggtctggaatgcccagaacgctggtgcttctgctgttcttgttgccgacgatgttgaggagcccttaattaccggggactcccccgggcggcccgccccgtccgccaaatatgntggagaacataactataccctctgctctcgtcggaaaaagtttttggtctaaaattaaaggatgcctttagtggtggcgatatggtcaacttaaaccttgattggagaggagtctgttcctcaccccgatgatcgcgtcgagtatgaagttgtggaccaacagcaatgatgagtgtggtgttaagtgtgatatgctcatggaatttgtcaaggatttcaagggtgcagcccagattctagacaaaggcggttacactcagtttacaccccattatattacttggtactgtcctcatgctttcactttgagcaagcagtgcaagtctcagtgcataaatcacggtagatactgtgctccggatcctgagcaagacttcaccacaggttatgatggcaaagatgtcgttattgaaaatttaaggcagctatgtgttttcaaggtggcaaatgaaaccgaaaagccttgggtgtggtgggactatgtcactgattttcaaattagatgccccatgaaggagaagaagtacaataaggaatgtgcaaatgctgttattaaatcactgggtctcaatacggaaaagattgaaaagtgcatgggagatccagacgccgatactgataatcctgttttgaaagaagagcaagatgcccaaattggaaagggatcgcgaggtgatgttaccatattgcctactcttgtggtcaataatcgacaatatcgaggaaaattggagaaaggtgctgttctaaaggctatatgttctgggtttgaggaaactactgaaccagctgtttgcttgagcagtgatgtggagacaaatgagtgttttgacaaacaatggtggttgttggcaggataaagcagctaacatcactgcatgcaaggatacattccgtgggagagtatgtgaatgccctctggttgatggtgtacaattcaaaggagatggttatacaacttgtgaagcaagtggacttgggcgttgcaagataaataatggaggctgttggcatgatgctcaaaatggacatgcattttctgcttgtttggataatggaggggtcaaatgccagtgtcccacagggtttagaggtgatggtgtaaaaaattgtcaagatatagatgaatgcaaagagaagaaggcttgtcagtgccctgactgtagctgcaagaatacttggggaagctatgactgcagttgtagtggagatcttctgtatatgagggaccacgatacctgcataagtaaaactggcagtcagggaagatctacctgggctgctttttggttgattttacttggcgtagttatgattgctggtggggcattccttgtgtacaagtacagaataaggcaatacatggattcagaaatcagagcaatcatggcgcaatatatgcccttggacagccaagcagaagttccaaatcatgtcaatgatcaaagagcatgaaggcaaaaatgggccaatcccttggaatttcacggcaggcagcatgggtgtgacttttcctgtgccattttgaactctggtcattgaacttaatagactgtatcctatggacagtggaaaagatcgacatttagaatgttgtcctgcatgtttctttttggggattggaaatgtagcattttgtatacttggaagggcagactatgtctgtgtctgtggtactatttcactagattctgccagacatcttgttccacgcacaagatcgtaacttatcgtgctgtaatacatgcaagttaacgtcctaaaaaaaaaaaaaaaaaaagtttctgcggccgcgaattctt

SEQ ID NO: 1984 - DNA, 2443 bp, Glycine max
cggtacgcgtgggaaaaaaataaaaatcccacttcctttttcttctttttttgttctttgttttttgtttgataagaaactgcgagaagaaagtaaaaggttcaatttttacccttttttcttcccagaagcgatctctgaagccgacccattttggaattcggaaaacccagtgctgatcgctctctgggtgttcccaaaatgaagcttcggagatcttcgctgtgcgtctttctagggtttctggtgctgttcctttcgccgccgccatctatggcgaaattcgtggtggagaagaacagcttgacggtgacgtcgccggacgacatcaagggcacgcacgatagcgcgattgggaacttcgggataccccaatacggtggcagcatggccgggaacgtgttgtacccaaaggacaacaaaaagggttgcaaggagttcgatgagtatggcatttccttcaaatccaaacccggtgctcttcccactatcgttttgctcgatcgaggaaattgcttctttgctttgaaggtatggaatgcacagaaggctggagcttctgctgttcttgtttcggatgatattgaggaaaagttgataaccatggacactcctgaggaggatgggtcatctgcaaaatacatagagaacataacaataccatctgctctcattgagaaaagttttggtgaaaagttgaaggttgccataagtaatggggatatggtcaacgtcaatcttgattggagagaggctgtcccccacccggacgaccgtgtggagtatgaattgtggaccaacagcaatgacgagtgtggagttaaatgtgatatgttgatggaatttgtgaaagattttaagggtgcggcacagatattggagaaaggtggttatactcaatttacaccccattatataacttggtactgtcctcaggcatttacattgagcaaacagtgcaagtcccagtgcataaatcatggaagatattgtgctccggatcctgagcaagatttcagcactggttatgatgggaaagatgtggttattgaaaatttaaggcagctatgtgtcttcaaggtggcaaatgaaaccaaaaagccttgggtgtggtgggactatgtcactgattttcaaattagatgcccaatgaaggagaaaaagtataacaagaaatgtgctgatgctgtcattgaatcacttggccttgatattaaaaagattgaaaggtgcatgggagatccaaatgctgattctgaaaatcctgttttgaaagaagagcaagatgcccaagttggtaaggggtcacgaggtgatgttaccatattgcctactctagttgtcaataatagacagtatcgaggaaaattggagaaaggtgctgttatgaaagctatctgtgctggttttgaagaaactaccgaaccagctgtttgtttgagcagtgatgtggagacaaatgagtgtttggagaataatggtggttgttggcaggataaagtagctaacatcaccgcatgcaaggatacgttccgtgggagagtatgtgaatgccccctggtggatggtgtgcaatttaaaggagacggatatacaacctgtgcagctagtggacctgggcattgcaagataaacaatggaggttgttggcatgaagctaggaatggacatgcatattctgcttgttcggatgatggaggggttaaatgcaagtgtcctgcaggctttaaaggtgatggtgtcaaaaattgtgaagacattgacgaatgcaaagagaagaaagcttgtcagtgccctgaatgtagctgcaagaatacttggggaagctatgactgcacttgcagtggggatcttttgtatataagggaccacgacacttgcataagtaaaactgccagtcaggagggaagatcagcttgggctgctttttgggttattttaattggcttagttgtggctgctgcaggggcataccttgtgtacaaatatagaataaggtcatatatggattctgaaatcagagccatcatggcacagtatatgcccttggacagccaaggagaaattgtaaatcacgtgagcgaagaaagagcgtaaaaggaaatactctgtgaagcctgggtgtggcttaccctgtgtacccctttgagttcagattctgagcatttgaatttgatagactgtatcatatggacaataaaaggttcagaattagatagttatcctacgtttttattggggatgtagcaaatagtatacttaatttaggccagacttttttaagttatttcatttcactagattctaggatttctgttcatgtgacttcttgagttccacacttgtgattgtaacctttcgtgatttttcagtacaggcttaaattaaaattgttttttttcttcccaaaaaaaaaaaaaaaaaaaaaaaaaaaaaaaaaaaa

SEQ ID NO: 1985 - DNA, 1398 bp, Glycine max
ttcttttttttttttttttttgaaaccaatcaaattcattttaaattgtaggctcttccctgttgaagatcgtaatttaatatctcatcaatataaaccatggtatttcttattatagatgccatatctgatataaggcatatgttgaacatgacaattgtaatgtcgttgcatctcaaatacacaaataaatgtcaccaaaaaaatttcaagtacaaaactaaacattgaaacaatgacaataagttgctttttgaaactgtccaatctccagaaacaccgaaagaacagctagccttcagaagtataatcagacatactgttgtagtttactaccacaaagccaaaattcattgacaatttcgtttccactaaagaaatgagggtaccaatagcattgttcaggttacttcttatactgctttacctctttaataactccatcggcaagcgaatcaacatcattgttcttgccaaaaaactttacaaatttcatttcaggactcatcaagtatataactatggagtgatcaacaagataatctgagtcttcctctgctgtcttcatgtaataaacacgatatgcacgagcaacattcttgatctcatctgggctaccagttaatccaattaactttggatgaaattctttgacatattcacccacttgttcaacagtatccctctcaggatcaacagagataaaaaccggtacagtttcaattccagctttctcctttattttatcaacagcagctgctaacttctgtagttcctctggacagatatccgggcagtgagtaaagccaaaatataacaaagtccactttcccaagaaatccttttcagttacatgttttccgtgatggttgacaaggtgaaatggacccccaattgcagctgttcctacagaaggtccctgcttaacagcctctgtattagaacgtatcccatagtaatctaccttcaatatgtcgtttcttttccctgtcatagtagaacaccaatccagctccagtgagcaccagcaagagaaagcgccacccagcaaccggccctccacgaacggatttcccagcatcacttttctgaccctcatctcctccactcccagactctttcccttggccagaaccatcttttgcagagtgatctgaatctgatgctggtttttctccactaacattagcagcaggaggagaagaagaagaagatagaaacctttgacacaacctcaacgacccatttccataactttgattccgaaccttgtaagggtgatggagtggttgaagatgagaagagaagggtggtgaaagcgtggagggtctgccttggcgaagaaggtgtgagaagagaaggcgcgtggaatagcgaaattggttggctttggtggat

SEQ ID NO: 1986 - DNA, 2091 bp, Glycine max
aaaggacctaagtcttgaagtggtctttcaattcaagtacaaagcttttcgaaccccaagaagtcgggccactcgttaccaatttgctttccattcatctacaatattaattactaaggaatatttgaaggatcaaggattggattggtttgcttccaattataaatgggataatcataaagctgctgctgcatttgccataaaatgttacaacatattattagcaacacacatcgaagcatgattattgtacaaaattttttaacagcgtcttagttttaagtattcattatgcgggtacacttagactccgggtattggatactgagtagtaagagcttcaactttcctacgcaactctgataccttctctcccaaaggaaattcagaagatgttacaaacttcaaaaaatcttggagcttcgttcctgagaccaaacttttggcttcaagacttatttgcacaccctcatgaatgaaatcagcaatgagtgaaaattctttctcaccaagtcctcttgttgtcattgctggtgccccaatgcgaatgcctcctggaactagggcactcttatcaccaggcactgaatttttgttgagggttatagaagccaagtcaagaattttctccacccgagcaccatcaagaccagatggccttagatcgacaagaaccaggtgattgtcactaccaccagaaaccagtttatatccatgctcaattaatcgcttagcaagagctctacagttagcaaccacctgattttgataatttttaaattctggagactgagcatacttcaagcaaactgctagtcctccaattgtgtggttatgaggacccccctgtagaccaggaaaaacagcattgttaatggcaggctccaaatcaaccccatgcacagtatctttcttgaagaatatcataccacctcttggacctcgtaaagacttgtgggttgtggtggtcacaatatcacaatactcaaagggattagaaagtacagatgcagcaacaagcccacttatatgagccatatccatcataagaaaagcacctacttcatctgcaatttttctcatacgagggtagtcaatgtcccgaggataagcactagcaccagcaacaatgagttttggacgaaacagagtagcagttttctccagcatatcataatcaataagacctgttgattcatcaagtcgataaggcatagattcaaaataaattgatgtggctgatacacgttttttgggtgtcatgaatccatgagacaaatgtcctccgtgaggcaagtccaaacccattatccgatcatgtggtttaagaactgcagtgtatactgcaaaattagcaggggaaccagataaagtttgaacattaacaccccatttgttttcatctacatgaaatgcagccagtgccctttgttgacataggatttcaagctcatcaatgtactcattgccaccatagtaccttttacccggcaatccttctgagtacttgtttgtgaggcacgacccaactgcttccatcactgctctagatgtaaaattctcagaagcaataagctcaagacttttaaattgtcggtccttttccttgtcaataattgcacgaacatcaggatcagcttcactcaagccatagtccaggaagctacttccgtcgcctccaatttcaggcacagagaaaggcacagatgacggcttcccagtgactaaacttgcttcaacatgagaagctttggatggcttaatattgcagaacctcacctgaggtagaaacccgttattgctgccatacccttttgcagggaaatttaaccctttggtccaaataggttgttgctgcaaagaactcatcgttgtacaagcctgcatctttgtcttcagaaaaatttcacgtcagcgttacaaccctcttccaaataaagctgaaaccaaaatcaatggtgtgttgagggagagagtgagaggaggaactattgcacggtggctccaatggttcggaccagttagggttttaagaatttcaaagttgagtttttttgcccgttcgggcggggcgggcccccgcgccgctga

SEQ ID NO: 1987 - DNA, 2165 bp, Glycine max
  misc_feature (1)..(1): n is a, c, g, or t
  misc_feature (1335)..(1335): n is a, c, g, or t
  misc_feature (1359)..(1359): n is a, c, g, or t
ngagaccccctgcagcctcatacttggcatcttcatgactttttgcaggatttaacaaaggcaacattcttatgagttgtctcattagaatctttggtttagagcagtgagtaggatgaacggatggttatagaactaaatgacagataacattcttgttttgctatacttaagagatcaaacccgggttcatgcctttctaaatgaagctaggcgccacaaagttaaaaggccattgacaatggatgatttcttttagatgtgaaacagtccttaatgattcatgaatgtactaaagattgcagtggtcaagcatatgatgcagtaatttcaggtagagaacgcatatagtaaaattatcaagaacagttgaccaaataatcttgaaacatatgattggattcatcatattctagaaagtaaaattatagccttacaatataaagactaaaattgactttatatgtttaaaaaaaataatccatttttcatctttctaataacttatcaattacaaaaaaaaaaaaactaatacagaaatacagaatgagatataataaaacagaacttgaaatacagaatatatgtcacctaaaaaatctggtttacaattggtaaggaaacaattattgtacttattccaggtccagtcagatttgatgatgatgctggaagcaattcgttcacacaaaattatgtgcggaagagatatagcagaatcaagattattcttccttcttgttgttttattgtataagcccctaagctctaacaggtttctgaaggacagcagataacacaacttcaggtttgcctgagccaacactatcaaccttctctcccacaacccatttcaactttttatatccaaacctttcaatcaaccgagtcaaaacttgcttcttctcttcattggcacaaaagaagttatccagccagaacaaaccaccagccctcaaaactctatcaatatcaaacataaaaaactccaacttctcactcttccctccaacatccaagccacttgaagcatgaaccaagtcaaacacattgtcatagaaagggaacctatgatccaagctcaagtaaagaggaaaaagccctcttgcagcaatgaactcactgaacggggcttcaacattgagagtgctagtaaccacagtaacattcctatccgccattctagcagcaaaggatccagaccctccaccaatgtcgagccctattctaacccctccacctcccaaggccaagacatcgtcaaccagaaaatcattcttactcttagccttaacaaacctaacattctcattgccatgaaccaaatcaaagcanccaacgcactccctactcaacttnttaccattcaaacactcaaaattcttacaattaaggccactccagttaacagtcttattaccaacaggcttccaaagagaatccggaaaggggtacaaacctaccttggaaacagtctttgcaaaacacctcctcctaggcagaggctcacacccttttaagatcagcttctgtgccacactccaatcatcagggcaagctccaaaaaccttgtaattcatgaactgagacaacaagtctgaatttttctcacaggtgtggccaacagatggcaccatctcagtgatcccagttctagagtctttccccagagggagctggtggcgctggaggaagagtttgagctcggatgcaatgttgggtctcgaaagatcaatgctttcatatcctagaggctctttctccatctgggccagtttcttctgggacaaatcgatctctctgagaatgagtgagacttgttcagagatgagagagatgtttttgtgggcattgtggtgaaggagagagtgatgggggtgttttggggaagccgtgaaagcatagagagcaaataggttggtggtgatgacagagaatatcatgagaatgttaacagctgaagaacacagtgttgctctatggaatctggctgttccatctcctactttcagagaaaccgaacccatcttagtcctttcagagagagagagagagatcagagtcactgaatcagagagtgaggttttgaagtcataaattattagattagatttgtttggagtaagtaagtgagtgagtaagcaagaaaccttggtttcaaagat

SEQ ID NO: 1988 - DNA, 1350 bp, Glycine max
  misc_feature (1341)..(1341): n is a, c, g, or t
  misc_feature (1350)..(1350): n is a, c, g, or t
tttacccttgtgctatctcagttaatcttcttactaattaattaaagagcacaagagagaagtggccgggcagctataatggagcattttattttcagccactcaattttgagttgaatgacatttcattttcaagtcataatcggagcatttttatggaacagcctctcaattttgagtacagtgatgatcatcaaagcaataaaaaccagcacggagaccatacatataaccagcattaaccaagaggccatgccactttccacctcttgagcatattcagcacaagctagtccaaggaaggttaaagggaatgaatacgcccaccatgtaacgtttaacctcttcatggatttcttgaacatggctggcctgcaagcctgagacataaacaggaataaagacagaaagaggagcatctttgatggggtgacaaaagcacctgtgatggatttccaggctagacttgctatgcttggtgcagcaaaaaacaacaagtaagttggccttagcactgtggggaactggctgccacttgtcagacgctgatacagcgttacaaatataattagataatataccaatccgagtgagaacattaaaactgcactctctttccaaccaatttctgcaacaacttgagcagacaccaagttccctataaccgacaccaggctagtagggtttgccacaactgacagaaacctctttttagttgtgaaccattgtccatatagttttatgtcaagcagcaatattacaaacgaaaaggccaagcaaagaactccgtagcaagaagttgaatgaacgatgatgggtgctgattgaagcatgagaagccaagaaatccaaggagcatacatgcagttcactccaacatgatgtgagaactcctccttcaccatgtccaagtgaaagatgcacttgagcacgtaaagtaaagacaaagtagtggcagtgagcagtgccacacaccaaagtagtagaaacgcaatggaaggcatcaaattgaatccatgccagagagtttgtgagtccttgttgtgtttactcaaactcttccagagcaaagcttgtgcaccaaaggaaaggcatatgaaaaagtaaccagcatggagcttggtcaagattggtaagtgtgattgtgatgacttggtgatgtcggttgggagggtgtggttgtttgcgctattgttattgttcatggaagcacatatgactacttcaactgatggtttgatctcagtgtcacccatcatattgctatagcaataggagtgattttggaattatattatgtgtgatattgtctcactccccccggccgtaatggccgaattnccctgggtn

SEQ ID NO: 1989 - DNA, 2512 bp, Glycine max
  misc_feature (2385)..(2389): n is a, c, g, or t
ttttcttcctttgttatagaatataaaaaaatcaaaattagcatccttgttatctgctacaccacaactaaaataataaaactatcaatgactgcaacagaaaataatgacgggattctcccaaaaatatatgtaatatataatagaagaaaaaccaaaaaagaaaaaaaaatattatgaaaacatactctgcaaacgccccaaatatcaccacgaatattacatcccaattaaaaaaaaaaatcatcacctaaaataagagaaacctcaacctcaactcacacttgcctccgagaggaatctccagtttcttctatgtagggtgaagcatctgattcttcagccaaagattccaacatgcttgttacctcagttgtatcatccaaataatactttgctttgcttggtttttgtccaaccgtgcaagcaaacacagaagcattggtggcaagaatattccttgagatggcactactaactatctcaaacatgtcctcatctgatctgtcatcaccaacacacaacacaaagtcggcctgtttgcccttcccgtccattgacgaaaatatcttctcggcgactaagcctttgctcacatcctggggttttacttcaacaataaactggccactcttcacagcaacaggctcattggccaaaacactttctagatgatctaacatttccttagcctgagcagatccaaaaccaaggtctgcatcacggtattgccagaccaaagcactttcttttctttcaatagaggaaccatcagtcgcctctgtatagagtttcattacaggttcagcaatctgcatccatccaaagtcggagctcttaccacaattttcccattctcgattgtgggaccatctcaagaagtacccatgttctgcagcaattccaagtttttcacaggaattaaaccagtcacttaagctattcctcccccgtccactaacaatgaaaacaacatttttggggtcttcactaagtgattccaaaatagacaagacctccttgcttggactcttattaatggagttctgtggcatcacagtaccatcatagtccaacaaaatggccctattctttgccctcttgtaagctgaaaccatagcatcgattgagagctttttaaaattagggtcaagtgccacaactctaaatccaaagctaagacctattccccaacatctttttccttagaagggtctgtgcaagccccgctccatgtcttgcaagaaactacgtgaccagtaagccacatcatgagtgctgacataacggtaatgcttctcgtgccgcaactgtttctctccatcaccagttgagatggcctcattcattgcctctgaagttgcttcaacattccatggattgacacggattgccccactaagtgatggagaacacccaataaattctgatattactagcatactcttctttgggtcactgacattggaacatgattcagaaccagatattccctgtctacatgcaatatactcataaggagttaggttcattccatcccttacagctgtgacaataacacactcagcaatgcagtaataagcaactttttcagcaataggaactgctctatcaataaaaacaataggttcataaccaggtctcccaaacactctgttgatcctgttgcagctttcttgtatttcagcatgtatctcctccagatgtatccctttacctctagcaggattaactatctggaccagaacagctcttccttgccatttgggatgctgtctgagcatctgctccatagccaaaatcttcaaatttatgcctttgaaaatgtccatatcatcaataccaagcaagatggtttttccttcgaattgctgtttgagctcccttaccttgcattcctcatctgccattctcatgactgactcaatccgacccatgtgaatcccaacaggcataatcttaatactgattgtccttccatagtactccaatcctagatagcccctctttgactgatactccagacccaacatacgactgcaacaggaaaggaaatgacgagcatagtcaaaggtatggaatccgatgatatcagagtttagtaaagctttcagtatctcttccctgactggaagagtcctatatatctctgacgatggaaaggggctatgcaggaaaaatcccattttaaccctgttaaaacgccttcttataaaagttggtagcaccatcaaatgataatcatgaatccaaatgtaatcatcctctgggtttattatttcaactaccttctggcaaaatagcttgtttgccagcacgtaagcttcccataaagagcgatcaaatcggtggcttttatctgttgaaaatggtagcatgtaatgnnnnngtggccataactgccgtttacagaagccatcataaaattttgccaagacatcagcgggtagaaaagttggcacacatttgaatttatccaataaatactgtgatacgtcatcctgttcagggg

SEQ ID NO: 1990 - DNA, 1527 bp, Glycine max
aagttttttttttttaatttatcactactgtatttcagctttattttattgatatcagtaaaaatccaccccatatgtaagaaaaaaaacagaaggggatagaagtcacagaactgttacagttatatagtcatatagattttaatcctcattttagacaattgaaattgaaaaaaaaaagccgaaaaaaattcaaaattttatgggttattgtcatcatgaaaaaccactgccaaaccagtcacaaccttcacgccggaaagcgaacccttaggtttcaactccggtggcttccattcgacaaccgccgtgttatcttcgccggaactctctgactccgcggtgtttaaattgtccttaaaaagctgttgttgttcttcttccttcttcttctcctctttgatatcgtgagtgcgcgtgtaaggggagagccacttcgctttcacgtattcggttctcctccatggaggcacgtgcattcccttcttcttcagactctgcttcgctgcctccgacacgagcgccacgatgctctgcaaccgctcgcacgtgccaacgaatatgtagggaaggttctggagaatcgtcttgtacgctttggtggatcgagcaatctcgaattctgacctgaagtcaatgtcaataacaactcgctctttccccatcatcacatctatgtattcatatcccccagcgggatatgaaggagatttttcccagcgagatttgcaaatggaagcatcgtatccgagggctaacaatccgtctgtgacaatttttctgcagaaactgtctttgcgcttgcagatcttattcttctcaactatcttcgcagtgtccgcaagcaaactcctatcgcgcacgctcgcgcacgctaccaaacccttgagagtttcgcaggcctcgccggaggagaaattggagtcgccgaacgagttcgagtcttcgtccgagctgtcgtcgtagttcctgttgaagcagttacatcggttgcggtggtgtgaagcggagtgcttctcgtgactctcctcgatgaaactctgcaccattttcgccaaacacgccgagctcggctcgaaatcattggagccgttaagcggttcatcgcctccggcaatcttttccggcgccgaatttctgagaacgccagagaattggcgctcgaggagccgcttcagtcgtgacttcacaaccggcttggctagctcaagccgagtcccttcggacggaacctgggaatcaattggctgaattttcatcggaaaatgcatcggcgataacgacgacgacgacaatggtttagaactgaaactcacactctcacttgttcgtcttttccattaccgattcttgagaactcagaagacaaaaactgtgtaaaaagcaattaaacctctaagttctgcgcaatcacctttctcgattctccgtcttcgtttttaaaatttgaggacggagaaagtcagaaaaatccagaaaaaggaaaaagtaaaaaataaaataggggggggggcctacgtagctgaa

SEQ ID NO: 1991 - DNA, 1319 bp, Glycine max
cccgcgtccgttttcgggaagaatatggtgctcttggtggtgctggcggggctggtccagttgatctggcggatgtcgttgaaatccggcgatggcatggctggcgggtatgtcgggttttcggaattcgagggccggatttcggatgtggaggggctgttgaagaagacagccaagatgattcaggttcaagttgatgtggtggataagaagattgaggatgaggttagagggttaaggagggaactaaatgagaaaattgaagagaaaggggaaattttggaaaatgggttgaagaaaatggaggcaaagaatgaggaattggagaggtatttgagtgagttgaagggggaggattggttatcaaaagaggagtttgagaagtttgttgatgaagtgaggagtgtgaaggggagtgggtatgagggtggtgggttggatgagataagggagtttgcaagacgggtgattgtgaaagagattgagaagcatgctgctgatgggcttgggagagtggattatgctcttgccagtagcggtggcgcagtggtgaagcattcggaggtgtttgatttggtgaggggcaattggttcttgaagtctgctagaaatggtgtccaccccaacgcggagaagatgttgaaaccgagctttggtgagcctgggcagtgtttccccttgaaggatactagagggtttgtgcagatcaggctccgcactgccatcattcccgaggctgtcaccttggaacatgtagcgaagagtgttgcatatgatagatcaagtgctcctaaagactgcagagtctctggttggctgcaggagcataatgctgattctgcaattgatactgaaaagatgcatcttctatcagaatttacatatgaccttgagaagagcaatgctcaaacattcaacgtgttgaattcagcagcttctggtgtaatcaacatggtgaggctcgattttacatccaaccatggaagcccttcacacacatgtatatatcgctttagagttcatggtcacgagcctgactcggtttctatgatggcattggagtcataatgtgcatgtcttgtttgctttgaattttgtcaatttctgtgtaattgtccagtgtattttctttagatgtaggataggatgtcatggactccttaattactagatgcagaaatttaacttcgtattgctgcttcaaatggactttgtatctaatgtatgatttgagttaggcagtcgataaaaaaaaagtattgcaaagcaatccctttgtcttttaattttagtgcaatgatactaggcaaatcaagtct

SEQ ID NO: 1992 - DNA, 1847 bp, Glycine max
ttttttttttttttttttcatcagcgtttaatatgatcggacaacaaaatactataatggataaaattattccaacatacatgacacaccaaaccaaacaatacagcgtataaactatactatactatactataacctaacactatcatgtcttataagttataacagagaggccctagaataaccagaggcacatgtctgacataaatatacatgaaaacgttgtctcctgaacaaaaatagaaaacaactcctttgacaataaagaaaggaaaaagaaacttttcatattatataataatataatcctaggaactctttctgtggagtttttctcggataaaccggataatttacaacctgctagtaagtgacgacaacttggggggtggggatggggggcattgctaggtgtgcaaagccataaataagttctgtttacgcgcatgctctggtataagccgattgatgacatcagggggtacaccagaaagttcctgaggtttaaaattaaacagtggaggaagtggtcgagcattaggaaggcgggtgtttgggtccctcaattcatcaaaaaatggatgaatgcaagcttccaatgcagtgcatctcaaattgggggagtactgaaagaacctacagacaaggtccactgcttctgggggtaaacgtttctgaaagaccttgtgccacggatgaggttttatctgtggaaacttaaattcagtataatttgggttcatgcactttatctcctccctggttggagttcccaaaaccttgatgatttcaactagctgatcaactccactctctccaggaaacaagggctgtccaagaagtaattcagccattacacaaccagttgaccatatatctatggcagttgtatattcggtggccccaaatataagttccggagcacggtagtatcttgaacagatgtaagaaacattaggttctcctttcaccaacacttttgcactcccaaaatcacatagtttcagctgatgagtgtgcgggttcacaagtaggttctgaggtttgatgtcacgatgacatataccaatgcagttatgtatataagcaagggccctgcaaatctggtaggtataaagctttacatatattaaaggcattcgctggttaatcctgctatagctcctcgcaatgcgattcacagtttcaggaacatattcaagtacaagattcaagtaaacttcttctttgtcagtcgttgaaaagaaacaatgccttagggcaacaatatttggatgatccagcatttgcataatttgtaactctctattcttgtatcgtttgtcctggagaactttcttgatggccacaatttctcctgtttctctacattttgcctgaaaaacaacaccaaaagagcctgtccccactacatgctctgcaatataactaacattctgcttagactgaccatttcggccaccaatgctggttcttatgacgtgacctgtctcagcacccacaccatcaatgatgtcaggctcactatctctatcgtcttcgtggtctctcaacctcatctcaagcatctctctgccaagccaatcgacggaactggaagaacccctgaagccaccattaacagacctcgaactgccgaccccaccacttccaaggctagcagacgccatcgaccacgatcctctattctttcttcaactgcaggcaagtgtcagtttgtggtgagaatgagagcagcgcaattgcaatagcatcttactctttcactttcaaccgttcttttcacttcgatttccaattccacccattcaacaccatctctctcagtgcctcctccctctatctat

SEQ ID NO: 1993 - DNA, 1215 bp, Glycine max
  misc_feature (5)..(5): n is a, c, g, or t
  misc_feature (173)..(173): n is a, c, g, or t
  misc_feature (228)..(228): n is a, c, g, or t
  misc_feature (248)..(248): n is a, c, g, or t
ttccnatgcagtgcatctcaaattgggagagtactgaaagaacctacagacaaggtccactgcttctgggggtaaacgtttcttgtgccatggatgaggttttatctgtggaaacttaaattcagtataatttgggttcatgcactttatctcctccctggttggagttcccnaaaccttgatgatttcaactagctgatcaactccactctctccaggaaacaaggnctgtccaagaagtaattcanccattacacaaccagttgaccatatatctatggcagttgtatattagtggccccaaatataagttccggagcacggtagtatcttgaacagatgtaagaaacattaggttctcctttcaccaacacttttgcactcccaaaatcacatagtttcagctgatgagtgtgtgggttcacaagtaggttctgaggtttgatgtcacgatgacatataccaatgcagttatgtatataagcaagggccctgcaaatctggtaggtataaagctttacatatattaaaggcattcgctggttaatcctgctatagctcctggcgatgcgattcacagtttcaggaacatattcaagtacaagattcaagtaaacttcttctttgtcagtcgttgaatagaaacaatgcctaagggcaacaatatttggatgatccagcatttgcataatttgtaactctctattcttgtagcgcttgtcctggagaactttcttgatggccacaatttctcccgtttctctacatttggcttgaaaaacaacaccaaaagagcctgttcccacaacatgctcagaaatataactaacattctgcttagattgaccatttcggccaccaacgctggttcttatcacgtgaccagtctcagcacccaaaccatcaatgatgtcaggctcactatctctatcgtcctcgtggtctctcaaagacatctcaagcatctctctgccaagccaatcgacggaactggaagaacccctgaagccaccattaacagacctggaactgcccaccccaccacttccaaggctagcagacgccatcgatgatcgatgatcgatgatcgatgatcgatcaccaacaatcctcccttctttctgcactcatcagatataatcactcaagttacactttgtggtgtcttactctttcactttccacccattcaattctacaccatctccctctatt

SEQ ID NO: 1994 - DNA, 1066 bp, Glycine max
aacattataactctccatataaagatgaatcatagcgccccaaaagaaactgaaagccttctcttaaacttacatttgatactttattatgtgaaaagaaatgaaaaactaataattaaaatatgtgaatgaagtaaatgtataatacacaatagattaccgattaaccaaaagaaaaggagaaaaattaggtgtttcttccataactcttgaatccccaaaatggaaagtcaggaatagccctgaagaagaaactcctgtcatggacattaggaaccagttaggtaaccaactagatgaaacacgtccaaatcctgcaatatgaaagcatgagttttcacttctaggaagccaaattactgcacttaaaaagcacctccacaaaaacacacttcatcgtagacttggaatgttctgaagatgcaagatgcttagcttccattacttcttgccctgcttctttcctttcttcttatctctcttacttgatggccttggccgagacctctgttttgcaaccttcttgaaagatttcttattacttataggtaccccttgccttttatcagacacaacagaaggagggatcactgctgcctccttcctctcactaggataactaccgtcctcagggttgatctcacttgttacaacagtgactttcagatcatcattctcgtatgtctttgtttcagcaatagattcaacttgctcctcggtttcttcttggtccccatcaatttcatcaggtggtggcacgcctccattaagaacatgttctctttccaacttcctccttttgcgttcctcggtgcgtttgcggcgcagagcctcgttctgttgcttctgggcttcctttcttctcttcttcttgcgcttgtgaaagccggtgacgtagtcagtgagatctttctcgttgaaagtgatgcccaaagctttgttcttcagagccctcttcttcaggtgcgctcctttgcgctgttgttgcactgcctccacttccatcccgcaatcaaccaaaacctagattacacaactccttttcttttcattgctactgatgttt

SEQ ID NO: 1995 - DNA, 994 bp, Glycine max
  misc_feature (2)..(2): n is a, c, g, or t
  misc_feature (4)..(5): n is a, c, g, or t
  misc_feature (9)..(9): n is a, c, g, or t
  misc_feature (24)..(24): n is a, c, g, or t
  misc_feature (29)..(29): n is a, c, g, or t
  misc_feature (32)..(32): n is a, c, g, or t
  misc_feature (35)..(36): n is a, c, g, or t
angnngagnccccccccggggcgnccgtntanaannagggttttttttttttttttttgtacgagaaccattaatagtttttagaaaatgaaatgaaaataaaggttcgagccttttctacgaaataagctgatgaaatatgggaataaattgtgctctaaagctggtaaaagcttgattccctcagttctattttaaatgtcttaagtatagaattataaaccatatccaaatatatgttttctcatccaaaaagttttccacaaaaccaaagttcatgtctccatattacttgctcttctttggttctttagtatattgaactatcaaagcttcaacatccttccagaacaggccctcaactaagactccgtccttagtgaaccactgagtgacacttttggtgaaatgtacttgatcatttgcagaaattgattttggatctgcgcttgctatagtgagtgtgtacatgtcagaaaacctaggcaatttggaggaaaccaccaaaccggtactagtaaaggatccaacaggaggataagtgaacagaatggcatttttctccttagtgtatatgatcagctgcaacaacccattgaagatcacatacaaggcgatgcaggcgatgagaaaatccctattttcagggaacttcttcttgtagaattgggcgaagagagcaatgacgatgatgattgccccaatgagaagcctcacattgctcaatctcacgtcttccacaaacccacgactcgttaccacctcggagactgactcgtcgaggatgtgcttgatggagtggtgatcgaggagattggccttctttggagctttggacgccatttttctgatctcttctccttcttcgctctctgttttctttcttagacttcaattgacccaacaatgaacaaatcttggcgttttaagttttctccctggcgtcaatgctaccaacagaactcgcttcgctactggctagactactgtcacc

SEQ ID NO: 1996 - DNA, 1035 bp, Glycine max
tttttttttttttttttttttttttttttttttttttttttttttttttttttttttttttttttttttttttttttttttttttttttatgaaaataaaggttcaagccttttctacgaaataagctgatgaaatatgggaataaattgtgctctaaagctggtaaaagcttgattccctcagttctattttaaatgtcttaagtatagaattataaaccatatccaaatatatgttttctcatccaaaaagttttccacaaaaccaaagttcatgtctccatattacttgctcttctttggttctttagtatattgaactatcaaagcttcaacatccttccagaacaggccctcaactaagactccgtccttagtgaaccactgagtgacactgttggtgaaatgtactggttcatttgcagaaattgattttggatctgcgctggctatagtgagtgtgtacatgtcagaaaatctaggcaatttggaggaaaccaccaaaccggtactagtaaaggatccaacaggaggataagtaaacagaatggcatttttctccttagtgtatatgatcagctgcaacaacccattgaagatcacatacaaggcgatgcaagcgatgagaaaatccctattttcggggaacttcttcttgtagaattgagcgaataaagcaatgacgatgatgattgccccaatgaaaagcctcgcattgctcaatctcacgtcttccacatacccacgactcgttacgacctcggagacagactcgtcaaggatgtgcttgatggagtggtgatccaggagattggccttctttggaactttggacgccatttttctgatctgttcttcttcttcgttctatgttttctttagacttcaattgacccaacaatgaataaagcttggcgtttcaactctttcaatgctaccaacagaactcgcttcgctactggctagactactgtcaccgggggggggcctacgtagctgactcccaagttccctcgtgccgaattcggcacgagg

SEQ ID NO: 1997 - DNA, 2460 bp, Glycine max
tttttttttttttgttcaaaggaaagaaaatatagttgatttttatggctaacttcaaggtatcgtctagtacatggaagtaaccaataaagatcccaaaatacatcctcagtaagatcctcaaaaagagctggtgcatgttacttctatgtcgagaagaactgattatgtgggaacaattaacttagataaccgaaaagcaatacaaacatctatacaatctgccgtacaacaagcattaagatattatagttagttctccaacatccacaatagtaaactctgctttcgtccttcgatgacacaacttactgttcattccgaagcaaaatcaaaaaagggctccagcgtcttcaataagcaacctatccacttcctaatgctgcaaatagtgagcctccagctacaggtgttacttcctactgctacaattatctcttccttagccagaataagatacaatctttcagcagtgctacaatattgtccttcgcattcgaagcttcatgaaacttttcagtctctgccgctatcttcatcaccgccatcagcattaacatcaacggtgaaaccatactcctgatcacaacccaagtatgaatcacacatgaaataaagcgaataggatttccttccagcatcagcaggagcatcaaattccagtttggcttttaatttccgctgcagggaaacccgtttaatggcaagcaacagattggttttggtatcaccaacaatgagccaccacccttcctccttggcttttggatacctgggagcgtcaacaggtcctacttctgtccttccctcaaaatcccgctcaagagtgaccagcacagtgacaacctccccagcccgcacattgtcactgtccagcacctcatatgacaaatcaatattagggaatcggttacaaaatcgggcaatatccaacaactgcaaatctgacatgcccaacaatttttgcctctcctcatcctccatttctaataaatcaaacacagtttctatactcttccctgggttctcctggcatttcttagccagatcctttgtgaaatgaggaagttgaagcagcatggagtcgcgttcccacattccctgtgtcaccatttgactgacttccatagcaagtaaggccaggctcagccaaccgttgctcgatatcacatctaccattgcctgaagcagtctatttgcagaaagaagcacctccttctggtccaatgcaaggttcccaccaacaaattgcctagagaaatgggcctgaagcaaagcattagctttaacatgcggatctgtaaccttggggttttcaaaggaaaacctctggtgattaattaacttacgaacaacctcttcctctccaggtcgtattggaagctgagcatactctgaagctgaagacagaatctccaaaagacccttcattttagtttttgaagtcacagatgatgaaaacctttcaattgttgtgtaactgatgtaataataggatgcaatcattccaagattgagaggagcaagctccatatcatcctcaattgtaatgcacttgcccgcttctaaatcactcaaagtattttccaccatctctgagaggtgatcagaaagatgtctgtgactaactccttgcaagttgtaataattgggattctgtgtgagccgcctgtacatgaatgtccacgtaagataatctacagcatcttgcttgttctcaataattccagcaacaatttcagcgttcaagttatcatgcaagaagtgatgaagatggctttcaaccgggaatgcttcatataagaacttcttgtagtactcctttcgaggagcatggcacaagatgacacattttccagaattgtctaccaaaggacggctggcatgacccatcatctgcagaagatcagtaacggggtaatctgtctgtgcattctcccgcccatcatagtattgtgtgcccatcacaactaccaaatgagccgataatgtcactccccaacacatggaactgtttaaaacacagacttgtatccagccagcttcaaatagctgagtcacaatgtcacgatcaagactgttcaagccctcatgcaagtatccaactccttcacgtaaagtaactttcaacatttcgtcagtaatcttgtcaagaaaaggttcaagctcttctgctgaccgcaataaaaatggcttctccccactgtctgcacctgagtatgtaatcagatccacagctgtcagtcggacatgtttccttgtaggtacaaatacgagggcaggttttccattcttggcatgttgaacaattgcagtgtaagttggcttggtcattgcctgcatccttgcctcgtatttgtacctacaagaaaaggttcaagctcttctgctgaccgcaataaaaatggcttctccccactgtctgccgagccgaatcgagctacgacgctgcaggacgtc

SEQ ID NO: 1998 - DNA, 1585 bp, Glycine max
  misc_feature (1455)..(1472): n is a, c, g, or t
  misc_feature (1474)..(1478): n is a, c, g, or t
  misc_feature (1480)..(1483): n is a, c, g, or t
  misc_feature (1487)..(1492): n is a, c, g, or t
  misc_feature (1495)..(1504): n is a, c, g, or t
  misc_feature (1506)..(1506): n is a, c, g, or t
  misc_feature (1508)..(1511): n is a, c, g, or t
  misc_feature (1518)..(1518): n is a, c, g, or t
  misc_feature (1527)..(1527): n is a, c, g, or t
  misc_feature (1529)..(1530): n is a, c, g, or t
  misc_feature (1534)..(1534): n is a, c, g, or t
  misc_feature (1541)..(1541): n is a, c, g, or t
  misc_feature (1548)..(1548): n is a, c, g, or t
  misc_feature (1554)..(1556): n is a, c, g, or t
  misc_feature (1567)..(1567): n is a, c, g, or t
  misc_feature (1576)..(1577): n is a, c, g, or t
  misc_feature (1581)..(1581): n is a, c, g, or t
  misc_feature (1583)..(1584): n is a, c, g, or t
ctctatgtaccgcttccaagtccttcctcgagtcagctacgtaggccccccccccactcttctccacttctcaaactttgtaacttcaaaacatactcctctgttctctctgtttctcttcaatcttcctgaaaaaacaaaaacacgaaaaatcatccaccctctcacattctctctctctctcctttcaactaatatggcaattgaaaaccaagacaacactgtcagagaaatcaagccaaagaacaggagaatcatgggtgctggaggccctgatgatgacgacaataggtggccaccgtggttgaagccactgctgaaagagagcttctttgttcaatgcaagttgcatgctgactctcacaagagcgaatgcaacatgtattgcttggactgtatgaatggccctctctgctctctctgcctcgctcaccacaaggatcaccgtgcaatccagattaggaggtcctcataccatgatgtgatcagagtctctgagattcagaaggtgttggacatcactggtgtccaaacctacattatcaacagcgcaagggtggtgtttttgaacgagaggcctcaaccaaggccaggaaaaggggtcacaaacacttgtgaagtctgcgaacgtagccttcttgattctttccgcttctgttctcttggttgcaagattgttggaacatctaagaacttccagaagaggaagaaacagtcaatgttaatgtcatcagattctgaggactcatacagcagcaacagcgtccatggccttaagaaaaacttcaaagttcagagcttcacaccatccaccccacccccaacatcggttaattacagaacggccaagagaagaaagggaataccacaccgtgccccaatggttggactaatcatagaatattagatagttggtatttttaggttattggctacaatgcccttaggtataaaaataccatagtatactaaagcaagtgtttcgacgtcgtttcatcaaagtccaatactcgagctttcctagggccggtatttggaagtgtcaccgtccgtctttttatttttcttcttgtagtggtttctagcgttttgtatatatagcaaagtccaacagaactggaaaaggctgaagaagtagaaataagacacctgtgaaatagttgatggtgcagtgatcaaaagaatggcgtgtagcaaaataagcaaggctctttttcaaccttagttaaggtgatgatatttggtaaggacttatagggtttggtttctaaggtaaattattatacctaagttttggggtagagatatgtaaatagtggctaagtgaggttggagaagacgacaaatgaaatgatgacaatgtacttctgggaaaataggtggtatgtctatattatatgaaaatagcaaaataaagatatatattatttcgattaaaaaaaaaaaaaaatcgcnnnnnnnnnnnnnnnnnntnnnnntnnnncatnnnnnnttnnnnnnnnnncncnnnnccccccnaaaaaaaananntttntcccccncccgggngacccnnntttttaacccnccccccccnngggnannt

SEQ ID NO: 1999 - DNA, 1849 bp, Glycine max
  misc_feature (1840)..(1842): n is a, c, g, or t
  misc_feature (1844)..(1844): n is a, c, g, or t
tagggaatttggccctcgaggccaagaattccagctaccgcttccaagtcctacaagaacaacccattccctccctcattgcccccactcttctccacttctcaatcctctgtaacttcaaaacatacacctcttctctctgtttctcttcactctctctctccctccctcttcaactaacatggcaattgaaaaccaagacaccgctgtcagagaaatcaagcccaagaacaggagaatcatgggtgctggagggcctgatgatgaggacaataggtggccaccgtggttgaagccactgctgaaagagagcttctttgttcaatgcaagttgcatgctgattctcacaagagcgaatgcaacatgtattgcttggactgtatgaatggccctctctgctctctctgcctcgcccaccacaaagatcaccgtgcaatccagattaggaggtcctcataccatgatgtgatcagggtctctgagattcagaaggtgttggacatcactggtgtccaaacctacattatcaacagcgcaagggtggtgtttttgaacgagaggcctcaaccaaggcctggaaaaggtgtcacaaacacttgtgaagtctgcgagcgtagccttcttgattctttccgcttctgttctcttggttgcaagattgttggaacatctaagaacttccagaagaggaagaagcagtcaatggcaatgtcatcagattctgaggactcgtacagcagcaacagcgtccatggtcttaagaaaaactgcaaagtccagagcttcacaccatccacaccacccccaacttcggttaattacagaacggccaagagaagaaagggaataccacaccgtgccccaatggtgggactaatcatagaatattagtgatagtgggtatttttaggctatttgctataatgctcttaggtagtataaaaatactactatactaatgcgagtgtttcgacgtcgtttcatcaaaatccaatactcgagctttcctagggcaggtattgggaagtgtcaccgtccttctttctttttttctgtagtggtttctagcgttttgtatatatagaaagtccaatagaactggaaaaggctgaagaggtagaaataagacacctatgaaatagttgatggtgcagtgatcaaaagaatggcatgtagcaaaataagcaaggctcttttcaaccttagttaaggtgatgatgtttgataaggacttatagggtttggtttctaaggtaaaattatacctaagttttgggggtagaggatatgtaaatagtggctaagtgaggttggggaagaggacaaatgaaaatgtacttcttggaaaataggtggtatgtctatattatatgaaaatagaaaataaagatgtatttattattacaataaaatctctatttttctttttcatcttgtttaattttgaaagagaaatttccaaatcttaatgtaacctgtgtctagtgacggtgaatgctggtcggggccaaggtaatataaacttccaaatttcaatacggtggggcccgccgcagccggcttatatgggaagggttcgtcagcatagacacgtgtcaatcaatggttggcgtttgtgaaagcgaagttgcattggttctcgaaaatagagaattggtcagccgcctcaatatgaaaaagaaaaatgcgattattctatgggcagttcccgtttgatccgacggctgaaattaatcatcaatggacggcggtgatctcttgatcttcccccaattatggggtagattcctgattggtgaaatcaaagggcttagattgcttgatgtaacttttcattannngncgtat

SEQ ID NO: 2000 - DNA, 1936 bp, Glycine max
gtgtacgacgactttgttgtgtggataagaacgatccctctacttctttcagcctcgcataatagtattatgctctttctctcttagaaaacaccctctaccgcctctaagtcctacaagaacccatcccctccccagccgctcccaaaatctcactcttcttactcttcttcctccaagagaagtaaacaaccctcacattcaccacagcagcacacacagacaaagacaaccttgtttgtctccaatcaaaacctttcaagctggcgttcgaaaaccaagacaaccctgtccgagaaatcaagcccaagaataggagaatcatgggtgctggaggccctgatgatgaggacaacaacaggtggccaccgtggctgaagcctctgctaaaagaaagtttctttgttcaatgcaagcttcacgctgattcgcacaagagcgagtgcaacatgtactgcttggattgtatgaacggtgctctctgctctctctgcctcgcttaccataaagatcatcgtgctattcagataaggaggtcctcataccatgatgtgattagggtgaatgagattcagaaggtgttggacatcacaggggtccaaacctacattatcaacagcgcgagggttgttttcttgaatgagaggccgcagccaaggcctggtaaaggtgtcaccaacacttgtgaagtctgcgagcgtagccttcttgattcctaccgattctgttctctaggttgtaagattgttgggacttcaaggaacttcctgaagaaaaagtcagcggcaatggtatcagactcagaggattcttacagcagcaacagcagccatgggaagaagaacagcttcacaccttccacaccgccaccaacttttgttaattacagaacggccaagagaagaaagggaattccacaccgtgccccaatgggagggctagtcatagaatactagaaagttagtaacttttggttatttgctataatgcccctgatatattttacctcaaaatgcaactttctccgtgcagtttcacccgttccaacatacgtgagctttttgctgaaaaaggccggtgctggaagtgtttccttctctgttccttacttgttaatagcgtttgtctatatgggaaaattccaatagaagtgggaaaaaaggttgagaaagtagaaaaaaataagacatctgtgaaatagtttgagaaaaagaatggtgtagcaaaataagcaaagttcctttcaaccaaagtacaagaagatgaggaacattataggtttggtttctagagctattatacctaagttttgggtggtgggtgtaaatagtggcttggggaagaagacagtgacaatgtactctttacaaataggtggattgtctatatatggaatggtgaaataataaatagtactaatagtttttcttaaaaaaaaaaaaaaaaaacaatcactcaaacgacaatttttatacgttaaattaatgagttatagttcattgaattgttgaaattattgaaaaggtattattttaatctttgaattgttcaatgatgattatttttagattttggtatcattagatgacgataaattaaacttcaaaattataaaactaaagattgaaataaaaaatactccggattttcttaattttaagaattaatctagtgtattgttccaggtttggtatgcaattatttcctctcctttttctttatattatttttcttagaagtgaattttcttattttagcttgtgattttggtattggtgatggctaaaagcttccggggcccacttgagccggtttatgagggagctggtcaaagttttggtcgtagtcgggtccacgtgtcgaatcctggttggactgaaggaaagcggaacgtattggttgtcgaaacaaacattaggtcagccgcccttgttag

SEQ ID NO: 2001 - DNA, 1486 bp, Glycine max
aagatcgcccaaaagtgaagggacagaaaattagagccaaagaaagaaaaaaactctataattgactgagtgatataaattattaaatttctatttaaaaataaataaattttgtgtttttttttttttttttatttaagtaaatttattaataaaaaaaatagagaaagaaagtatatttaataattaggggatatatatatttaaccattgctaaagtaaaacaccaaaattaggcccatttggccaatagagacatgcaacctgcacctaagagaagggaaatatttgcccctagttggagcttcaaatttttctgcaactttgggctcataaaatcagctgctaacaaatccaccaatgccatgtaaatcaaaattccagcagaagcagaattgaaaatcccttcaacagttaaagcagtagggctattctctttgtacacacttgacacccccattccaattgcaattccaattggggttgttagggagaaaaaggtcgccataattaccgtagacttggactcgaactttgcctgagatatgcaaccaccaagccccataccctcaaaaaattgatggaaagacagggccacgagaagaggctttatggtatcaatgctccctgcagtacccaatgatattccaatgatcactgaatggaccactatacctatctccaacacttgtgatatgatgcgctgcctaattacttcagatgtaattgaaccctcaggggacacagctgatccatgagcatgaccatgtgtggcatgtgtatgaacatgcatgtgaccagcatgttcatctcccatttcctcatcatcagcaggaacctgcttagaggggttaaaatgttgcctatgataaaaccctgtggcaaatgagtccaccattaaggtccctatggaggacaacatggcaacaaatccagtgaagggaaacttgccccaaggattttccttaaggcaaggtgaagttaggctctcatatgcctcaggaagtatgtgcacaaacccagttgcaagaatcacccctgcagcaaaggccttaaccataaagaatatgtcattcttggggttaagtgttgggattctcttgcttaacaatgggaggctcaccccaagtgccccagcaacaagcacagaagcaattgagccaattttgtagtggaggacttcaattgagtcactctttgtggcctcttttgtgtcacaggtgcaatctcctaaggccatggttggtggtaaaagaaggacacaacacgcatagaacaagtttgagatggggtttgaacatgcttgaaatttcatcattctgatgggatttgaattgggattgcacaattaagtgagtgaaggaagctagagagagggtatatggaactgttggtactactaactatgagtctttgagaaatgttttcatgattgttatttaaaagagggaaaagctaagtttgtacgttgatattatgttagtca

SEQ ID NO: 2002 - DNA, 1207 bp, Glycine max
agagggtgtagatttaaactactttcttgggcagtggtgctatagctggtattttgcctggcacaacattggagatatctgataagaggccgcgcgtccgtaaagattttcttaaggagaactcaatagacattacagaagaaagtcttttaaagctcaagtatgacccaaagtctgtttggggctatgttgaggttcacattgagcagggtcctgtgctagaacaagttggtttcccacttggtgtggttaaaggcatagctgggcagacacgattgaaggttacagtcagagggtcacaaggtcatgctggaactgttccaatgtcgatgcgccaggatcctatggctgctgcagcagaacaaattgtagtcttggaaagcctctgtaaacaccctgaagaatacctttcttatgatggtcattgcagtgattcaacagtgaaatcactgtcaacctcacttgtttgtactgttggagagatatcaacatggccaagtgccagtaatgtcattccaggccaggttacatataccgtggatatacgagcaattgatgaccttggacgcgaggctgttatctatgatttatctaaacaaatttaccaaatatgtgacaagcgttcggtttcctgtattattgaacacaagcatgatgcaggtgctgtgatttgtgattctgatctgagttcacagctcaagtctgcagcttattctgcactcaagaagatggagggtgacattcaagatgaagtgccaacgttaatgagtggagcagggcatgatgcaatggcaatatctcacttaacaaaggtgggaatgctgtttgtgcgttgtcgcggaggaataagtcattctccacaagagcatgtgctagacaatgatgtctgggcggccagtttagcaaccttgtcatttctggaaaacctatcataagtgatatggtaactgtgtaaagcaataaatagatattatagcttgtaattataggttaatttattgagttaattcatgagttaactctttttcttttagttgcttgtgtcttatagttgtgtaattgaatttttggttttagttatcctgttatcaggaaacggctccaagttgtttatcatgttctttgccactgtcaaattaaaacttatgactgattttatttttgaatttaataggtatataatgttagtttaaaaaaaaaaaaaaaa

SEQ ID NO: 2003 - DNA, 1084 bp, Glycine max
cggccgccctttttttttttttttttttttttttgccaatataaacaaataatcagtgactgattatcttaaagaagccaatatacatttcaagcagtatttgcctgcatgcatttttacaaagaaattcaacaacctttctttcaaaacaccagcaacattcttttttcccacctttgtcattgccaaataacaactaggcatgcaagttcctcatttcataactacaatctctataaagattgagagcaaattagcataattttggtcattataaaaatggtgtttctagccaaccaacattcagtcaggatatgtacacaaatccattggatctttcttcttcccaaaagaagtgcttgttgtgtataactgtaattaattagtaacactctttagtcagcatcacctccctcaactattttagaatgcttaagctttatgtttgttcaggatcctagtgccactcttggaaagaaggtctctcatctctttgtaacccctgagttcttcaagtgcatccgctgtctttcgaggcatgaagaatccagaagcagtggcaactcctccctcaagttcagcctttggtgaatgggatgaataacaacttggatcttggcgcaatggaggcgctgtcctgagcatgtgcacaagaacaccaacttcagcatcttgtgattttttccccattggcagtgatgttgaagtgatctctgcagcactcttcacatccgcattctgactagattgagcatccggtggatcaacatcatcaacatcaaaaggacatgaaaagtcgccatcatccaactcatcctgaaatgataatctacttgaggttctagaaaatccaatgcgtggtgagccacttgaggataacaatcctgagaacctccctgaatcttccttgctatctctgacaaacttttgaccagtccttgaagcttctaatttcctgaatgacctgattccagatggagactcttgtgatgagccatcagtccttctgggggataaagggggcagagaatttcgactaggatctgaaaaattaggagaaagatttctggtgccggacgcgtgg

SEQ ID NO: 2004 - DNA, 1681 bp, Glycine max
  misc_feature (32)..(32): n is a, c, g, or t
  misc_feature (98)..(98): n is a, c, g, or t
  misc_feature (120)..(120): n is a, c, g, or t
agtccacttgaggattaccatcctgagaaccntccaagattcttcccttgctatctctgacaaacttttgaccagtccttgaaagctttctaatttcntgaatgacctgattccagatgnagactcttgtgatgacccatcagtccttctgggggataaaggggccagagaatttcgactaggatctgaaaaattaggagaaagatttctagagcttttgcccattactgaatgaggtatagtaacaggggctgtttcagagcacatgcgagttttcattggattgccaccacagaagtatgtaggtgccgatggagatggtgagggtgagaatggaggagagagttgatactcatcgtaacttggagatatttgcctattctgcatccgatagttgtgcaatctgacaccgtaactatcagtaggtggggatggataatcatatggcctgggagaacctcgatacaccggcggggagccaacatgaggatggttctgtacaaaaggtgctgctttatggaagccacatgtccagctatgagggcgatcaagtggcatagaagacggaggtgctttccctcttagtggaaaggaagtggcactaacacccttatccaagactgggaaagacctcaaagggtcagtattagggcttccaacataatcagtaattatttttgttggcaatgaagctgaacactctaggttgaaatcagatagcacagtgcagtagttcacagatatacaaaggcggcctggaagggcctcaacaggagtgaaattatattcttctatcactcccccttctgctcgagagaatggatcactaaaggaagagaccttgtaaataatatcaaaattacaaatatgactagatgtgcttaactgcttaaatatcttataagccgggagaagcctcatttgagaataaagagcacggaaaagcactattgacttctggtatgtcttcttgtaagagctagtaatgtcactggtttgaggagccaccacacggggacaatcatactgaacaacccacctctctataaccgtctcaacagaagagccagcctcttcatgaacaagtataatgtcaattatcattggatccatcaaattcctgtgccagaagtgcaagttatccagagcagaaggcctatcacctaaagccaagttaaaccacttgtcgctcctcttcacgcgaggacccatcgacaagtcaccaccgcttctatcatgcgggcgtaacaaaggtacccttgagtccaaaatgatgtgcaagcacttcaaaagaaattgatgaacaatttgctccaatttgcccaattcaggctgcacattattatgcaaatccatcctacccagaggggaaaaagattcaattcctaattaaattccccctccacccaagaacatatctttaccacaaacgaaacaaatccaacacttgtcaaactcataaacctctctcttcaaatagcaaactccacaagcacacgaggtaaagaccaaatcatatacttctcacagcatcacctttagtgatcaccaccagtgaaaaagaagtcccatcggcaccaagcaaaacatgtaaggagaagcggagacgaaaaagggggagatgggtagggtagcattggaagagagacgccatggagaaaaaacgttgcgcggacgcgtg

SEQ ID NO: 2005 - DNA, 1258 bp, Glycine max
  misc_feature (991)..(991): n is a, c, g, or t
  misc_feature (1000)..(1000): n is a, c, g, or t
tcagctacgtaggcccccccccccgatagtaataagtacttaagaattccatttagggacttcccaaacacgtcactaatcgtatcaacaattcaccatgcgcttgagctgcaatggatgccgcgttctccgcagagggtgcaccactgagtgccccattcgcatctccctccaatggatcaattcccctaactcccaatccaacgcaaccctcttccttgcaaagttctatggccgccaaggcctcctcaccctcctcaccaacgctccctcacaactacaacaagccgttttaaaatctttgctttacgaagcatgcggtcgaatagtgaacccggttctcggctcgaccgggttgctctccaccgggaattggcatttgtgcgaagccgcggtcaaagccgttcttaatggcgcgccgattgagcaggctcctttggacggcgccacaagcctgcagctcaaggcttgtaatattcgccacgtggcaaagagtgataaatcgtgcggctctgatacgcttcgcaaggtgaagtctcgcaccaccacgttcaagcgccgagccgcaaagtccagagtcgagtcagttgtggctgagttggctgaaagcgagttagatggtcatggttcgatgagtcatgactcgggatccggggtgactcggatgagtgagaacaaaatcgttggaggggaagccgatagcgactccgtgcagagtgtggggccggcacgagccgatggtgaagaaatggaacttcaattaacattggggtggggtccactgaagagacaatgatgacgccacgtgtagggcttgatctctctggctagtagggttggtgttagctagtggtgaaatatgttttttttaatcttcaccccgtttagttatatgataatatttttggatttttcacatatacatcgtgaaaattgtttgtaggagcattttttttatattataaattacaaaaaaaaaaaaagttagccncagcctggnaaggttttaccaaaggtgactggcagaatgaagtaaacgtccgtgacttcattcagaaaaactacactccgtacgagggtgacgagtccttcctggctggcgctactgaagcgaccaccaccctgtgggacaaagtaatggaaggcgttaaactggaaaaccgcactcacgcgccagttgactttgacaccgctgttgcttccaccatcacctctcacgacgctggctacatcaacaagcagcttgagaaaatcgttg

SEQ ID NO: 2006 - DNA, 660 bp, Glycine max
  misc_feature (651)..(651): n is a, c, g, or t
ggagagagagagagaactagtctcgagttttttttttttttttttcttttttgtttttttttttttttttttttattggaaaggataatcacaatataataaatagtgatacattaaaccatacaacaaatttgtacaaggtttcgtgatagtagtcacttcacaaagtgttggatacaatagtgtacagagtttaatattttacatgatgtacgaaccaaaggttttttcggtgctataatacatgtaaagaaatccatcctcatccttgaatgatctatacacagagtccatcatattagcagtttgaggcaaggtattcttcacaaatacaaagagagctttcccagggggcagactaagtctggaactcaaaatatgaatgaaatgcccaacagacaagtctcgaggaacaaggtattttttcttctccaactcaggcagatcgcatttcgcatatctttccacaatcacggggactcgatcgggatatttggccacaatatcccgcgattctccgagcctttgttccaaggtatactcatccctgaagctcgaacttcctcccattcttaggttgttgtgcagctcaaccctttcttccaaattccaataattctcaccttcgcgccccttctcgcagccgtacgnacgcgtggg

SEQ ID NO: 2007 - DNA, 2142 bp, Glycine max
ccaaaaccaaaaccaaaacacacaaacactaagaaagaaagaggttttagttttttagtttaagcacaccaactaactccacctaacttcttttctctctggggttctttctccatttccattggctttcaaaagtcaccaacacaattctcccttcagagtttcaatggctgtttcaacaagtttccctggtgcaaagttggaggctttgttgctgaaatgtggctcctccaatgctgccactgccactgccaccaccaccacccatttgtcatgtttttgcaaaaccagaaagacacttgttcagagtcagagagggcctattcgctgtgaggcttcttctgcttctgatgttgtggctgatgccactaagaaagctgctagtgtctctgctcttgaacagcttaagacctctgcagctgataggtatacaaaggaaaggagcagcgtcatggttattggactgagtgtgcatagtacgcctgtggaaatgcgtgaaaagcttgccataccagaagcagaatggcctcgagccattgcggagctttgtagtctgaatcacattgaggaagcagctgttctgagcacctgcaacagaatggaaatatatgttgttgctctgtccaagcaccgtggtgttaaagaagtcactgaatggatgtccaaaacaagtgggattccagttgcagatctttgccagcatcagtttctgctatacaacaaagatgccacacagcacctttttgaagtatctgcaggtcttgattctctagtgttgggagaaggtcaaatccttgcccaggtgaagcaggttgtcaaagttggacaaggagtgaatggctttgggaggaacattagtggactattcaagcatgcaatcactgtggggaagagggttagaactgagacaaacattgctgctggtgcagtttctgttagctcagcagctgttgaactggccctgatgaagctacctgaagcctcacatgccaatgcaaggatgttggtcattggagctgggaagatgggaaagcttgtgatcaagcatttggtggcaaaagggtgcacaaagatggtggttgtcaatagaagtgaggagagagttgccgcgatccgtgaagaaatcaaggatgttgagataatctacaagccactctcggagatgctcacatgcattggtgaggcagatgtggttttcaccagcacagcatcagagaatccactgttcttgaaggatgatgtcaaggaacttcctcctgccaccgatgaagtcggcggccgtcgccttttcgtcgatatatctgttcctaggaatgttggatcatgtctctcagaccttgagtctgtgagagtgtacaatgttgatgaccttaaggaggttgtggcagccaacaaagaggataggctaagaaaagccatggaggctcaagcaatcattggtgaagaatcaaaacaatttgaggcttggagagactcattggaaactgttcctaccattaaaaagttgagggcatatgctgaaagaataaggcttgctgagcttgagaagtgcctaggtaagatgggtgatgatatcaacaagaagacacaaagagctgtggatgatcttagcaggggtatagtgaataagttgcttcatgggccaatgcaacacttgaggtgtgatggcagtgacagcaggactctaagtgagacccttgagaacatgcatgctttgaatagaatgttcaaccttgagactgaaatatctgttttggagcagaagattcgagccaaggtggagcaaaagccatagtgtgtgtgtgagatcttgtaccaatttttcattcataacactcatttattttattctattcaggcttaagaatcatgcaatctttggttgcatgattggagcagtaaaagtccccaagaacttcaattgattagtggtgtctctgtctacttggcctaactcctgtttgtaattttaggtcgggtgtttccaaggttttcttcaatagccgtttgcctctatgcctaaaatttgtttattattatgcaaaaatagaggtgtttatgtacaatgtactactatactattacggggagctttgtatctatcacgaataatctatggccaaaatttgtctcctgttaaat

SEQ ID NO: 2008 - DNA, 1608 bp, Glycine max
ttttttagtctcgtgtttttttttttttttttttttttttttaaatcaatattacttcatattatatagagcagctaggatataatcacatcacatctgaaaatatccataatggtttgataatgtatgcattatagtaaaataattaatcttactctttttaggttacgatcaaacagcctgaacgatgactcaagtacaacaccatttaaatttgacagctcaaaacacaaattatgccagtaataatttacatagaataaaaattttattatattgctcggttcttttacccatcatatacttaaacaacacagctatgctgctgtttcactaggggatggctgcagaagtgtagaagaagagtctagtggctcgtgtactaccgaatttgaagaaactgatatgggatttccctccaactgcaacattatgttccccagtatttcagttaatagtttcttgaattcgtcttctttcaccaccttcgcatcatctgcattcaccatcttaaagacttcaccaataaccttgtccatctcttcaattgcaccaacaggaggtaaaccagcagatggagccaccgtgtccagtgccacccttagatactcctttgaaagctttccatttcgatcttttggcatagtctccatggctgagttcaaaatcttgtccaattcaaacttgttggataatagtctcttaacaccacttccatcaaaggtgttctcactgtgagcaactatgacaggttgctccttaagacgattagccacactcattgccactatcttaaattcctccaaaaatgtctcttgagaaacggacttatccaaatcagagccagcttgagatagcagtgcgggttccataatgttgctcaaaacccaagaatctgatgtaggaggaattccttgttcaacagtgagcttgccaagagcttcaattatatgatcatgaagtgatctgttaggggactcaatctgagagaatatggaattcatttcagcttcataacctgaaccattaacaaactccaaaagatcttctccatcaatgcgaagtatcacaattggatcacgcttcagtccagcagccatacccaaaagaatgtctgagagaacctctttgaactcactcttgctcacgttttcctgcttcccatgtgtgaattcattcaacacctcggaatagatgtgatcagaatcaggattagtgccgtgagcaggcaaaccaagagcagctcctatgtcagcaacagcaggctggagctctttgacagagagtttgccatctttgtctgtgtctaactcgtgaaacttatggtccacgaaggtggtgaaaacttgctggtttccaaccaactccataatattagaaccgtctagaacctgtccgtttccaccaccacttttcttcctgctcagcttgcccgaacctctctccattcttgtgactcttgtgacttccccttgctgctctcgtgactcccacaccgccaaaagtcagatcagaaccaccatcacccttactccttccttagttatactattatagtagtacttatcaaccatctagtttctccggggggggggcctacgtagctga

SEQ ID NO: 2009 - DNA, 2779 bp, Glycine max
  misc_feature (683)..(684): n is a, c, g, or t
  misc_feature (690)..(692): n is a, c, g, or t
  misc_feature (700)..(700): n is a, c, g, or t
  misc_feature (1829)..(1829): n is a, c, g, or t
  misc_feature (2762)..(2762): n is a, c, g, or t
ttttttttttttttttaaatgggtaagtatagggtttgttggtgactaatgaaaaaaatgtacaaaaatatccaccggtgttagaaaagaaaagggtatatatagatcgtccgcagcaaaaccacaactctgccatctcttgctaataattctacaaaattatctagaatgtatgtaaccaagtctttgtttgttcaagatcctccagcaggggaaaaatggacatgaaattatccaatggcctttacatacaaattagagataattatcaagctcattttgcagatcctgtacggatttgagattaatggtctggatctcttcactcgtgtattctgattgtagtagggattgaacttggatatgggcttcaacaatatttgtctttattggtttgaaaagtatcgttcttgttgatgaattctgtaaataaagcttcatcttttctatcaccaccggcagttgctcctgaatagcagtcctgaccttttgaacaagttcagccaccttatctggagtagcaaaagcctgatccttcagaggtttggccataactgactctagcttttgattctgaccacctgatgataatgcaactttaactgctgtaacctttgtaacaaatgaaagcaaaggatccacaacaagcttagtaacagacatgatgaactcctcacaagtgnntttaannntcttttcnagttccttctttgtgtcaatttgattttccaaaactcttggagacaatgtccttgccaatgaagttgatcttgaccattcaaatagagaggcttgccctcttagaagtcttcgtagatgctccagcaaatgagagaaatcgagctccttttgtgtgactgaaaattcaatattgaaaggtgcaatctgctcccttaaaattaaaagatgctttataaggaagagctgtccgtccatttgtgatgatctctttgcaattaatttgcttgctttctgaatagatgctgagcaaacttccactacttcctgtgctaagcccgtgaaaactgcagactctaaacaacgatacaactttgaaagacatgatagagttttctccaggggtggataccatgttttaaaaatatctgggttgtcatcagcaggattgatctcagaagtactttcagcagatttctttagcttttcagggtagtccaagtcttcattagttggaatgtaatttgctatctcatcccgtatatgagtccgagcacgaaatgttaaccgctcatgaacatctgctaaaattctctcaaatgtaggacgaagaccagctagtgattcactcctcctactatgctgttcccccagaacttccattttaagtatatcaacaagttcacaaagaaaatcaatatttgtttcatgaacaagtttgggacgcagtgtatcatacagatatgttgacagaggatccattaatggagctaaacttgaaatatcctttgaagaagctgggaaaaaatgatcaaaaagttgatgttcaagttgacagacctgtatgagatatgcacatcctgatctagtcaacgatggcaaagactctttcttggcaaactcagatattcgccgctgaactatagctcttatcaaagagaggcgttgctcacagtatagtctgtggcattctgccagaatctgaccatattctctccttgaagacctgctttcaatctcttcaagtagtggcttaagctcacttgctgctgccttgaaccgaacatatatcacggatgcctctactccctcagagatagatgctttgccacccccacttccacggattgctggcctggacctgttaaatnaacttcacctgagaagaggcacctttaagaacagcaagtacatgagaacgcatcatgcccaacgctcgagactggagttgccgaaatttaagcaagtaaacacttgattctgcatactgtggattgttttcaacatacgagatgcattcatcaagccgtttgagaagtgggagaaagttttcatttccaacgttcatgtttggagaataaaaattggtggcaacattctccagttcatcaaagtaattgagtttactacgaagtgcttctgcaaaatcaattagtctttgtttctcttgtagcagcctatcacatgcatcatggagcgttttagtctttgtagctactgcttgatgctgcaactgtagctcgttgaacaagtctagggtgtcatcaacctgttgcagaatttcatcacatgtctgtatgcggtcagttagagtgttcacgtaatgttgatacttctcttctgtctctgatttcatggcagattcaagatccgtaaaccatttgtagaactgattggtattgaccataacagtctcaatagcaccagagtcatcaaaagaactatccttcgttttaacagataaggcattgtcttgcaccgacgcattttcttgagccaacttgcgaggcaacggtcgctcagatactgcgtgagaaagcgaaacgatcgcggattgttgttgctctgtcaaaggagcattctgttcccaagtggaagcgaagttgtaacccttggaaatggcagcggaatttggatgggattgaggtggacctctgcttcccattttcctctgtctgtcaccgcttcgctctgcttcttccttccttacataacaacgtcctcccctcccgtttgagctacggcaccaaacgctgcgttttgtttgctcagattatcataataaccggacgcgtgggtcgacnccgggaattccggaccg

SEQ ID NO: 2010 - DNA, 1572 bp, Glycine max
aacagaaaaaatatcaggaatcctatataattaaccaactaatacaaacttcagcagaaaatattataaaactaaaagggccacatgcttcccttaaaacacaggtaaacacaaccagcacgacgagggttatccaatcatcaccactgaggcatgctaaacgtacttgagtggcaagtcattaacaaccaaatgattggaaaccggtatgttgcaaatggcggcaactactttttttcctcttactacataattaagaaccatacaattctatatgattacaaaatatgagccgttccttgtatcttgcagtccccagaatttgaaatccagattgctactcaatgtagtacttatttttgaaaggtgcaagtatcttgccagaatgctgatgaatctcacatccaagttcaacctccatcaaacgatggttttcctttgagcgactcattagaaaagaaacccttaaatcatcaccttcattcagacgcatgggaggatgcaagaggaaaacctgttggccccagtgtgtaccataatctacactgggagctgtggttaactcaatctcgtgttcagctggatcctcacttcttccccgaaaatgtacatcaaaccaccctccaaatccacataactttgtgttatccacggttattgacattgaaaaatctgatctgactttctctatgtcagccaccgtggcagttaaacaatcaatttcctttattataccagcagttcctacgacttgatgtggatgaaggttgttccacaatgatgtctgtagatagtattttctctgctcctccgaaaaaggcctcgttaaagtgctcatatcaacaccatagtaggtttttgtttcatcaacaaagtggtgccaatcatccatagtcgactcgtaatcgcccaatttgtgatctactatcccagtccggataggtgccatccacatgcgagcatgactaggatacatcactcctgttggtttgagccagcggtcacgagcatttataactgaatcaaacatagattcacgcagaagaaaataacccatccattcagagatgatcacatcaactctctctggcaaggtaacttcctccatcgatccctcgatgacctcaactacgtcctggagattattcgctttgatgagtgcacgtgcgtgttccgacatcttggtagcttccactgcatacaccttcctcgcacctgcctgtgccgaccatatagcaagaatgccacttccagtccccacatccaaaacagtcttgccagcgaagtggcgtttgttttcaaaaatggcgttgaaataagcgtccatgcgaacgcggtcggagagcatctccttctggtggtagaggaaagcgtaggtgcagaagtaattggcgtagtcgacgtctttggggacaggggcgccgccacgaccacctgcgacagcgttcgcggaggttcccatgttcactcgctctctgccctgttcaatttttagggcagggttgctttggcggcactgcaaggcggacgcgtgggcggacgcgtgggcggacgcgtgggctgacgcgtcgt

SEQ ID NO: 2011 - DNA, 1167 bp, Glycine max
gtctcgtcgtataattatcttcgccttttgtttttgtttttttttgtaaaatggaacgccaaaataaaataaaataaaaatatcaggaatcttataatcaaccaactattacaaacttcagcataacatattctaaaacaaaaagggccacaagcttcccctaaaactcaggtatagataaccagcacgacggttacccaaccatcataactgagacatgctaaacgtacttgagttgcaaatcataaacaaccaaaatgattggaagaacctgaatgttgcaagtggcggcaactacttttttcctattactacgtaattaagaaccatacaattccatatgatcacaaaccatgtgagccgttccttgtatcttgcagcccccagaatttgaaatccagattgttattcaatgtagtacttatttttgaaaggtgcaagtagcttgccagaatgctgatgaatctcacatccaagttcaacctccatcaaacgatggttttcctttgagcgactcattagaaaagaaacccttaaatcatcaccttcactcagatgcatgggaggatgcaagaggaaaacctgttggccccagtgtgtaccataatttacactgggagctgtggttaactcaatctcttgttcagctggatcctcacttcttccccgaaaatgtacatcaaaccaccctccaaatccacataactttgtgttatccacggttattgacattgaaaaatctgatctgactttctctatgtcagccaccgtggcagttaaacaatcaatttcctttattataccagcagttcctacgacttgatgtggatgaaggttgttccacaatgatgtctgtagatagtattttctctgctcctccgaaaaaggcctcgttaaagtgctcatatcaacaccatagtaggtttttgtttcatcaacaaagtgcggccaatcatccatagtcgactcgtaatcgcccaatttgtgatctactatcccagtccggataggtgccatccacatgcgagcatgactaggatacatcactcctgttggtttgagccagcggtcacgagcatttgataactgaatcaaacatagagtcacgcagaagaaaataacccagcccgtcccgctcgagccgctcgagccgattcggctcgaggg

SEQ ID NO: 2012 - DNA, 1417 bp, Glycine max
gaaaaagaaactaatttcctttctgcacaatcaaattttagaggaaaacttcaaatatacacgaggctgttagaccaaactcttatgcagacaaaactttaacacgcacgcacaattgtgtgtgtggggtggggggtggtttgacagcatataccttgggtccaatcttatatgcattattgaataatagtatttttaacaacataattccctaacataccaaaataatggagcatcccaccaacacagattagtttgccccttgtcttcgacttaccttcacaatcacatccaaggtataaagtgcaagaaaggagccgaaatcatatttccacagccattaacattctccaggaggagaaggaaggtcagtagtgttgaaagaacagcttgtatcaactcgttgattttctgagtcttttctctgcaagactagcagtcttgttctgtggttcaagaacgagagcatgctggaaatcttttagagcctccttataacaaagtagtacttctctagcagttccacgtctcagatatgccttcacattcttcttatcatgtaatatggccatattgcagtcctcttcagcttcctgaaagcatcctaactctaggtaagcagctgcccggttgctgtagtaagtcgcatttgtcccattcaagttaatagcctcggtgtagtaatcaactgccttattccacagccttcctttaaaggccgcatttcccttctccttcaaaagctcagaagttcccatactaccatttgtatccggcagtggcaaagcataagcaacactaacttgctcctgaagagttgaatacatatccaaaaccgtattaagaagaaatttatcaactccatgtgctgagatgagtgaaatagaagcacaacaatcattgtggcatcctaatggaattgcaacctgacaacatccagaaatactagcaatgctagataatgcaaaagctctgtcatgaaactcagaagaaaaccccttctctgtattaagctttaatggataatctgcaacagtgggaataactagtattccatcatcctgtgggagaatcaaaacagaggtaatcactggtaagtgcatagcatggacagatacagtaaacttaacaaaaattatgtcatttcataatacgaatcagatatcttgattgtcttctgaggtaacgaaattctatgataaaagttttaagacataccacttttttcaaacattatatgaaaatgctatattggactattaatttgttctccatttttcattatcatacaatatattctgcttcatacattaatattttatttatttaattactttttaatttatatttaacatgaatagtttttaaaaaaaaaaaaaacttcacttgggggggggcgcctacgtagctgactcga

SEQ ID NO: 2013 - DNA, 1305 bp, Glycine max
  misc_feature (1261)..(1262): n is a, c, g, or t
  misc_feature (1274)..(1274): n is a, c, g, or t
  misc_feature (1279)..(1280): n is a, c, g, or t
  misc_feature (1283)..(1285): n is a, c, g, or t
  misc_feature (1288)..(1290): n is a, c, g, or t
  misc_feature (1292)..(1293): n is a, c, g, or t
atccggcgagactcgccggattccgttccccgatggctcgttcgacttcgtgttcgccggcgacggcgctttagaaaaatgcgccgcggccggcggagttcgccgccgaaatctctcggacgctcaaacccgaacggtttgccgcgttccatgtaaaggccaatgacacttacagttacaattcattcgttgatttgttgaatttttgttgcaacgtggtgaaaataaacgacatgttagggtttgattcatccatacctcacataagagagatcgtggtgaagaaagtgcgtcacacaattgattctgaatccaattcaaactccaattccaatggaaaagaatgctctgttccggagtacaaggaaaagctggtgagaaatgcagaggctttgattgaagaggagccactgaagccatggctgactctaaagaaaaacgtgaagaacataaagtacctatcttcaatggttgatataagcttcaaggataggtatgtgtatgttgatgttggagctagaagctatggttccagcattggacgttggtttaggaaacagtacccgaaacagaacaagacctttcatgtgtatgcaattgaggctgataaaacgtttcatcaggagtatgaaacgaaaaagggtgttactttgttgccttatgctgcatgggtgaggaatgagagtttggtgtttgagattaaccgcgacccgggggagaaggagaaggagaaggagaaggagaaggttaagggtaagggaaggggaatggggaggattcaaccattgaaatcttcaggtggttttgatggtggtgaggttgagaagattcctgggttcgatttcgcagactggttgaagaacacggtttcggagaatgatttcgttgtgatgaagatggatgtggagggtactgagtttgatttgattccaagattgtttgaaactggggctatctgtttggtggatgagatttttctggagtgccattacaataggtggcagaggtgttgccctgggcagaggagccccaagtatgagaatacttatgatcagtgcttgcagctcttcacttctctcagacaaagtggagttcttgttcatcaatggttttaacttgtaagatttcctgatggatgggtcaaaccctatatacatgttcttagcttctgcatgtttcttcttcttcttcttagttttttttttcccaagccaatagagaagagagagagagagttctttattttttaaatttctctacnngtaacagttgcngcagnncannncannnanncaccgcgtcaca

SEQ ID NO: 2014 - DNA, 1122 bp, Glycine max
tcgagccgcttcgtaggcccccccccagagcataatacttaataccatcggcaacagcggaaaaagggagaaaccgaaatgcaatgttcttccatcttttatcctcagacacataaaatatggtgctttaagccaagtctttcagtaacgccaccgccacaacaacaacaacaacaacgaacctctcacgaagaaaaaccgaagccgataaccagtgtttcgaacccatttgtgaagcactgcctcaaacttcgcaattcctcttcttatcgtcgctctcatgcttctgctattgttgtgggtgctacccctatcagagaaatctgcaggtttcgagagtcaatacaagatggaagtgttttaatggattgcttaattcttcctgataaagctgatattcctgatgggttggataaatccactgcttctgttgtgcgcgtgagctccgtagtgatgagaaagctttcagggctgcaaacaactgaatctcttgatgccattgcccttatgaaaattcctgccagttttttcagtgttgatgatcatcagaagaactgcctaaagtggtttccatctgttcatcgaattttagtccttgatgggattcaggatcctggtaatcttggtacattgctcagatcagccgtggccttcagatgggatggagttttccttctccccggctgctgtgatccattcaatgagaaagctcttcgggctagccggggtgcctcgtttcagctccctgttgtttctggcagttggaatcacctggagtcgctcaaaaaagaattccaaatgaggtttctggctggtcatccagagcatgaagggttggtcaagccagtgagttcactctctccaagcttctgtgattccttatcagatacaccattgtgcttggttttaggcagtgaaggaagtggcctttcagaaaaatccctgcagacatgtgagcttgtgagcattgcaatgactggagaatatgagtcactcaatgtttcagttgctggtggaattttcttgtacatgctccaaccaaagaatacatgattctgtatttgtaaggtctcatttaagctaataagcctcctcttgtcatgctaataaaaacactgaaaa

SEQ ID NO: 2015 - DNA, 978 bp, Glycine max
acctcacaaaaatatttagcttgactccaatcttaaccaaagcagcattaaaagtttacactaaccttcgtttttttttttttttttttttgagctgagaagtatcgagcaaaagtacaccatattaggctaatcaatgtaaaggtacaaagctccagtcagattttgaactaggcagatgactaatatgaaaccaatattcccaatatatatagcactcatttagtagacagtaatacaaccaggagaagtggtgtcccatggtgaggatttcagacaacagaaagctaaaagcacaaagaaagtaattctaagaaaccctccattggcaactaaaactagaatcggtattcaatcagtccccacttgcacaacccttgcacccacagtgaacacactctatgaccttctcctccctaagttgcttgggaactctgcaaacacaagtggtggcaaaattgtgatcacgtggctgcatgcacctcaggcagcaaagacgttcataaccaggcttcttccattttgcaattagattgcggtcagcatatccttgatctaaacagaattcatacagttctttagaaatttccttcctccgatggtagaggtcaaatatgtagcggctcttctggtgtgcaatcttaaatattggccataatgtctcacattttcttttgccatcatgtggatcattctcagcttccctcatctttgcttgaagttcacggagtgtaggctcaatcaattcccagccctctgggtatttaacacgatttgtctttacttttggcatttttgtatctctacgccgatttcgctctactctgtgactcgattctcggaaagattcgcaggaagcgaaagagcgcaggcagaagagaactgattttgagttattatggaagtttcacgctactgaaataatccccacgggtgtaagacgatgaatgaaaacttaaagactaaaacataattttt

SEQ ID NO: 2016 - DNA, 1721 bp, Glycine max
gaacacaatcaatggaacactttctttagcagtggtgctcataaaaattatcaactattgataaactcccaacacttttgaatctgatgacttgcaaacatcacaatccatgaggacattcaaaattgcaaacaacagcagtagccaaagtcaaaagaacttaaccaaagtagctagaaagaacatataaactaccaacataaaattaaagcacgaaagacaaaaaaaaaaaaagaagataatggatgattcagtttctctccaaattcgtcattgttcaatcaactctacctcacagttacaatatcatcaatcttcaaaatcatccgcacacactctgtcgccaaggtgatcgcactggtgctcacaagcaggggctgcaccacattctcctccaagatgttggtaatctgccccttccttacatttattccagcatttatctcaccctgtgcatgacgattccttagctcagtaacaatggcaatcgggttcaaaccagcattttcagccagagtatagggaataacttcaagcgcctcagcgaatgccctcacacagtaaccctccatcccatgcaacaccttagcccaggcacccagctgcctggagagctcaatctcaggggcaccaccgccggcaatgagaaacctcttggcaaccaaacacctaacaacacacaaagcatcgtgcaaactccgctcagcctcatcgagcacaagctgattagacccacgtacaagcacagtggtggtcttccccatctccttaataccagtaatcttcacaatcttcccatccccaagagaaaactcttccacaagatcagcataacccaacttctcagtgcgaaaatgctcaatgttagcaatgggcaaacaattcagtgtcttggtaatgaactcaatctcatccctctccacatccttaatgaccaaaatcttagcttttgcaaggtaatgcaaggacaaatcagtaaccgcatccctcaaaatactcttctgaatcaacaacacattacaaccagtggccttgatcttcttaatcatgctgagaatataactacgctcttcttttagaatcctatccatctgagagtaatcactcaccacaatgctctgttcgatgtcggttttgggcggcgaaatctggaactgaatgacggcgatcttggcgttctccatgcgggtgggtcccccggcggcgtggctgaccttcttgtcaaagacgagacctttcacgagctcggtgtcgtcgacggtgccgccgagcttcttcacgatcttcacatcgcggaggtcgaccatgtcgggcttggcggcatcgacgacggaaagaacggcgtcgacggcgaggggagccaggagcgtggagtactggctgacgaccttgctgttgagggatgtgctggcggacttcacgagggagtcgcggtcagagagctcgacggggacggccatggcggtgagaacgtcgacggccttcacggcagccttgtggagggcgtcggagacgacggtggggtggatgccgtgggagaggaggaggaggcactgctcgaggagggcgccagcaatgacgacgacggtagtggtgccgtcgccggcggcggagtcctgcgacttggagagctcgacgagcatcttggcggcgggctggaggacctgcatcttgttggggagccgcgattgccgacattgatggttgcagaaggtaggaaa

SEQ ID NO: 2017 - DNA, 1030 bp, Glycine max
aaaaaggtaaaagtggtgacaatgacattctatgaaatccaacagtgatgggtcttttttttttttttttttaagaagataaccgatcaattacttaattgagttctaatcgaaattcactcaggagctgttgagtttgaagttagccaaccatttctatatctacaatgtgcacacgatacgcaatcagtggagacaattacaatatcaagactgaagaccaattatcaagatgattggtttagtagggacttgggagagattagggcttttaagcaacattgacacagacgtaagagccagacctgcctacaggctttcctggaatcaaacaaaccacactttactcataattctctcctagaagagaaagatgtaggatgcccctattactctcctctcttcaacaatgacaattttcccactaacttggctctgaatgttcctcattgtcacctagtaccggctttatcagctgctggaactttttcaggataattggatgcatccaagtcaataagtgtcatatcgtatggcacagacaaagaatttgacacatccacaagtaaggaagatttcattgcaccagaatgtggaacatcagagatgggaccagaatttgaaggagagctactatttgaagaaaaacttgagatctgtacgtcatctgccttgcttccaaacaaatgtttatttcttctcactgtgtccatctctgggccaattggaacaaaagttcgtgatctatacttcctagttccctcttcaccttcaccaccgtggttgtagagaacataatcatggtatgttggtgcaaactggtggacggtatcatggtaaaagtcatttaactttaaagcatgagcaaggctagctgtcaacccacgggatccacctatgttagccccagcgtactctttgtatggaaatgcataaaagtggccaacagcagcaacaagcatctcaacgcaaatgaaaaaaaggggggggggggccctcgtaagctggccccggggggggccccggaccc

SEQ ID NO: 2018 - DNA, 1864 bp, Glycine max
aaataaaatatacattaatattaaaaaaatttcttttcctttttaatgttaaaaataattagaataaattctaaatcaatctttttagtatctacaatttacacacaggacacaaccattggacacaattacggtatgaagacagagaccaatatcaaggactattttgctttggagtggccaactagatgcttaaggtaatttacacaaacgtatgtttccacatgatctgcttaattcctttaccaggatttaagaaaccacaatcatagttcattccaagcacagaaagtatgtttgatgcccctctccctctaatctcctcaagcgataacatttttcccattaaaaatagctctgaacattcctcattgtcacctaccaccagctttatcagccgcaggaacttcttcagggtaactggatacatccaagtcaatgagggtcaagtcgtatggttctgaaacagaatttgacatatccacaagcaatgaagaattagttgcatcagaatttgaagcatcaggcatggaaccagaatttgaaggagtgctactggtagaataagacaaacttgagagctgtatgtcatctaacttgtttccaaacatatgtttatttcttctcacagaatccatctctgggccaattggaacaaaagttcgtgacctgtacttcttagttccctcctcaccttcgctgtgattataaagaacatattcgtgataggttggtgcaaactggtggactgtatcatggtaaaaatcatttaacttcaaagcatgcccaaggctagctgtcaaaccacgggatccacctatattagcaccagcatattctttgtatggaaatgcataaaagtggcctacggcagcaacaagcatctcaacacaaatgataaaattttgaagtagggcagcttcatcagcatcctcaatgaatcccgactttgcagcaaggaagaataacacgccctgccaataagtcaggaatacaacagattttattataataaacttcggaactggattgaatggttgaagcagatccttgcatgccacataaaacaaagcaagcacatagagagccattgtatatgagatcatataaatgatcgtaagatacaagtatgactgctttggattgaaatttccatccttatacttcccctttgcataaagtataagtgtaacaacaactaaaatgggcttcaaaatcacaaattgcagacatccttgcttgcatttacgtatgaaacgcccatccagcggtataggaggaaagcaacaagtcatcagacaaaatgatggcttcagaactcgaccactcaaacttattacaacagctccaggaccaccaacccatgccagacacagtgatagaaaattataaattacccaagcttcatagacttcccggatagaattaaaatagattgaactgtcaggtattacaagggacaagaatgacattagtgcataaaccgggaccatgaaaataatccgaacgatgtaacgctgataagtgggctcggtgtaattgagaaggtacctgtaaatgtgaagaacggccaaagcgatagctgcaatggtgcaaatgaaagcgacgatgtggaagaaaagcggagccagaaaccccattctcttcccttcccttcagaaaaccgtaaaccctaaccagcaatcgaatattgattggaggaagatccactaaacgatattgaaagatgaatgcttcactggcacaataatggcgactgctggttggctggctttgctgccaaggaaaatctaaatcaaaattgaaattgaaaacttataataacagctattttacgctaatgggggggggcctacgtagctga

SEQ ID NO: 2019 - DNA, 2057 bp, Glycine max
  misc_feature (141)..(141): n is a, c, g, or t
attcatattcaattcatccttcatgtggatcagcaagcgttacgagacattccagaagcagaaacttaaactttggagtaaaaatctgtagagcaaatttaaaaaagataaaaaaaaatggtggcaatggcattctatganatcgaacggtgataggttttcttggtgcgaaggagaaaataaccgatcaattagttaatttagttaaaatccagatacactcaggacctgtcgtcgtgtttgaagtaagtcaaccatttctgtatctacgatgtgcacacgattcacaatcagtggagacaattacagtatcaagactgaagaccaattatcaagaggattgattggtttggtgcggacttgggagagattagggcttttaagcaacattgatacagacacaagagccagacctgcttacatgctttcctgggaatcaaacaaaccacactttactcataattctctcctagaagagaaagatataggatgcctctattactctcttctctcttcaacaatgacaattttcccactaacttggctctgaatgttcctcattgtcacctagaaccggctttatcagctgcaggaactttttcaggataactggatgcatccaagtcgataagtgtcatatcgtatggcacagacaaagaatttgacacatccacaagtaaggaagatttcattgcaccagaatgtggaacatcagagatgggatcagaatttgaggggctgctactatttgaaggaaaatttgagagttgaacgtcatctgtcttgtttccaaacaaatgcttatttcttctcaccgtgtccatctcagggccaattggaacaaaagttcgtgacctatacttcctagttccctcttcaccttcaccaccatggttgtagagaacataatcatggtatgttggtgcaaactggtggacagtatcatggtaaaagtcatttaacttcaaagcatgagcaaggctagctgtcaacccacgggatccacctatgttagccccagcgtattctttgtatggaaatgcataaaagtggccaacagcagcaacaagcatctcaacgcaaatgaaaaaatcttgaagtagagcagcttcatctgcatccttaacaaattctgactttgcggcaaggaaaactaagacaccctgccaataagttaggaatacaacagattttattataataaactttgggactggattgaatggttgaagcagatccttgcatgccacataaaacaaaacaagagcatagagagccattgtgtatgagaacgtatagatgattgtaagatacaagtatgattgctttggactgaaatttccatccttatatttcccctttgcataaagtataagtgtaacaacaactaaaatgggcttcaaaatcacaaactgcaaacacccttgcttgcatttccgtataaaacggccatcaagcgccagaggaggtaagcaacaggtcatcagaaaccatgatggctttagaacccgacccgttaaacttaggactactgatccaggaccaccaacccattcgagacatagcgataggaaattataaataacccaagcttcatagatttcccggattgaattaaaatagattgaaccctgtggtagaacaagtgacaagaatgacatcaacgcataaaccgggaccataaaaacgatccgaacaatgaagcgctgataagtaggctcggtgtaattgagaaggtgcttataaatgtgaagcaaggacaacgcaatggctccgcacgtgcaaatgaaagcgacgatgtacaagaagattggaaccattttgcggccaaattttgaatctcctccgtcagcaagaataggcgaggtgtactgctaacggagtccaattcatgacagaaaacggtgattcgaagtctgaaccctaggcgcaatcggagtatgattttggaaggggaaaaggattagatctgagaagatgttggatgatagggattagagaaaaaggaaaggtgcatgcagcgggcaccgaataatggcgccgacgcggggatcgga

SEQ ID NO: 2020 - DNA, 1119 bp, Glycine max
ttttttaattttttttttttttgctaaaattcaagctagagtgtgactttaatgaaaaactttcgaagtgttgccccatgaaggctattacacttttgtaccaccaaagaaatgtctattacaattatatacacatcaacataattatatgtgcactagattgagcaagtccttgctggtttagaggaaaatattctaaaatgtctgtgttttattagttggataaataaatatatacattcagcctacaaggattcaacctagcattgcaaataaacagatcaatgttgagtcatgcagagtgagatgggtttaaatcccaaaagaaccaacagttctgtatcctgaaggaattttcatttgcacacactgtcctttccaacatccagagagcttggtttttttcccatgcttttttttttggacttctccacaaccttacatagcatcataaaaaaaccgcagcaactggcttggctaaattatggatcatccttcctcatcttctgagtgagctacattttctgaaaatgtcagaaccttcactttcacagtcccgttcgtcccgtctgggccatttatctctatatcagtatcctcaccatcagtagattcattctcatcgatgaagaaattgtcggagggccagccgcggagggtggagaggagaggggagcaatcgtgggggtggcggtggtcctcgtaggagagcttgtggacgaggtcggcgacgttggagggagagaggcgcggtgggacccagaaggaggacccgggcacgaaggggagccagtccggtgtgttcttcttgacgaggatgcgctggattaggtcgtcgaagtgcttcagcgccacgtcgtactccgccatgtcaacctccaccacatgtccacccgccgccgccgccttgctcgaccggtgccggagggggacggagagggaggtgaggcggcggaggaacccagccttgctgcggaggacacccaacatcgtcgtcgtcgtcgtggtttgcgagagagagatgggattggattggttgcttatagatgtgagagagagagagggaagaaagttaggttgggaatgaaagacggtgactttctgggcggcgcggggtgt

SEQ ID NO: 2021 - DNA, 1147 bp, Glycine max
ttttttttttttttttttttaatggaacttaatgctaaaattcaagctagagtgtgacttcaatgaaacttttaaactgttgccccatgaagtctattacacttttgtaccaccaaagaaatgtctattacaattatatacacatcaacataatatgtgcactaaattgagtaagtccctgctggtttagaggacaatgtctgtgttttattagttggataaataaatatatacacacattcagcctacaaggattcaacctagcattgcaaataaacagatcaatgttgagtcaagtagagtgagatgggtttaatcccaaaagaaccaccagttgtgcatctgaaggaatttccatttgcacacacagtccttttcagtattggtttttttctcatgccttttttttttggacttttctccacaacctgacattgcatcatgacaaaccgcagcaactggcttggctaaattatggatcatccttcctcatcttctgagtgagctacattttctgaaaatgtcagaaccttcactttcacagtcccatttgtcccgtctaggccatttatctctatatcagtatcctcaccatcagtagattcattctcatcgatgaagaaattgacggagggccagccgcggagggtggagaggaggggggagcaatcgtgggggtgacggcggtggtcctcgtaggtgagcttgtggactaggtcggcgacgttggaatgggaggggcgcggtgggacccagaaggaggaccccgggacgaaggggagccagtccggtgtgttcttcttgacgagtatacgctgaattagatcgtcgaagtgcttcagcgccacgtcgtactccgccatgtccacctcccccatcgccgccgctgccttgctcgatcgccgtcggagggggacagagagggaggggaggcggcggaggggcccggccttgctgcggaggacaccgaacatcgtcgtcgtcgtcgtgatttgagagagagatgggattgaataggttgcctatagatatgagagagagaagaaaggtaggttgggttgggaatgaaagacggtgactttcggagctgtacggatggatggctggacaaatatcccgcttccctcccgacaattcaagcagaatt

SEQ ID NO: 2022 - DNA, 1793 bp, Glycine max
acgagagttaattcacttgataattatatttagcatagatagctatgtaatacttttagtgctgacagttcaaacaatttatgacaatagataaaaatagaattttacttttcctccagtgccgaatgataatgataatgctgagtttccaactgcttgtaagttgtaatctgtaattaaaagcatttactctaacaaaaagatagtgttcccccgagttatcttcataattggcaggttggctggtttagttttgatcctgaggtccatattgaaagagagcagatgtgctgctacctaactcgtactacaagtacaactcatcagataatacaagagaacttacacgagactcccacttatggaggatgggttgaagccaaaggacctagatactgtccctcaatagaagataagattgtaagattccaagataaagagtctcatcaaatatttcttgaacctgagggtcgaaatgtgcctgagctctatgtgcaggggttctcaacaggtttgccagagagactacaattacctttgctgagaactttacctggacttgagaactgttcaatgttaaggcctgcatatgctgtggagtatgattatttacctgctcatcaatgtgctaggtctctaatgacaaagaaaatacaaggattgttcttctctggtcagataaatggaactacaggctatgaagaagctgcggcccagggtattatttctggtatcaatgctgctagacatgcagacggtaagccagttattgttcttgagagggagagcagttatataggaacattaattgatgatctagtaaccaaggacctgcgagagccttaccgcgtgttaaccagccgctcagagcatcggttactcttgagatctgacaatgctgatagccgtctcacacctttaggtcgtgaaattggattgattgatgatagacgctggaaactgtaccaggataagcaagctcggatttctgaggaaaagaagcgactgaaaagtgtcaggatatcaggaggggatttggctgctgaagtcactaatctgtctggtcagccagtgaaggacttttcaacattagaaagtcttcttaagaaaccacacatacaatatgaaattcttgacaagcatggtttcggcgacaaaagcttatcaagaatggagaaagaatgtgtcgagattgatataaagtatgaaggtttcatcttgcgtcagcaaagccaacttcaacaggtggttgctcaacaacatagaccacttcctgaagacttagattactatgcaatgacaacattgtctcttgaagctcgcgaaaaactttccaaggttaggcctcaaaccattggtcaggcaagcagagtagggggggtgagccccgctgatatcactgctctactcatcgtgatcgaagccagacggaggaaagctcaagaactaaggaggtacaaaatgatgaatgccattcgagcaaattcccaagatgaggtgcctgaagtttctttgactgagaaagtcagctctggatgaagcttccatgtcactttgatgcccgactattctatcaattttggtatttagtgtgtcatattatgtatactagagagtcgtccgtaccatgctcatactaatatttgaaatttcataaatataaattattacgacaaaaaaaaaaaaaaataattttgtttatttaaataataataatgtttaaatattgacagaaaaaaatacagtaaagtaaagtatgaaatttgaagattggaggaggggaggggaagggg

SEQ ID NO: 2023 - DNA, 1924 bp, Glycine max
aaaggcatcatatatttttttttttttttttttgaaggcgtttcaaaatacacagtattcttaaattatttatatgtacggaaacgaagtaaaatatcaaagtttaaaccattaatgtaaacatggtagttcaggactacataaaatgatcttttagtctaaaacttgcgattacaaaacatgaaattcaatgcaccaggaataaattttagtatacattatctatgatgctaattatagatagcattcaccaatctaaacatctggcaacaaaagggctagtcccaatgtttttctccatgaaagccatccaacacctgatacaagcattccatgataactaatccttccaagtagacccgccaagtctaataacctcttcacctccactatcctttctaggaattctttccatgttggcatctcctttactatcccctaaatcaccatacatatctttaagtttagcaagattactcgaagcagaagttctcttactctcctctctctgaggactagatcgtgattcataccaaccagtgccagcttgcaagctccgacttctactcctgctcctgctccgactcctgctcctacgatagtgcctactaccattgtcataatcccggctgctttctctctctgtgtacttagacctcttgtcataatcgtaactcctctctctctctctttcccgctcattattcctcctgattctgtccctatcctgatctctttccgagtcatgatccctgtatctttcccggtctcgatctcgatctcgctcccactccctgttcctatctcggtcacggtatctgtccctatcacgttcccgatccctgtctctatcacgttcccgatccctgtctctggactgtgaccggtctcggtccctatccctctccctatcaggatattcacggctctggctgcggcgattacttggagatcttcttatgtcatcactgccattttttttcatgagaaggtaatgtacggcgaataggtgaagaatctcttgtggaagcccggtgtggagcccgctgaccaaaagagactgaaagggcagctttaacagaaggtggtctacgggcagtatcatcagaaccatgacgagtagtttcccctgttgaaccagaatgtgtagaggggagcttcaacttttcaagattagacacaacctgccgcaatacaggaacagggatgcgaggaaacagtgtgtcgaaataatactgtccaagaagcaaatcacggacatatacacccattgtagtcattcgaccattagatccgggagaaaattcctcatcatcttttacatatgactcaaaccaattccatagtgtctttggatcagcacaatatctcagatagagaaatccaaccgctcttatgtaaggagaatcgaggtgttttaacagcccatgcatttgcttgacggtgagcttcatagtaaaaaacttgtacagaagacagaatgcagttgaaggaccacgacaattccccgtcatccatggctccacgtgatcaacttgattgtagatctcatcaataacttcgtgatacgttttcaatcgatagagctccttgaagtaatcagacgacagaatattcatacaaagcactttctctagcaaggagtcaatcggcctgccacaagtctgtatctccatgatgtcgcaaaatatataatattgctcccaccacagttacaatttcaaaatgtcagctaccagcatgtgaagtcacaatcacattccaattggaggggacgaagggagagagaagaaggttggagcgcggtgaagaaccctagcttgagaggctggctcgatacgtttgcgtgggcaaactcggaacgcaacttgtaacgcgggaccacggggggcctacgtagctgacagccgtacggacgcgtggg

SEQ ID NO: 2024 - DNA, 1327 bp, Glycine max
ggagagagagagaactagtctcgagttttttttttttttttttttctctgaaatgttagattccccattaaccacgacactatatcatcaatatctgttcgttccaatattacattaattcatgcgaaactatcatatcacggaagagataattcaaaggaactagcaagactattgttttataaaatttcacagactttgtttttgcaactagatgaagtaaatgtactctacatgtgtctctcacccataaagaaaggaggaaaaaaaaaagatgaaaagagaaaggggcaaaacagaattggggggaaaaaatactatctgctaccatcgctttttcctcacatgtcacattaagcggagcagcagcctctctttgtattcccagatgcatccccaacattgatggtggtaccttgaccaggaagtatggtaccaacagctgcttcctgagcagcgagcgcctttttgctaacaatatgataaatctctgtcaaaatggtttggaatgccttctcaatgttggttgcttccagtgcagatgtctcaagaaacgagagaccttccctctctgccaatgcttgaccatcatcctccgaaactgctctaagatggctcaaatcagatttatttccagccatcatgataactatattagaatccgcatggtccctcagttcacgcaaccacctttggacattgtcaaaggtttgcctcttggttatgtcatatacaagtagagcaccaacagctcctctgtaataagcactggtaatggcacggtaccgctcttgacctgctgtgtcccagatctgtgctttcacagtctttccctctacctgaagagttctggtggcgaactcaactccgatagtggatttggactctaaacagaactcgtttcgagtgaacctggagaggatgttagattttcctacacctgagtctccgatcaaaacgatcttgaacagatagtcatactcgtggtccactcgatgcgccatggatcctttcccctccgatctctccaacctccacgagacggattgactgattgatacgagacttggacgaattggtgaatggaatgcgttcggtgaagtttcgagttgtgaactaagccaagtacgagacttgagagaacggttcgatgaataacggaacgaaccgcggaggattttggtggagagggaagatggatgaagaaggaggctggaggctttttcagagaagagtggccgaattggccaatgggggcaaaacggaaatgtcgatgagggggggggggggcctacgtagctgacgcgcgcgtgggcggacgcgtggg

SEQ ID NO: 2025 - DNA, 858 bp, Glycine max
atccaacctttctctctctctctctctcgctctctgcaacgctccgaatggccaacaacagcgaagaacaacagaacaactcaacaagatcatcgatcatggagtggaagcagatgcatccacttcaccaaatcgcagaaacacccacccacaagctcctcctgaagcaatggctgaaggaggaagaactcatcaacagccgcatagcgttgaaagagacccaaatagattcaacccgcaaagagatcaccaccctctacatcttcttcttcctcttccactccaccaccctcatgctcctcttcaactcctcgtcaccctcttcctgtcacagatcgtgggtcccttcgctgtgctctctgttattctcgctgggcctaatatgggccttgcgttacaagagcgacgtggaggcccacgtggagaagatgctgcagcgggagaaggaggacaaagggttgctggggaagtgcgtggaggagttgaagaagaaagggttggagtttgatttgctgaaggaggttgatgcgttgaggagggccaagagtttgagggtggagagcaaagaggttaggaagtggtcttccagggactttgtttctttgttcttcttctctatggcttgcttctctcttgctctcatgagggtcatcttgtgcacttaggatttgggattggtactaatatgtacttaacttgttactatttgtttggttttggattgagatttttggtatgtatcaattattaattattactatttattgatgcagaatgtactgttctgcttttatttgtgtaatttcagaatactaaatggaataaagttataattctgtttcaaaaaaaaaaaaaaaa

SEQ ID NO: 2026 - DNA, 1693 bp, Glycine max
  misc_feature (1649)..(1649): n is a, c, g, or t
cgacagaaggggattttcgacatgtgttggctataggattacattcacaatttcctccgtgtctttggacaggttctaaagtttttgatagcctcagaaacaaaatcagacctcatcatagttttgctaacacaagtacattcattctcaaaaggtttaatttcatcctttctttccctctcttttcattggtgtgcactttcacttgtggagctagctgcaccaacagcagtggaaattgccttgttcttgagatgtctggtgttcttctttgggtgagttctggacccaaagagaacatcaactccttggtgagtttttcatgcaggagtggtggtggtggtgaaagaacacaaaagaggttttctggaatcagttttgcaagtggtgcctctgctttttcaagtgcagtggcagctgagactttaagatcctcagaggagagggtctatgaagtggtgctgaagcaagcagctctggtaaaagaaaacaaaaggggtacaaagatagctctagatttggacaaagacgttgaaggtgatttcaccaatgtggatctgttgaatgcagcttatgatcggtgtggtgaagtctgtgctgagtatgccaagacattttacttaggcacacaattgatgactgcagagcgccgaaaagctatttgggcaatttatgtgtggtgcagaagaactgatgagctagtggatggcccaaatgcttcgcacatcacccccggggccttggacaggtgggagcaacgactgagtgatgtttttgaaggtcgaccctatgatatgtatgatgctgccctctcacatactgtctcaaagtacccggttgatattcagcccttcaaggacatgatcgaagggatgagggtggacctgagaaagtcaagatacaataactttgatgagctctacctttactgctactatgttgctgggacagtaggccttatgagtgtcccagtaatggggatagcaccagaatcaaatgcttcatcagagagcatttataatgctgcattggctctaggcattgcaaatcaacttaccaacatacttagagatgttggagaagatgctagaagaggaagagtatatctcccacaagatgaattggcactagctggcctttcagatgaagacattttccgcggaagagttacagacaaatggcggaaattcatgaagggacaaataaagagggcgaggatgttttttgatgaggcagagaggggagttgcagacctcaactcagctagcaggtggcctgtgtgggcatcattgttgttgtataggcaaatattagattccattgaagccaatgattataataacttcacaaaaagggcatatgtaggaaaagtaaagaagctattatcactacctactgcctatggtttttcacttctaggccctcagaagtttgccaaaatggttaggagataactgttacaatgtgtgatacttttcagttagagttgtatacatctcaatttaccatgtgttgaagcgcatgagcaacccattcaattcatttaatcaatttgcaagatatcttagtaatcagttttaaaatgtgtaaaaaagaagaaggaagaatgtatcaatccatttgtataccataaatttcagatatcattnttcaaagggatacaacattttacttttgaaaaaaaaaaaaaaaa

SEQ ID NO: 2027 - DNA, 3587 bp, Glycine max
ttttttttttttttgtttttacgagcacgaagaatatttattttcatagctgaaactgaagctttgggatttacatatatactttcatacaatgaaagtgtgtttttgctaatgaaattggaggggtactatgtatgtgcacatatttgatgtaccctctttaatttacgtgttgtaatggtgaaggtgtgtttattcatacgttattaggtggtggatgatggataaaaagaaaagagaaacagaagcgggtcatcatatcagcatatctgatttggaaggcaatctcttgaagaaattaactggtaccgatggcatcttgctcctaaaccgaggatgacgtagcatatagaggccaactagaattgcaacgacttggaagggagtaatgtaaatgaaaacagcccaaatgagtgagaagatgatgaagatggatgtagctctggagtctctccaaccaagtatggcttgagctctttctccttgagtagccaaatctccaaccacagtctgcactctacctgccacactccgcaatctgtcatacctcattctcacaatatctgaaggttttgttgttggaaaagtgtcaaattcctcgtccagttcatctgggtgagcagcttctgcttgtgaaagcctagcatccatgtggggtggatgccttggcctgaaccggtaattccaaataccaattacaaacaagtaaagaaaaatggtgggcagtatcaattccgggtagcaaaccagtatcaagaacaagacgtgaacaaggcaggttgtgattgggtttctccaggtacagatgtcatcaaaccatttgcaaatagctgtaactcctttgaggagtgacattatgcgttgaaagttggctttgcttctccttagactccacatgtggtagtcaacgtcgagcatgtactcaactgcttcacgcctaaggggtggctcggctctagataggcgagctgccacaatctgcatggcctggtggcggagccaatctatgtgcctgacgggtattggttggacataatgcattttgggcagtaaaggcctaccatactgggctaccatgttaacccatgcggtgcaagtgaatctcactgccaagtgaagctctccattcttcttcaggccattgggttggagaaccagcagaggataaaaatgagtatacaccctatcagtctccagagttgacaacctgattctcacctttccaattctctgatctctggcatcactgctcccattgatgtggtggttgtcaaaaaccccaactgtgatgacagtgcacggatcatgaacctcccaggtatattgctcattccatcgaggggagagagtatcaagcagagttctggttcgaacccatttgttgccatacttggccacacagtatgcatcagtagtcctcccttccctggccttcatgggcagcaaattgcgggcactcaggatcccaagttcgagaattccaatgtttttcttcctcaaatgtttggaggatggctgaagatcactgctgaaatgcgtggactcatcaagcacgtggtagccggcctcaagacacactcggaggtgaatcttgcttgagaatttctccttctttttctgtgtttcttcctcgccaaccgcattgggcctgtgtaaattgaaccaacgagaatcggggagcttcttgctggactcgtgtctgggaagaacacttctgacggatatgatctcccttcctaagatttcaacattaggaccaactttgtcctcaacagtgacaatgataaaatcctcaaatggctcggcggccacaaacataagctcgtcattccaaacagggttggtgcctctaatttgagaaggccgggtgaatctcatctgattccctagctgcactctaacaagggagtcagggggccttcctttttcggaaggaacgagatcctgagcctcgattacttgaactctaagatagtaaagcttgggggagaagtagacctttgagcgggtgtttgaaaggttggagtgactaacgttgtgagcatcagagtgccaggcctccgggaaggactcatccgcttgagttcccatccaaaccgcaagcatgatttccccgttattatgaattttttggcccttccggtcccccggtctgtaccattgaggagccaaggggctgtcagggggtacccgaagaggaacctcggtgagatcaaacataactctccccacaaaatcatccttgccaatgtccttatccttgacggtgacttcaagcaaattggactgcaacctgtccttggagaaggcaaagatttgcttccagacagggttctggttcttgtccaagtgcttggtcaggcccttgtagttaccaagcttgacttccacataagggtcaaggcttccagttatatccatgacaggtagatccctagccttgacgacattcacgtacaagtaattcatctgttccactaagtcgtaggtggtggatatcttgtcccctcctcctcctcctctatagcgcaaacgagccgccagtggtggactagtctccaccaacgaatactcaggattttgcctagggatctgctgcattaacattacattgggtggcccagcttttgcaaaatcaaccctcctttgcgttgtttccattgccggcgccgggtatgccttcgctgctgctggaatagagtgaaaagtcctgacttccttctctttctttttcatcttcttcttcttattcttgtccccgtcaccaaccacgctttcctcatctagcaccatgttgatgttggggtttatttcttgaaagggagtgccctgatacgcctcctcagcagcaggagtgtctacttgggggtgatggtgttcctcagcatcagcatgatcatgcaccgcataacatctgagagcaatatctcccctgatgtttgagaagaggccacgtttctcaagtgggtagcgttccacacgagcctgggactccgatagagggatagaggcgcctgaaagtctcacccttccgaggaagttattgtggttcccatcgttgtgattgtttacaaccactaccacttcaattgtcttgtgcgcaagatctctggggttattgatgttgaacacaaacttttcattccaacaaggattcaggtctttgtgctttgtttcagtgctgtgctgctgctcatccaactttacctctacaaaggggctagctgacccttccccatctttgggcatcaggtcgctagcctccacaacttctaccaccaggctgttcatcatcaacaaattcaattcaattatgatctaaagagggcaggtgaagtgaagcactggcagggcagggaaggcactggcagggcagggagacgagtaagctgtagcagtgatgattggtgatgagatatgcttctcatttggagtgtgaagacagaaacttttgttacagagagaaatggcatatgctattgctgtttggtttggtttggtggccccttccttcatgtgcctttctaccggggagagattcaagtggctacttctacgtctctttgcttagagagagaatattagac

SEQ ID NO: 2028 - DNA, 1140 bp, Glycine max
ttttttttttttttttttaccaagaaatttcagttttttaatcgactgtgagaatatcaataacaaaaaccattgtcttaagcaaagttatagttatagataaggtatattgcccttaccaggaacatagtccattcattacattgcccccatccttttcctttatccctcaatcacaatttgtgtacacactacttggtttcctcaaacaagataatgcagcttcagaatccaaagtagggttgtttaatcaacataaatctgccaggtggtaagttggccaccagtcatctgcctataacccaacaataaaatgattgattacatgaaatcctcctccagttcctgcaatgatttgcttcctgatgcaatttgtttgttggatgtcatattttctgcaaccatcaaacccttgtagctcctaagctctgtttgtttctccttttcaagcctttccaattcctcacggcgttttttttctctcagttgttgtttcctctcagctctctcagctgcaccgactgcttctcgctcacctttcaaatcaggtttcctttccacttttgtcttgtttagcctgttaacaatctcatttatccgcttctcaactctcacagttcgaaccatttttgagttgtgaaaaccaacttgcccaacatccattgaagcagttttctttaaattagaccagggagtgtaaacaacatcaacattgttcactttatttccttgaattgaatttgctttgacaagctgagcacaatcttccagtaaagcctcactcaggtcatcgagagtctggcctttgtgcagcctgacatagacatgggctgaagacattttatcaacatggaaccagatgtcttcgggaaaaccgtatttgatgagttcctcgttctcgaacttgtcgaggcccatgaagatggtgaaatcgccggcttcagggcgcgctttgaagtagaacaccatcgtgtggcgttgcttcgttttcacgcacacgaggaagaaaagaagggttctaagacctgtcctttcctcgacacaaatcaaaattgctttcgttatccgaatcgctgcctgactcgaaatcacggaaccttccctttcaccttttactaaagcccaagaaccacgcgtccg

SEQ ID NO: 2029 - DNA, 957 bp, Glycine max
ttttttttttttttttttgcaaaagcagatccattttttttttcatttttccatcaagaaatacattcagaatcagtacatgatatgcacataaaagagagagacataaattattacatgccctaaagatcttgctacctgatattcaaatacaaatcttaatcaggattctaaaagttaaacaacctaacacaattcttgaagacccttttctctctagaagagcccccaaatcaataatttataaccctaattaggagtcagtaatgtgcttaaggcccaaaccgtgcttgccacggacacacccaggcctcacaaacagataaggtgatttcttcgaattgtgcattttcgaaaatgcccttttccctaatttcctcatcctctgcctctcaaacttgttgctcacgttccatggaacaagctcatcatccaagccatacccatcatcatcctcaccatcatcattatcaccacccacatcatcatcatcaacatcatcatggtgatagtgatgttgatgataacggtagtggtgattttctaaacccgattcttgttccgattcacgaggatcttgtaaacccacatcgggatgaagaagaagttggcgaatttcttcaattgaggcatcgatgggagaagaatcggattcgaaccaagaaacggaagaagaatccgatgaagaaccgaacccatcgatctcctcttcggcgtcaacaacgtcgacgagttcccactgcaagagggaatcgtcgttcaccttcaagaactgaacttgttcgaggatgagaaactgcatcgatgaggtttggttttccattgaaaattgaaaaattgacttgttcttgtttttcttttggtttctttcttagttgcgttggtgtgtggtgtgagtaaatatgaattttatcgtgtcaattataaagtcgggggggggggggcctacgtagctga

SEQ ID NO: 2030 - DNA, 550 bp, Glycine max
  misc_feature (4)..(7): n is a, c, g, or t
agcnnnnactgcaaattaatttacatatggtcatgaaagttttccacattagctagcacacacatataataataaggtataaatgaattacatgatatggcaggcattgacattatcatcattgaacatgttgctaacattgtcatctccacggtgagacacatgcatggtgccgtgcctctctgggaggttgtagccatgtctatagtagttgtagctttctttgaactcatgggtggtgtccttgaagtaatggtcagcacttgtgaagtaaagtggaggattagggtaaggccagaattctgccctcttcccggccctcctcacagccttaagcaccttgttcctgtcaacatacccacctaccctcaccctttccatctctaagtccacctccactgaatcaatgcctttgagtttgtaaatggcgtttttaacaactctctcgcagccagtgcagcacatccttactttcagctctacggtctgcaaggaaagtggtcgacccttctttggcatcttgaagttcctaggaatgcctttgttattt

SEQ ID NO: 2031 - DNA, 1034 bp, Glycine max
  misc_feature (5)..(5): n is a, c, g, or t
  misc_feature (797)..(802): n is a, c, g, or t
atcgntaatcctgataggcgccatgataatttaatttttaccatgaactaccgtttcagagttacctaattagctaaatttagttacaatggactattcttcgaagcagcacaacaatgtagaagtcaatccatatattcaagaatttaataaaaacaaagaaaaaatctttatttattttgatagataatggaatcaaaatatataattacaacatatctattcacatgcaccagttaagtacttggcgaaaattacaaacatgtaactcatcataaagctagtactaggttacaatgccaaaaacgacaggaccgtgttcaagaagcaagcatagtaaagaaacaaaaacaaccctttaaattcatcataaaatataatttcaacacgtacatgataagaccaatcaaacatgaataggagccaatatgccttgcaattcactgcatcataaatgccacaatagaaaccaacacagaagaacataaggtcaccccagaaacagacaaagcaaaccctgcaccagtctccatttgcgatgtgggtgcaatttctgattgtgccacagttttggtcacgtaaaacgtgctcaaaaccattgctgcaataaaaaaatgagctgcacagtctccaagttttgccatatttccacagaatatgttatgttactgtgaaaacgtgaccaaagagatgactgaaaaggattgaactggtttggaattttgagttgttcaatggcacagtcaagagttgagtttatatatatagaacttgttaggggtattaggtatatgttnnnnnnggccatctgtgtcaagttggtaagtggtacattaaatcattaaccattctcgattactatgatgtcgtttagattaaggcttttgagtccccactagactaattaaagctagtcgatgcaaggtggtattgtgtcctcaatgagcttcttacgttacagtttcaggagaaatctggcacccaacatttatgatacaccagctaagattggatttcttaaactctgtctgcag

SEQ ID NO: 2032 - DNA, 593 bp, Glycine max
tttttttttttttttttttttaaagggaaaaaatctttatgtattttgatggataataatggaatcaatatataattacaacatatctattcacaccaattaagacattaagtacttgcgcaaattacaaacatgaaactcattataaaagctaatactatgttacaatgccaaaatcaacagcaccgtgttcaagaagcaaccatagtaaagaaacaaaaacaaccctttaaattcatcaaacatatatataatttcagcacatgaataggagccaatgccttgcaattcactgcatcataaacgccacaatagaagccaacagagaagaacacaaggtcaccccagaaacagacaaagcaaacccttctccagtctccatttgtgaagtaggagctatctctgattgtgccacagttttggtcacgtaaaacgtgctcaaaaccattgctgcaataaaaaaatgagctacacagccagcaagttttgccatcttttcacagaatatcttatatttgttactttgaaaatgtgaccaatataaagtgatgactgaaaattaaagattgaactggtttggaattgagttgttc

SEQ ID NO: 2033 - DNA, 803 bp, Glycine max
ttttttttttttttttttttttttttttttttttttttttttttttttttttttttaatccaaactgaagcccatcatcaagctatatattaacccctttctcccaagtcacttccaaaggagaagaaaaacacactctttacatatgcaaccagcgcacacatacagaaacagtataatagtattagatattacagactagcttctaatccagggggcttcatctaaataggacaattattctcatgttcttgcacatgctattacataactaagctattacatgcatcttatagttgcaccagtgctcactcacatcaggaaccgacatagttacaggttgaagatataaaattggccagttaatccgttcacaaccacaagaacaggaatctgagcatcagtgctcagcaccatcatcgtccgggtggtttaccagttcacattcatcaatccactcactgtatatgtctattggctctgataaagctgtgatggtagtgctaaagctctcttggcatatcccgcaaatagcttcccctatcaagttcttcatgtcaaggcggcattcgacgctgctgccatgattgcagaaagggcagctgaagacggtatcgagcttatccattcgcttctttggaggaggctttgcctttgccttcctttttcccatggcttaaacccttgagtctgatcaaaccctagagagagagcctatgatgtgtaatgattatgaacaacgatggctaagagagggataaataaataaacggcaaattcggggggggggcctacgtagctga

SEQ ID NO: 2034 - DNA, 624 bp, Glycine max
  misc_feature (30)..(30): n is a, c, g, or t
  misc_feature (92)..(92): n is a, c, g, or t
ttttttttttttttttgaagagaattttcnatagtttgaataaaaagaatgatctttacagaacgaataattaatgattctacggatgaaanaatactaagaagtgaacacatttaagcaataacacctcttcagaaacgagcatgcacaaatcattattcagtttggcgacgagcagagggaaaaggagcactaaatctagcagagaaactggggggcgtgtcatcatcttcactcttatccccactattgaagttgagagcatagctgtgttcatcatactgaaacctgttcttctgctgctgcttccttacatacccgcttatctttctgatgaatgttttccacttggggcctgcaatcacttctgaaaactcctttatcttcctcaacttgcaactcagccacgaattgcccttctgctccaccaggcctttaccttcttcatggcttctacaccaactcaacccaaaaccctgaaagcatccatacccacatccacttggctcttggtgctcatagaaatcctccttgtgttccactgcctccaccaatggccttccctcagaagcagccatatttcccgaaaatggacagtttgtaagggttggagctaggagctga

SEQ ID NO: 2035 - DNA, 893 bp, Glycine max
  misc_feature (6)..(6): n is a, c, g, or t
tcgtcngcgagaagacgacagaaggatacggctgcgagaagacgacagaagggtacggctgcgagaagacgacagaagggtacggttgtgagaagcccacagaacggtacggctgcgagaagacgacagaaggggagacacaaactttattacagttgttgtattgtaattaagcaagaatattaggcaatggagtcttctagaacttcaactactcttgctctttttttaaccatcaatttgcttttctttgtcatggcaagtggctgctacacttgcacacagcctaagccaaaccctatcccattcccttaccctaaccctagtcctgccgcgaagagctgccccagggacgcacttaagctcggagtgtgcgcaaacgtgcttaatggaccaattggtgctattgtagggtcaccaccggaccacccatgttgctcagtgctagaagggcttcttgatcttgaagttgcggtttgcctctgcactgccatcaaagccaacattcttggcattaaccttaacatccccatttcgcttagcttgatacttaacgcctgcgagaagtcgccaccctctgacttcctgtgcaactaggcatagttaattaagcacgtcattctcaattattcatgcactacttaatttaatttcatcgacgtgttttgtttatgtgatttttgtgccctttgtgttgtgatgattcttatgctgttcggacagtgttaactcatttagtgagaattcggttgtacccgtagctgtagccgtaatttaacttctggtgttagtgatgagtgatgactttctaattttttaaatttgaagaattaattgctccccctgttgtgtttagttattaactaagaattctcctttgtataagcttttgc

SEQ ID NO: 2036 - DNA, 577 bp, Glycine max
tttttttacaatgagaagtctccctatccagttgctgtgcttcaaacaggtaaatcatacctaaccaattttattatataaggaaattttcttatacataatttcttttttgttttcccaaataaaaaactaatttagcagtacgggacaacggaaaaaggaagatggatctccattccatagaataaaactagagagaaaaggacatccaacaaacatatttaaagccttttaattaagtgttaccggaaaaagtatgctcttcaacagaatattgatgaagctcatttggcagaagcagaactggatgagagtctttggctccttgctttatcagctttttccaagtaatcttgatgagattggtgtttggtccctctgttcataaggaaccatgggatggtaaagacagcggtgatgagagttaaaccaacgaagacatgtttcttgtcaccgctatagaggtagtgatttaacctcgatctggatccccctccaacgttgctgttggcttttgtgtcgctgctcatcttcgcttctcaccttcccctcttggccccagctcaggccccgtggg

SEQ ID NO: 2037 - DNA, 538 bp, Glycine max
ttttttttttttttttaaaatcatacctaaccaattttattatataagaaaattttcttatacatcattagttcttttttgtttcccaaataaaagactaatttaacagtatgcgaatatggaaaaaggaagatggatctccatcccatcgaataaaactagagagaaaaggacatccaacaaacatatttgaagccttttaattaagtgttactggaaaaagtatgctcttcaacagaatgttgatgaagatcatttggcagaagcagaactggatgagagtctttggctcctggctttatcagctttttccaagtaatcttgatgagactggtgtttggtccctctgctcataaagtaccatgggatggtaaagacagcggtgatgagagttaaaccaacgaagacatgtttcttgtcaccgctatagaggtagtgattcaacctcgacctgaatccccctccaacgttgctgttgctgttgctgttcattttcgcttctactcttcttcccttttggcctccgctaaaaaaaaat

SEQ ID NO: 2038 - DNA, 2640 bp, Glycine max
caaccactgagttcacccctcaaacgttaattaattacaaggcttatgtctattttcagtatttttgacatcttcgttctcctgatttttgttggctttaactttaaaccaccaattctgttccccttgtttcttcatcattagattttaagtgccatgcattgatataatataaatatataacttcatttaattaatgcaagctattgagttttgagtcgaatctattagccacaaaacacacacacacatattctcacacaaactgcaaccatggctactaccttatgttacaattctcttaacccttcaacaaccgttttctcaagaacccatttctcagttcccttgaataaagagcttccactggatgcttcaccttttgttgttggctataactgtggtgtaggatgcagaacaaggaagcaaaggaagaaagtgatgcatgtgaagtgtgcagtggtggaggctccaccaggtgtttcaccctcagcaaaagatgggaatggaaccaccccttcgaagaagcagcttcgtatacttgtggctggtggagggattggagggttggtttttgctttggctgcaaagagaaaggggtttgaggtgatggtgtttgagaaggacttgagtgctataagaggggagggacagtataggggtccaattcagattcagagcaatgctttggctgctttggaagctattgattcagaggttgctgatgaagttatgagagttggttgcatcactggtgatagaatcaatggacttgtagatggggttttctgggtcttggtacgtcaagtttgatacattcactcctgcagtgggacgtgggcttcctgtcacaagagttattagtcgaatggttttacaagagatccttgctcgcgcagttggggaagatatcattatgaatgccagtaatgttgttaattttgtggatgatggaaacaaggtaacagtagagctagagaatggtcagaaatatgaaggagatgtcttggttggagcggatggaatatggtccaaggtgaggaagcagttatttgggctcacagaagctgtttactctggttatacttgttatactggcattgcagattttgtgcctgctgacattgaaactgttggataccgagtattcttgggacacaaacaatactttgtatcttcagatgttggtgcgggaaagatgcaatggtatgcatttcacaaagaacctcctggtggtgttgatgagcccaacggaaaaaaggaaaggttgcttaggatatttgagggctggtgtgataatgctgtagatctgatacttgccacagaagaagaagcaattctaagacgagacatatatgacaggataccaacattgacatggggaaagggtcgcgtgactttgcttggtgattccgtccatgccatgcagccaaatatgggccaaggagggtgcatggctattgaggacagttatcaacttgcatgggagttggagaatgcatgggaacaaagtattaaatcagggagtccaattgacattgattcttccctaaggagctacgagagagaaagaagactacgagttgccattattcatggaatggctagaatggcggctctcatggcttccacttacaaggcatatctgggtgttggtcttggccctttagaatttttgactaagtttcgtataccacatcctggaagagttggaggaaggttttttgttgacatcatgatgccttctatgttgagctgggtcttaggtggcaatagcgacaaacttgagggcagaccactaagttgcaggctcacagacaaagcaaatgatcagttacgtagatggtttgaagatgatgaagcactcgagcgtgctattaatggagaatggattttattaccgcatggagatggaacaggtctttcaaagcctatatctttaagtcgaaatgagatgaaacccttcataatcgggagtgcaccaatgcaagataattcaggcagttcagttacaatttcttcaccacaggtttctccaacgcatgctcgaattaactataaggatggtgccttcttcttgattgatttacggagtgagcatggcacctggatcattgacaacgaaggaaagcagtaccgggtacctcctaattatcctgctcgcatccgtccatctgatgttattcagtttggttctgagaaggtttcgttccgtgttaaggtgacaagctctgttccaagagtctcagaaaatgaaagcacactagctttgcagggagtatgactgattctgctcaattgcaatttgtaagttatggaaaaattatacagcacaaatttgctattgtatagtactatctgcattgttttagggtggggtattataccacagtctagtcatttaagatctgatatgttacatgcctatatggacatttaagagggactcttgggtataaatttgttactccactccaatactttttgtgtatgacatttgtaatttgttagagttagatttataacatgacacacataaacttgcacgtgattaatgttgaatggagtaagcaatgcctagctatgaatttttgcacttttaattgtgatttacagaatccccctgtatagtttatcatt

SEQ ID NO: 2039 - DNA, 1762 bp, Glycine max
gtaccggggccccccttcgaggttgacggtatcgattagctttttttttttttttttcataataacacatttcattgctagtgataaaaaaagaaacatacatttcaaactaagtagttagcatgtgctaggaaaaaaaaattctaagatcattagtatctcagtattttggacgaaacacaccaataattcttagaaagttgacaacagcaaataagaaaacagcagttcctacaatagttgaactgaatctccaagggtcacggaagtacacagatatcagcatacccaaatagtgtttccaacagcagttatagtgttcattgagttcctttgtggttttgccgtagtaatttgaagtcaccacaacatgcttgcaaagaccatttatcatagttgccaattcagtgtggctgccaagttcatgctcaatgatttctgtgtcaaccagcagctccacatcctcttgagtgtgaatcagtgagtcaattagagtcacatagttgcatatgaaaggttggtctgaatagtgacactgctccaatgcaatgaggttccttagaacacattctgtgacttggtttactttcaaatggggtatttgcaagcgagctttgaaacatttggagaatggtaagcaaccaaaacacaagaaccagctgaggattggagtcttctcaaactttatgtccaaatagctcctaccttgaactttctcaaagttaacaccagcctcattcaactttgttgcagttctaagaacacattccacttgacaaggggtgaaatgtcgtgatggactcacattcaccccctcaatctggaactttgtaggcaagtaggtgaatctgatcaaatcagtaaagtgtttgcaagatttacaattcttgatcatctccactttaaaacttggcttgtgtgaaaaataatcttcaaagtagttaaaggcaagctgaacaaatttgacactgttatcttttgtgtcattgtctccaaggatgacccttgtgtgcaattcctccaacacaaacatgggaatctgattttcaagtagtgacaaatcgcgttgagtcatcttgcacacccatgatgtggtgaacatttgatcattcttctgttcagatttgtttgcttttctaaaaaaacagctccatgatgaagactgagtctaataggatcatgtcaacaaacttttcatccttgtggagttctggcttggaataacaaatacctaccttctctctattctcttcaaggaaggatttatattgtgacaaagctaaaccttgcttgtgagatagacgtttccaaaaagcatgaaaatacctttgtttctgcttctcctgctttagttctggtttgtcactgtgaagagggcctattgagatgaactgtggtgtataggcttctgcattcaatttcaggagatgaggaggaaccttgtaaatgcaacattggtcatgcacctcaggctcaatctgttcaggaatgttaattatgtgctggatctgaggtttgttttcaggtaaaggagtataactagtagcagaagtcattgaaatttgaaacacaagtttctcttccgccaacgcaacaccaacaccaacaccagttgaaagatttgtttcacaagatagaaggaatcaaaacaagcatgccaacacaaaagtctttttccattggcaaatgagaccaagagttaaaaaacacaagccttggcggttttggtaaagtggaatagaaagtgttttgtttcacagat

SEQ ID NO: 2040 - DNA, 1049 bp, Glycine max
  misc_feature (15)..(15): n is a, c, g, or t
  misc_feature (23)..(24): n is a, c, g, or t
  misc_feature (112)..(112): n is a, c, g, or t
tttttttttaagttncttttttnntttgttaagtaggtatgcatgaatgtatacctagagaagcaaatgaagaactcaagaagtgtcatatttagtttttacagcatgcatntcacgaccagtaagctttttcctgttttttgcaccacctacttttttaatttccataagaaatgttactgcagtaagaatgataaacaaaaaaaaaatcaaaattacagcacatgaaaggtaaagtatatataatagaagcctaaagctttcttttaaaatttcatgacatattctacaatagatcaaggagagataaggaaactcaagcagatcaagttcattcttctcacaaggcatcacaagcagctatacggcaagatattgcatcagcaagtgatgatactccaagttctgaggaagatatcttgtaaagcttttgtatctgggattggtttgctctcccttctagctcctccaggtcaatctccttgccattaatgagcttccctatagcttttatctcatcaggactagcatcaaatcgagtagcaaggatataagttgtgctgtcagatatgccacatcttttcaaagattcagtaatatgcttagaccctgagtagttgtaaacaagctctgaatgaagagtgcgtgtggtcaacgtgtctcgagacttggctacaagtgttttgtgagcagctgctagaacagggaaaatatctgggataagtaaagcattgaggaatgcaacttctggctccaatgtcccagcttgcatactttccaagagttcttttgaattcgtcacatcagtgtagagtgcaacagaaaaagtggttccatttatattgaacgacttcataacttctgtttgaataataggagtagctccgtggatgaacagcgctaccgggcgtgggaagtgcgaactgcgaactgcgacggctgacaagagctagggctcgtgcatggcctcaagcggtgaatctgtcaataagtgaagattgagaaacagagtaaacgcacgtttgctactttgctttttggggccactt

SEQ ID NO: 2041 - DNA, 1945 bp, Glycine max
aacatgtccttcattcaattcaaagtccggcccggccagcccatagttaccttgagcttgttgttggctgttaatttgttgagagagagcaatcaaaaacattcatggcgtcttccaaggagagagaagaaaacaccaattaaccaccacctgataggctgatacaatacaatctcctttcctttttcgacaacaagaatggctgcgaaatctagttcgagttcgacaacaacaaacgtggtgactctgaaggcggcgtgggttctcccgcagcgcacgcagaacatccgtgaggtgtacgaggttgggcggaagctcgggcagggccaattcgggaccaccttcgagtgcacgcgccgtgcgagtggtgggaagttcgcgtgcaagtcgattccgaagcggaagctgctgtgcaaggaggactacgaggacgtgtggcgggagattcagataatgcaccacttgtcggaacacgccaacgttgtccgcatcgaagggacgtacgaggattccacggccgtgcacctggtcatggagttgtgcgagggtggagagttgtttgacaggatcgtgcagaagggacactacagcgagagacaggcggcgaggttgataaagacgattgttgaggttgttgaggcgtgtcactcgctaggggtcatgcatagggaccttaagcctgagaatttcttgtttgataccattgatgaggatgctaagcttaaggccaccgatttcggcttgtctgttttttacaagcctggtgaatccttttgtgatgttgtcgggagcccatactatgtcgcaccagaggtcttgcgcaagctctatggacctgaatcagatgtttggagtgcaggggttattctgtacatcttattaagtggggtgccaccattttgggccgaatctgaaccggggatcttccgacagattttactaggaaaacttgattttcattctgagccttggcctagcatttcagacagtgccaaggatctaattcggaaaatgcttgatcaaaatccaaaaacaaggcttacagcacatgaagtactccgccacccatggattgttgatgacaacattgcacctgataaacctcttgattctgcagttttatcacgtctgaaacaattctctgccatgaataaattgaaaaagatggcattgcgtgttattgctgagaggctatctgaagaagaaattggtggactgaaagagttattcaagatgattgacacagacaacagtggaaccataacgtttgatgagttaaaagatggtttgaagcgagtaggatctgaacttatggagtctgaaatcaaggatcttatggatgctgcggatattgataaaagtgggacaattgattatggtgaattcattgctgccactgtccatttaaataagctggagagagaggaaaacctagtgtcggccttctcctattttgacaaagatggcagtggttacataacccttgatgagatacaacaagcttgtaaggactttggtttagatgatatccatattgacgacatgatcaaggaaattgatcaagataacgatgggcaaatagattatggggaatttgctgccatgatgagaaaaggcaatggaggaattgggaggcgaactatgagaaaaacactaaatttaagagatgctcttggattagtagacaatgggtccaatcaagttattgagggctactttaagtaataattacttggagacaaaattgaccaaatattaatttagtaaatttctacgttgtttgtagttgcttgaccaaattttgcgtatcttttaaattatagacccatctttcctggaaagtttttcatcttgatctggatgaggtccatgaaaaaatgaaatggtccatacaacgaagtgcagctcctttagcgcttaatcaaaagggaaaaaaactcgggac

SEQ ID NO: 2042 - DNA, 1551 bp, Glycine max
  misc_feature (34)..(34): n is a, c, g, or t
ttttttttttttttttttcatcagaacaaccatntcaatcttgcacttgatattatgtacaatgtacacatatgatttatggaatcaacaatctactagacaatccaaccattacatctcaatactagacacataatttgactttatttggttacaagttacacattaaaagctttcgaggtgcttaatgtaatttcatccctgtttcccacttgcttttgtttttgcttaatttccttgctagcattgcctgaaccatctctcttgcttacctttggctgctcttcatggaattgataacttggcactgttttcctccttgaaacagttctcctagctttgaagttggtctttggtgtatgtggtttgaagctaaatttttcttctcgtgaattgatggaatagttatcaaaatgaaggggcacttcatttgacccgcagctctccttttcttccccagcagcatccaaaaatcttgtcatgattgtgaatttgtgactaccattagaagggtcatactgcttcatggcatggctttcaactgatgaggtctcaggaaggcgtgttgccatccatcgttcaagccagctccaactcatatttgactccattctatcaaattttggagatcttctctttgaacagattcttagctgttgtgagaaagcataagccaatgctctttcccttctggttgatgcctccattctattctgcatcctcatttttgaaacatagctacttactgtgctgtcatcccaatcttccttttgttttattgcttgagttctggtcctgtgctgaatacggtggcaaatgccctttttttctccttcaaaagagaaaacttctgtggagtttgcggtttggacttcaattgatgtgcccatggactttctgtctggactttctgttgctaaattgaactcatcttttcgagtttgtgatttgatttctccattttgatgcctcaacaggaagcctctaaatgctgattgaataagaatagctgcttcttcctcattcaatgattttttggagtttgaatctgttctgttctgtgttacattctccacagtttcttcacaactggtgtctcctttatcattcaacaagtcctcatttacggactgtgaaaccgtgacttcagagctcttaactgaagctgaatcattctctgcaagcactgagttgaattcatcgccacacaagtatgacctcacagataaccatcttctattttcagcactattgcgcctcactttgttttcatgagacccatcagaacgatttttggagaagacacttcttaccaactccccagtgaaacccatcttctgttttctaagttccacaagtaaaagccttcacaaattccccacgagatgtcctcaaccatattaatatatgccaatgcacgtaggtggagtagtaagctacattattattaggattggataaagtatgggggggggcctacgtagctgatacttgatcaacaatattagacattaaatataaaaataaataaagttgcattggtgttatttt

SEQ ID NO: 2043 - DNA, 1038 bp, Glycine max
tcgagtagctacgtaggccccccccccccatggctttctaggaagttctcctacatttatgaagctcgtccttctgccaacctggccttctttatgcaatcactgtatgctcattgtataggttacatggttggtaccgcaactttatctcacagattaggtggcctttactgcctctactgtctttatgagactcaaccatttaatccttcttttaaggtctatctatcccttggagaattaaagaaacttagaatccttgttgctgatgcaaaagcaaatgatattaaagtagcacttgctttagtaaaaagaatgcttgaaagaaacacattcctttttggctctgttgacttgatggaaggttgtgtcacagagacagtaaatgaactccaccaattacagaatgcccgtattcaagttgcatatgaaaagttatttgatagcacttcaattgacaactacatccagatggaccttggcttggaagttgaccttgatttgctgaagaaaaagtcatctggatatgccacggccaagaatgtggctattcaagaggcgagcaatattttagacgttgaaaacataaagcacttacaaaaagataaggaactgataggagatgttgtggagaaggttgctaacgactggcacgttcagaaacaaacattttataaacaaacaggattaggggacgatgcatatgagaaggaactggagcaattacttctagagcagcatccacatgatggaaactcttaaccaagattgaagatggacatctgggtcgtcgtggttacttttgcatggggaattcataattaatatccctgtttagatagtaggaggaaatgtgttccttttccagttattgctgctttaaacaagacaatgaaacaaaaaaaaaatgataaaatgtattatgcttcattttattcaacatttctatttttcttctaaaaatatgcccccatatttggggggcacccgcgctttttttaaaaaaatttcaacgaggttctcttccatactgtccaa

SEQ ID NO: 2044 - DNA, 1577 bp, Glycine max
aaatattctcaattttccttattgttgttggtgttcataggatctggcctaggcaatagaaagaaaatttggcaaaagtgtgcaataaaaacacgttattctaggttagactcatcgatggtgttaagcaccctcataactcaactcttcaagtagaggcaatccagtgtatgctatacaaagtccatattacttacaagtatacaaagcccatatacttacaagtaggatggtgacacataaattgagatgacaccaattgtgtgtgatagtgattacatatgacttcaagatcatttgtggaagaacatcacaatttgctaaatgataaatttgtcactctcacaagaactgctattaatgatctcccattgctggaacaataaatatgattttcaggcatacctcaactcaggcgttacttccttccggtaacgtaatcaatcttgtagttgaatcatattccattgcagttccacagttggagcatttgacagtgttggtggaaccaccatttgaaattgagagtatagtcccaaagaaagaggtattttcagtaccgcagttcggacaaggaccctttaaaatcacaaagtcttttacaatggcatttgttagtgacagagctatccacacaatgaggggaacagcagcaaaccaagtgaaaatgaaactaaaaggctccggcagctctagtagatatgtgatctcaaatccagtcagatcatcaaggaagaagaacaatcctaatgcaatcacagtagccgggacgttcagcagcaacatctttaaataatcaacagataggtcactgtaaacctttctactacgaaggctgcaccttggaccctcagctacaatttcactcccttctatctttagcctcagtttcaactcatcaaactctttgtcactcataattggttttccagacacataagccatcgaagcttccaggaatttttgctcatcagaacttagcatgacaacgctgcttccttcccacatgagttcttccttgagattatcaaactcttcatttgacatgatagcctttccctcataatagaatgcttgcagtgcttggaggaattcctgctcaagttcaccaattgatttcttctcttttttgtctatgctacaatatgggagaattttactatcaacagtatttgaatcatcttcaaattcttcaactttcccttgttgatctgcagtggccataggagaaagtagaaacagcctttggcggaggcataagtgcctgccattgaactgaatgaggtgaacaccagaagctgaagagattggtgtcaagggtgcagtgcatggacgaggtggtgttaatgtgaaggctagtttactagccgtgaacatggtgatggtggttatttggaatcaaagtggtggtagtgtaactgggaaagttcaaggtggtggtggtaatggttgcttttgtttgtttggagggaaaggaagagtgaagagaaaaggctgaggtggtagataaggtaactggaacgtgtggagggaattgcaacggcttattctccttccttctcttccttcgttgtttc

SEQ ID NO: 2045 - DNA, 1799 bp, Glycine max
ttgagagaaatttatggcatgcgataaattataaattataaagaaatattgcaagtaatgataatgtgccatgttacaacgaaccataaaatcaaaacttgagtatatattaggggataatacatcaggcaaccaacccattatgcagcatcaactttctgagccttatttcggcgatctctagacccgttatctctagagcgtgcatgtttgccccctctaccatgccatcctccccttccctgcttattcttaaattcacggtgcttgccttgattaccacgaagcaggttccagtattctttttcggcctcaccagtcactggatctagaatagcaatataattctttacaaccaagccatccttttctgaaataactgcagcagcacgtgctttctgagcagcttcagtttcttcaaagcgaatgtatcctgactctgctccaatcttgaaatcaatgtacttcactgtaccaaatttctcaaagacactcttcaaatcctcacgtgagacaacatccatgttgtccttgtaagcagcggcagaaaattttccaccagcttgtcgtttcttgtcttcaccttcggttacctttccttctttcatcccattgttttcttcactttcagtttcctttgcttctttcgtctcagagttttcttcatcatcgccaacattttctgttaccatttggtcattttctcctgaagtaatttcagagtgggggttttcatctgttttggagacaacactattgtccttggcttgttggtcaacaccattttgttctgaaggaatttcatctgaaatgctctttagtttgaaggcaataattaagcctttagggtagtcttcttctacatttgtgttattctgctgatttgaacccacaggtggacgagattttttataatcttctagttctttttctctatctgcatcaaagtccttctttggttttaattctaactcagccccagcatataccaatttttccttcatgaccttttctacatcttcctctgaagaaaattctacaagagcagtgccacagaagaactttttgtctccaacatgatggggaagccggacactattaaccttggcatattgaccaaagagtttctccacatcttcaagcttcagatcatgttcaaatggcgatacagcaagtgttcttatctccacctgctcaacctcttctagctttggaagttcagttttcctgccaacttttttcccatcttcggagaccttgagtgtagctgaatttctcaaagtttgagcaacagcattcacggtatcttgggccacttcttcgggctttacatcacccaaattaaggtgctttcgcattcgattaaacgagcaaatcagcgccaaactaatcatgccatcttcgctttcagtgatactattcctcatgaaaccatcggtgagaaggttgctatcgccgaaataaaactcaacctgtcgtatgactttcttagttgtttcttcgtctaacgattgcgttgccattgatgagtgcagagtcgccgagagagaaagagagagggtttagggtttttgcaaagtacgttgcactctgggctttaaagtatggtgtttcttttgtaattttaaaagctcagtttagattagaaattagaaataatataaacacgaaatatggggggataaagataactgaatgtactacgccactacgcactccaactccaaaccgacagcgtccacttttttttcaacaaattaaaggagagatgagaagggggggggggcctacgtagctga

SEQ ID NO: 2046 - DNA, 1006 bp, Glycine max
  misc_feature (1)..(1): n is a, c, g, or t
nagcaggcacgccctctttcttttttagttttttttttcttttttttttgaagaacaattgagtatggcttggtaaaataaataatgcatgcatcacattgaagagcaatattacagcatccaactttcagaattacaaacaacattgacttaagcggatagatttgtacactaaaagaaatcaacacatcttggaattacaaactggacaaaaggaacaaaggcaaaaaagcaccaaaagttggatttcctgctcgtgttcccacattgtaaatctccatatactaatcttgaatgatattttttctttcttttgactacacaaagcatgggagcataggtaaactatcttcaatgtctggtgtattacaaaataaatatcagtcatcaacagggtcctggggagtttcatctggcttgcgtttgatactaatgacagggcattcagcatgcttccaacaaaattcactcacagtgccaacaaaaaccttttgaaaaggtccaagacctcggctacccacaaccagaagatcaggccttagtcgtttcacttcatgacatattacttctttgggatcacccttcattatccatgcttgacaaaccaccccaatttcatgacacctattgacgaagtattccatcagatgaacccctctaattctatctctctgattcatgttcttaaaatcgtcaggcgatgcgtagatactatccatgtcattaaaaccatcttcatcggggacttgaacgtgaagaaaaagaaggttgaaggcagagacgttgttgcgaacgatcttgttgatggtccattcgaaagcccctttgctgctgatcgaaggatgagggtatcccttcatgctcgactcgttcactgccaccatcacccgagtcacctcttccgccatcgctgagtcaactcaccccgagtcacttcaatttcaattcacttcgctccccgttctttgatcacgcagttatatatatatatatatatatatgcaat

SEQ ID NO: 2047 - DNA, 1000 bp, Glycine max
  misc_feature (2)..(2): n is a, c, g, or t
  misc_feature (9)..(9): n is a, c, g, or t
  misc_feature (18)..(18): n is a, c, g, or t
  misc_feature (22)..(22): n is a, c, g, or t
  misc_feature (27)..(27): n is a, c, g, or t
  misc_feature (36)..(38): n is a, c, g, or t
  misc_feature (42)..(42): n is a, c, g, or t
  misc_feature (44)..(44): n is a, c, g, or t
  misc_feature (49)..(49): n is a, c, g, or t
  misc_feature (67)..(67): n is a, c, g, or t
  misc_feature (73)..(73): n is a, c, g, or t
  misc_feature (81)..(81): n is a, c, g, or t
  misc_feature (84)..(86): n is a, c, g, or t
  misc_feature (113)..(114): n is a, c, g, or t
  misc_feature (124)..(124): n is a, c, g, or t
  misc_feature (127)..(127): n is a, c, g, or t
  misc_feature (129)..(129): n is a, c, g, or t
  misc_feature (133)..(133): n is a, c, g, or t
  misc_feature (136)..(136): n is a, c, g, or t
  misc_feature (145)..(145): n is a, c, g, or t
  misc_feature (148)..(148): n is a, c, g, or t
  misc_feature (150)..(150): n is a, c, g, or t
  misc_feature (156)..(156): n is a, c, g, or t
  misc_feature (169)..(169): n is a, c, g, or t
  misc_feature (184)..(184): n is a, c, g, or t
  misc_feature (188)..(188): n is a, c, g, or t
  misc_feature (195)..(195): n is a, c, g, or t
  misc_feature (205)..(206): n is a, c, g, or t
  misc_feature (216)..(216): n is a, c, g, or t
  misc_feature (227)..(227): n is a, c, g, or t
  misc_feature (237)..(242): n is a, c, g, or t
  misc_feature (244)..(249): n is a, c, g, or t
  misc_feature (264)..(264): n is a, c, g, or t
  misc_feature (976)..(976): n is a, c, g, or t
  misc_feature (989)..(989): n is a, c, g, or t
cncccgggnggaaataanaaanaggcnacgttcccnnnaaangncaggncacccaaaatggggagtnctcatngccccggnttnnnttatgttcggttgaagtgggggaatgnnggaaccattnccnangaancgntagcccatnatncnccaggntgaaataccctcntaaagggaaaaaagngganctccccncggggggccnnttagaatagngatccccgggngcaggaatcnnnnnntnnnnnntccttcttccttttnttttttttttttttttttttttttttttgcttttgtttaaagataaagtcaagatataatatataagtggagtaattctcgtcctttgaactaactcttttggattaagttgaacccaaacacatattctaagagaaacatttgattaaccgaacaaagaaaataaacaaagacaaaggaagttaaactctcaataaaagcacattaatacagtatcactgacgtgaaaagcagtaatatacatcagtcttttttttgacactaaaatacaccagataacaaagtttcatcattatttcaagaccatcaaatagtatttgattcacacagctacttcttctgcacagaatagaggcaaatgttttaggcagttgctgtgctagtttcagatgttgctgcttcaccttcccagaaggtagtcttcttcccagttttggaaacggtctgcagaactgtgtctggctggacatttcctttcactaccaccttttgttccttcaaatcaatgtcatatgattccacaccatccaattttcctagaactctcttcactgctccaacacatccttcacatgacataccaactttgaggacaacagtctgagacatggttacgggatggacgacaaaggaagaaatgaaatgatatgattgcccgcgtccctcggccgcgacctcgctacgggcgcgagccgattcggctcgccccggnccgtaatggccgnaatcccgcggg

SEQ ID NO: 2048 - DNA, 900 bp, Glycine max
  misc_feature (57)..(58): n is a, c, g, or t
  misc_feature (133)..(133): n is a, c, g, or t
ttttgggggggaaagggtattgtcgcggatagggtggggccgcctccgcgcgggaannatggggggggggtatgtttggcgcgctatggagcgattgggaaatccccacgttttttttaaaaagagggggatntcttatttcccaaattcgggaaacacccaccggcaagatttttctctgcccttccctcccattttttttctgttttttttttttttttttcaaaggaagttaaactctcaataaaagcacattaatacagtagcacagatgttgaaagcagtcatatacagcaatctttgttgtgacacactaaaatacaccagataacaagtcccatcgttatttcaagtccataaaatagtatttgatttacgcagctacttcttctgaacagaatagagcgaaatgttctaggcagttgctgtgctagtttcggatgctgctgcttcaccttcccagaaggtagtcttcttcccagttttggaaacggtcgcaagaactgtgtctggctggacatttcccttcactaccaccttctgttccttcaaatcaatgtcatatgattccacaccatccaattttcctaaaactctcttcactgctccaacacatccttcacatgacataccaactttgaggacaacagtctgagacatggttacgggatggacgagaaaaaaagaaatgaaatgatatatgattgggttttggggaagttagttttatatatatataggccacgcaaaagcaaaggttttgagagagaaaggtcgaaagacaactttgggtggcgtgagatgagacgggtttcggtcgccttctcgcggccgcacccttctgtcgtcttctcgcagccgtacccttctgtgtcttctcgcagccgtcggacgcgtggg

SEQ ID NO: 2049 - DNA, 988 bp, Glycine max
ttttttttttttttttggtaaatgccaagtcaagctcaaaaatgatattattgataataataacaacaataagataacaatcttttaggaataatgctttctttctcctatttgtctcttgcattctgtagaattacaatacaaaacacagttacacaaggacctctcaatttcccactagaaaagcagttgtcttcattaagctcaccccgatacaagctatagatttaattggtaacaaaattttaactatgaagcattccaacagccaaccaccttttttcataacaggaaaatgtaacctaagaagagcactgagcagtaaatcaatccaggtttagaaatcaaattggcaccatcagaactatagggagcaaaggttcctgaaggagtgttagtggtcaagaccacaacaatccagttatcttctgaaccaataccaattcctgtatactttgtgtcattgagactatcagagtagagagatttggtgaaattagtgaggacaagacttggaaccaggtcaggaacacaagcaggcattacatttccatcccttgtgttggaaatagccaagtcacacttagataaaaggtctggatagttagaaaactgaggctctgtgccaggtacagtgttagcacctgtggtatttgtgcagggttgtttcttgaattggtcagctattttttcagcaaggcaatctgcattgtcattccttgttagagctttcaagtttaacgatgctcgatacttgttgataccctgataaagattgtcttcctcatcatcgtcacatttaactggatagcttattaagagaatcacaagggaagaaaggagaagccgtgagaacggagagaacttgggcagcaccatcctttccagttaatttgtggcagaaggaacggtatagctagtacagatgtagatgaagaagattgaagactactcctatacccgtctgtcggctgctccctgcccctgc

SEQ ID NO: 2050 - DNA, 1331 bp, Glycine max
ccccccgtttttttctgctgtttttgtttcccttaggttttcaacatattagctcattgaatatctatgacagcagcaacaaatttgaatccacaacaaacaaaaattgaaaacatgtatcacaaaaggtaaacaaatccacagatctagattcaggatcaaagaatcgtttgcacccttgcaccaattaaccaggcattggacgtctaactcctctttgttccaaaacttgaacgagcctccctatgatgctattaattcggcctcagtgccgtttaggattaaacggtggatgttgtgagttggggacttgaacatgtagtcgaaatggaagccattggaggaaatgaggatgatggtaggctggactagaactggattagtgaaacccagatctgtactaaacattgagaggtacaatagcatagttttaggctgaacaaattcattacggatacaaaactagatgagaacatacgaatctcataattcggattttgccaattggccattttcagttacagcttccaagttccagcctctttctgctgctcctcttttcaattcatttatgcgattttcaactgaagcacaggcagcactgatgtctatattcttctgacaaagctccttccattgcatggacaacgcattaagctcatatgcagtgttttgctgatgatatttcctttcacggtttactttttcaatcttttcattttgttcctgagctaatttctgcattcttgataagtatacttccaatctttggttgtgttgtttccaggtatcgggaccatattttaacatcaaatccaaattttccatcctcataatctgatattgcagcaggtgttgagctctatgaagagcttgcttccaagcagtttcgtcgttccttttattcgccggcggcatttccaattcgtagcgcgatctatcaagagcaacgggaggtcttccggctctcacacgttcgtactctctcgcaatcattgggtagttctgctggaaattggagttgggaagaggagggaaatctttgaggaaatcggtgggcttcttggtgctgcgacgcatctcatcctccacgagacggtcaacctcaagtttgactctggggtctgcgtagtcgtcatcaatgtaaggcaatgcgtcgattatttccgcgttagaaccggtaggcctaccgtaagacggtggggcttccagcattagaactcccccgttgcttccatccgccatggtcgcttgcttgaagagagagagatagtgaaggttttcctccgcgcagaaaagaagatgggggggcggcctacgtagctgctcga

SEQ ID NO: 2051 - DNA, 917 bp, Glycine max
tcgagtcagctacgtaggcccccccccccccatggagaaccacgaaaaaggatgagcgttgatatatgaaagtaaaagatgagaagagaggttggtcggagaacataatctttgtcgattccagaaatgtgtagcactagcattagcatagcttcctcacaccaaagctttctcaccaacgcccttattccaccaaagttcaggaccaccaggattagtattgtttcttgcagttccccacaacaatctccaaggaagaagaataatgagaacaagttggcaaagttagcaatggttgcagttgctgttggggtgctaacacttgggtcagttcatgatgcatcagctgccaagactggtggtagaattggtggccaggccttcaagtcagcagctccacgctccgcaccaagaatcaacaattccaggaccaacatctatatcaatcctcgagtggcacctccgcttgttggtggctatggctatggttatggtggctggggatggtctccattttcattctttgcaccaggtcccagtgtagctgtaggcgttggaggtggatttgacactattcttctgtttatgtttcttggtgttgctgctgcagttgtgaggagattctttgggtcaagaaatgaagatgatgactactagcagcataaaaggctttttaaagagagtgttattttgatgtatagaagaatggaagagtgaccaattaattactttgatgtattttgagatattatacttgaaaaccaaagcaatcatgtgctttctaatgcactgatttacaatttacatgcttgttatacaggatgtaatgaaacaatagacatacattgtacttgttcagggaagttcccaatatttacactaatttaaaaaccatcaagaaaagcatatggttttag

SEQ ID NO: 2052 - DNA, 961 bp, Glycine max
tcagctacgtaggcccccccccccccaaaaatatcctcagaagaaggtttgtttggtttagagagaagaaaacgttggtcggagaacattaccggaaagagaatctttgttgattccagaaatgtctagcatcgcttcctcacaccaaagcttcctcaccaacgcccttattccactaacgcacaacccaaagttcaggaccactgttactttcccttcttcactcaaaactgtctcttgcagttccccacaacatgaacagcaacaatctccaaggaagaagaatgagaacaagttagcaaagttggcaatagttgcacttgctgctggtgtgttaacacttgggtcagttcatgatgcatcagccgccaagactggtggtagaatcgggggccaggccttcaagtcagcagctccgcgctcctcaccaagaatcaacaattccagaaccaatatctatattaatcctcgagtggcacctccgctagttggtggctatggctatggttatggtgtgccattttacggtggctggggatggtctccattttcattctttgcaccaggtcccagtgtagctgtaggcgttggaggtggatttgacactattcttctgtttatgtttcttggtgctgccgctgcagttgtgaggagattctttgggtcaagaaatgaagatgatgactactagcggtataaaaaagagtgccaagtcgatgtatagaagaatggaagggtgaccattgtgaccaatttattagtttgatgtattttgagatattatacttgaaaaccaagcaatcttgtgctttctaatgcactggtttacatgcttgttacacaggatgtaatgaagcaatggagatacattatactcgttcagggaagtttccatttgcactaatttaaaaataatcaagaaaacatatgtttttaaaaattcaaaaaaaaaaaaaaaaaa

SEQ ID NO: 2053 - DNA, 1673 bp, Glycine max
aaagcacccaaatgtttcttcaagtgaagaaacttttccatgtaaattaatgggccaacaaaatataagacttcaattattgattagcaccaacaaattcataaacagaataagtactctttctttttcttccaggaaacaacagactaataataataataataataataataagcttagaaaaataatcacataagatataatatatgtatgaccctaattacatctgcatcaaatcttggaaaatcttcatgacaggagcaggcaaaccaagaagcacattgatgttcctcctctcttgtccatgagagaggaacagaatcacttccttctctggcagtgacactggccctgacagaacagggtcaccccatccaaaatcagtggtgtgaaaggaaagcctagaccaagttgtgatgagaagggtgcaagcaagagaaggccttgctcttgtcacctcaaagtaatcaatagctgatctcatgtaactgtctgtgaccatcttgattgcatcttgaatgagcctcacaccaaatgagaagggcttttctgttagctcaccagcttggcacacagaatttgttagcacaattccattcccaaagtacccttttgggagagggggattgaacttggccctcccatcaacagcaaaaagaagctttgtttgttggtctggcagcaacttaagtgccttggttcttgctatccacacaaatgctgagaggacttcaaatgttgtgcatttctctagtgctccatcttccatggccttcatcttcagctgctttagcctctcaggttcagagcagaaggatctgtagaccatctcatcttctacatataagctgttagtgctggacttgtcttcaatgtcagcaaattcttggtgcaggtgctctatctttggagggtttcttgccttgagcatgcttctgtctagcactggagggattgagagtggcaagtccctggctgcttctccccaagagttcacaaattccattgcaccaattccatcaaacatgcagtggttcatgcacagcccaagcgcaaagcctccacatttgaacttggtcacctgagcaaccaaaggaggcatctgaagaatgtgttttgcttcaggaatgtcataaacaagcataccaagagtcccagggtcaggctttgtgatgtcaccaatctcttccatggaacagtttgcctcagcctccacaaacaaggcaccttcacctgtgcaatccactatgagtttaccctctgaccttatagtaatccccccagcacaagaagggtaatagaggtcaagtaccttcctccaagcttttttcatcacttcttccagcgatgctcattccgtctctcatcagtttctaagcagtgggcggttctccctatcacagcaacgttgtggtcgttgttagataggaaatccattcattcgatgtttcttcatcagggggaactagagctggttcacttagcttgttcacgataactgcgatcctgtgttctcaatccattcatatctgagactccttagtataattaaagtgtggtatctgacgcgcaatatgataggagtcggagtttctgcaggagaggatttgcaaggtatatatgtacgatgagtattggggaatagattccggccaggccggctcgagcggccg

SEQ ID NO: 2054 - DNA, 661 bp, Glycine max
caccaaacattttccagggtacatccccgaccaacatccagtcaccatctttgtcctcataggtgggcatgtattcaatcccatttccaggatccatcagtttcctctcattcatcaaatgattacgaatggctaagccacaaaacattgtctctaattccctcatcaaatgctcataactatcgtacatgtcaagatccacttttcttagataaggagctccatccaccgccaccttcaccaacttgcaacagctcttcatagcattcttcctgcttgccctcaccggcggccaccccaccagttgttccctgttgggtgttgggaatttggaggtggggcgcaagattttattttgagaaggaggaagggtatcagagaagccacgttttgtggcagtagttttggtgccgggaaggcctaaggtgagctccgtctccttcaagttacaatcaacggcgtgtgattcggaggacattgtttgtgtgctctcaaacagtgacacgcgcaggcgcagctcaattaatttcaacgttcgaacttcaaacacagctaaacggtggtcgtgtacgtgccttttccctccctgtttgctgctatgactaactcttttcttttgtctttatgatttgaaagacatgggcctacgtagctgactcga

SEQ ID NO: 2055 - DNA, 1277 bp, Glycine max
ttttttttaaagtatatcctgatgttatattaacctataaaaattcaggagcgagctagtatagaagtgttatctattctcgagtgaaacataaaatgatcaggtgaatttatctaacaactagaaaactgggggtagaataactagctagcacaaagccaagtcatacattacatgcatactcatgatataacgatgatcctaatattgattacatgccagcctccccttatttgttttttagatcactagctaatatagagaccagtatttgttctagttcttcatttaaagtcaaaacaaaagtaactaattaaccagaggtgctaaagggacatgtacatcaagcaccatgcatggatatttccctgtaccaaattcactcttcttctaaccggagcttgtaaacgttgaaggtgtccaaggaatgcttaattatcagctatcagcttatcattattacgcactaattaattattcttctagctagctaggtggaacccgtacattttgaagaagtagacctcggacctaaaccaacggcctctgagctaatcataagtcttatcctcttgcatgattcaacaaacatcttccagggtacatccccgaccaacatccagtcaccatctttgtcctcataggtgggcatgtattcaatcccatttccagactccatcagtttcctctcattcatcaaatgattacgaatggctaagccacaaaacatggtctctaattccctcatcaaatgctcataagtctcgtacatttcaagatccacttttcttagataaggagctccatccaccgccaccttcaccaacttgcaactcatcttcatagcatttttcctgcttgccctcaccggcggccaccccaccacttgttccttggaggtggggcgcaacattttattatgagaagtgttaagggtgtcggagaagccacgttttgtgccattagttttggtgccgggaaggcctaaggtgagctccgtctccttcaagttacagccaacggcgtcagattgggaggacattgtttgtgtgctctcaaacagtgacacgcgcaggcgcaggtcaattaatttcaacgttcaaaaaacaggtaaacggtggtcgtgtacgtgcctttccttgtttgctgctatgactaagtcttttcttttgtctttatgacttcaaagacttaggaggagtagtggtattttcttcggcaacgtgcgtgcttatattatgctgcgtatccccttctgtcgtcttctcgcagccgta

SEQ ID NO: 2056 - DNA, 1986 bp, Glycine max
attctctctctcttttttcttcacacatatattttatcattattatattattattattatattattagacatacattccatgaaaaacagataagtatcgatcagctacgtaggcccccccccgttcccagcagcataaattgagaaaataagacactctctcatgagttctgtctggttgcatagcattggttggtagttgtctcaaaaatctcttcttgccctttggccataatcaaaagccaagacactgttcatacagctgctcaattatcaagccaaccttgctcggttccactgcagaatttcagtttattcttatctaggtagactccttataagtgcgcagaagttcaagtgtagagaatgagtcagcctaagattaaacgccgagttggtaaatacgaggtggggaggaccattggtgaaggtacatttgcaaaggtgaaatttgcaaggaactctgagacaggagagcccgtggctcttaaaattcttgacaaggagaaggtgctaaagcacaagatggctgagcagatcaggagagaagtagctacaatgaaactaatcaagcatccaaatgttgttcgattgtatgaggtcatgggaagcaagaccaaaatatatattgttttggagtttgtaactgggggggaactctttgacaaaattgtaaaccatggaaggatgagtgaaaatgaagcacgtagatatttccagcagcttataaatgctgttgattattgccatagcaggggtgtctaccacagagacctgaagccagaaaatttgctattagatacttatgggaaccttaaagtttctgattttggtttgagtgccctctcccagcaagttagggatgatggacttcttcatactacatgtggcactccaaattatgttgctcctgaggtccttaacgatagaggctatgatggggcaactgcagacttgtggtcatgtggggttattctctttgtattggttgcaggttacttgcctttcgacgaccctaatcttatgaacctgtataaaaagatctcagctgctgaatttacttgccccccatggctttctttcactgccaggaaattgattacacgaatcttggatccagatcccaccactcgtatcactatacctgagattttggatgatgaatggtttaagaaagaatataagcctcccatttttgaggagaatggggaaatcaacctcgatgatgttgaagctgtctttaaagactctgaagagcaccatgtgacagagaaaaaagaagagcagcctacagccatgaatgcatttgagttaatctccatgtccaaaggactgaaccttgaaaacttgtttgatactgagcagggatttaaaagggaaacaagattcacctcaaaatcccctgcggatgagataatcaacaagattgaggaagccgcaaaacctcttggctttgatgtgcagaagaaaaattacaagatgaggcttgcaaatgtgaaagctggaaggaagggaaaccttaatgttgccacagagatatttcaagtggcaccttctcttcacatggtagaggtacggaaggcaaaaggagatacattggagttccataagttctacaagaaactttcaacaagcctggatgatgttgtttggaaaacagaagatgatatgcaaatgcgagaaacaaagtgatgtggatattattatcattgtctattaagtgtaattttcttcgtgtctgaggttttactattttccaatttcttcattcgttatattcctcccccgtaggtttgtttggacattaattacatagtactcatttattgcataccatgctattattttttgaaagcatgcagagttcatgtaagaattttactcatccaacagtcgcggttatgttcatgaaacaaaaaattgtaagaaatttgtatattgtatatatctatctatttatatcttttcaatttgttgtttaaaaaa

SEQ ID NO: 2057 - DNA, 768 bp, Glycine max
ttttttttttttttttcgaaatcagtctcctgagtgacttttgatatatcttcaaggaagtggatacagaaaatcttacactttttcagtacattagctaataatttaccatgctcatggacctatattgcattttgcaattaataacatccaattaaggaaagcaagaagtaaacttttatttcctacccatgacaaattaaactagtgaaataattaagcaagaattacactcaaattcagcagaaatctggcctagttctcttgagaactgaaatgcaacctctttgctgatccctcaagatcctgatctcagaagaatccctcaaattctcaaggctaatatactgctgtttaaccatcctcatggaaccaccccctatgtcatgaatccaaacataagggtggcaagtttcatcatagtaatacagcaaactcttcaatcccccaccatcattgccactcttaccaggcatatatgccttgtatatgcgtttacttctcagcctcttacatgaccctggcttcaaagtgtgaaccttcttcagtattgatcccacccttatctgcagctccactggtcgatcactgaagttccagatccttgtccctaatccataggcttgagtgtggtcatagcagccatcgaagcaaccaccaagagatagaaggctcaaacctctcactttccccatgagagtttctaactccttagtcatcttaagcttccccttctgtcgtcttctcgcagccgtacggacgcgtggg

SEQ ID NO: 2058 - DNA, 919 bp, Glycine max
  misc_feature (33)..(33): n is a, c, g, or t
  misc_feature (857)..(857): n is a, c, g, or t
  misc_feature (887)..(889): n is a, c, g, or t
  misc_feature (901)..(901): n is a, c, g, or t
cagcatgggagaaactgatgagtatgcattttntgttctaaggaatttatgttctctcagattgtgattatcaagttgctgtataacctgaaattcctatacctcaaaaggcacatgttaccctgttataatcaaaactaatatacaacatagcgcttacataactgttgcagctcgacacgtgaagcatagagccaaaaacaagggaatccataacaagaatgctactcttgccaaagagcagtctcttcaaaacaactcaaattcaactagctctcctgctgcattgcactctacatacttaacaccctttccctgggactgtggggtcatctctgaaactccaaattcacacaagtctggcagttctggtgggatagcgcaacgtattaacgcccaattaaggccttcgaagaaggggtgctgttttatctcagcagcccctttctctgaacccaaacggttttcaggctctttaaccaacaaccctctaatgagatccctcgcttggatactaacaaatggggtgtcagggaatctgagaccttgcaacaccacgttggctaatgtttcttcattattagaacctttaaagggtgttctaccatataaaagctcatacagaaaaacaccgaatgtccaccagtcaactgccgctccatgtccctctcctttgatgatctcaggcgccaagtattcatgagtaccaacaaatgaatttgatcttgcatctgtgggctcagccacaagctgtggcaacgatctgagctgagcagcaagatcagtttttaatttccttgcttttgcggcaggaggcaggattcttgggctgaagcacggaacttgacaggctggtncatacagaatggctcaaatgcacttgattnnncacaaggaccanaaatcttagcaggatcca

SEQ ID NO: 2059 - DNA, 1612 bp, Glycine max
  misc_feature (58)..(62): n is a, c, g, or t
tcggatagtgtaattaacaaatttaatcttggtcattgtgaccagttttcaatggtcnnnnnagaaaagagatttaattagtcaaagaagtgtgctatcaaatttaagtggaagaagcacgtgatcgacttgggcaaacagtgcaaagcaataactgaattttttttttttttttcagaatcagaataagattaatacttcaaaaaatatttattgttaacaattctttgtgccctaaaccaagtagattctaagatgtgaggcatgtacaattaagattatacaggctagaagttcagaagtatatgtcttttttatgtacatgactggtattttttgaatctataaagaaagctgtgatgaaaaccagattccaatggacacaattccaatggttgcaagagcttggaccagctcaagtatagtattttgtcgctccaatggcgcattctgccagtctgtcctcccaaaatcagcaattataatgctgacattatcctgtgtacgtcggtccaaagcggcttctgcaagcgcttcacatgcttgctgaatgtttccgtgttttcgtagttgatccctcactaaagaaactgcttctgagctgctcatgtaatcccataagccatcggatgctaatactacaaattctgcatctgagccaagagttacttgataaatatcagggtatgcaacaaccaagtcgttgttgagttgtacacgagaaatgaactttgctgaccatcttccttcctgaactcctttttgcagcatctcattcttctttgttttgaatcgcacgtccccaaatgcacgagatacagcaatgtctccacaaattctaccattgttaatccatccacctgcttctctgactcttctaatttcatgaagagaagtcttgctgctcccaattggacggtgaggactagtcagaacttctgcttttccagatctacatagaaccgctgatgagtcaccaatatgtgaaattagcagctcatcatctccaatgaacacggcagttgatgtagcacctgattcatcctcctctccattcatttcaagccgttttaataacctcgcgtcagccttgagaaatgcctcctgtaatgcccttttaatggctttgaaatctttctcgactaatagtaacccaccttgtaaagcttcaacacactccttgtacagctcatccctgtagttggcactgaggaactcgacagaagaaaaccctccatggccatcaaacacagctgcaaaagtgaagccctgaaggccctcaggtcgaacaataatatcatcctccatctcttcacggagaccctgcaaggctatggacccccatcttatgccgggcacttcggtcaaagacgacggagcatcaatggctatggcagagcagcaactgctcctggtggtggttgtggcggtgaagctgtttctgtgtctgttcttggcggtggagcggctatgaagcttgcataagaggaatctttgtatgtgtggacttgacaaggccatgatggagggttcggaagctgtaagagtgatgttgttggggtggggtttggtattaggatgttctaggtaatggtctcgtgcgaattcctgc

SEQ ID NO: 2060 - DNA, 1507 bp, Glycine max
atatgagttgctcaatctgggaacaaatatatccaaaattaaaagatttgttttttattttttattttttatttttattgtttttctccccttgggtatccaacaactatcccgtgctctgccgaagccccccccccagtttcgacacattggttggttcctccttcctccaaagaaaaaactagagtgaatctcaaaacatgtcaattgtcttctctgctgctgcaaccctttcccctcggtctcggttattattccctccacttagtttttctcacacttaccctacgaaatttcatcgaaatgggtggcatccaagtctctccaaatcgaggacgcagccccttattacaaactctttgctttctgataagtttccaacggtgggttcgctgtcaacgggacccattccatccactcacctcattgaagtggttaaaactgctgcacagactggtgctcaggttgtgatggaagctgttaataagcctcggaatattacatataaaggattaactgacttagtgactgagacagataaaatgagtgaagctgccatattagaagtggtgaaaaagaattttgaagatcatcttattcttggggaagaaggaggagttataggagatgcagcatctgattatctctggtgcattgatcctctagatggaacaacaaactttgctcatggttatcccagctttgctgtttctgttggagttctatatcgagggaatcctgcagctgctgcagtggttgagtttgttggaggttcaatgtgttggaatacccgccttttctctgcaactgcaggtggtggggcattctgcaatggccaaaggatccaagtgagtgcaactaatcaggtggaacgatctcttctagtgacaggctttgggtatgatcatgatgatgcatgggctacgaacatagacttattcaaagaatttacggatgtcagcaggggtgtaagacgacttggcgcagctgccgtggacatgtgtcatgttgcattgggaattgtagaagcttattgggaatatcgtctaaagccatgggatatggctgctggtgttttgatggttgaggaagctggtggcacagtttctcggatggatggaggaaagttttgtgtttttgatagatctgttttggtttcaaatggtcagctccatgcaaagcttctggagagaattggacctgcaacagagaaactaaaaaacaagggaattgatttctcattgtggtataaaccggagaactacagggctgacgtttaaggcaccaagaattgcttttgttcatggacactgctaacagctagcagatgatatttttcttcttctttggatttgtacaaatctgcttgtcatagttataaattacatttgtgaaattttttacccgattacgataattacagtttgttcaacatttgtgagagccacaaaatttggacattgaaatatttacaatatcttatacacgtgaggcgattttttaaagt

SEQ ID NO: 2061 - DNA, 745 bp, Glycine max
atcagaagataaatgttattaaaaaatccatgattccatcgcatctacatcatatataaaatctcagttaaactagttacgagaaagtgcctggcaaaagttgatttattgtagagtaaatacacatctcacagtggttcttgtttattcctaaacataagcataaacgtaaaagcataatttcccagttactgcgatgtccacctaaacgtatgcttatctgggtgggttcacatgacttcccattctcacaacattgccgtcaatatctctgacatacccaaccttctgctcccattccttcagctcaggctcgctcaccgccacagctccattctccaccgcacacttataagcagcatcaacgtcagagtaaacaaaaccacccattctcgacaagatcgagggttatgaaccgcaccggtcagatcatcggtctcgtactggtgaatggagtgaaagcgatcgttgtgttccccatttccatctctccccatctgtgagactcgtctaagcgacgaacagaatagccgaagtgttacgaataagagcagaaaacagcaggacacagagcaagaaccagaaccaaagaaggaagaaaggccaaggagggatttcatgcatgttgcatctctttaatcctctctgaaggaaagcaccacaaatactcgttgtaacattattatatttatatttgtgtatataaaatcttagcctgatcgtaaatctcaaaaaaaatcttaat

SEQ ID NO: 2062 - DNA, 1098 bp, Glycine max
gtaaactaaaccttttgtaacaaacatgtaacaagtttaatggtcagtacttcagtaatcctttcactgataaataacctggaaacggaacaatagaatgacacatacaatttacaaaatactcgcatgttatttagaatgtccagcaatacttatataaaaggacatggacacgcatttgaatgacaaatgaaacattggacaaccctcccccacaaaaagaaaaaaaaatgacgaatgaaatgaaaacgtaggtgaaaactagcaggagttcaagtaattattagtaattaacaagcagaaatggaatgcctcctgtggcttaaaagacaccaatagcagaaggatacaaaggcttgggctggtaagaaagaaagttgggaacatacgtagtggttcgtttcttaggaggatccatggaatctatggctggttgattcaaatacgcatatttgctttttgtccaccaatccttgattccgatgcgcacttcttggtccttagcaactgttttgcaataagcatttgtccctacgatccacttcaccgtttctttctcggtttcatcgtagtcattattatcggtcttcagagacaactcgaacctctcgtactcttgctccgtgagagtgcgtgcacggagtctagccacagccttgatagcagcaaggaggtggtcctcctccacgatcctcttttgcctccaaaacttggcgatttctcggtttgtgacactctcttctgctcttggtcttgagaagaccctgaattttggaagtggaggaggtggtggtggtggtggtggtgctagtgaccttggaaccacttcttgcttcattattgtgactctgatgaaactcgatctgagctttattcacttattgtgaccagcgtcttcagtttgatctgttatatcaaaaaaagtggcgattaattccaagagcaagctaactcacaatccaacctacctttctccccacactacaccgatagatatagacttattgattgtggaatttctgagtcagacagactattcaatatgcatagcccctcctatttgttgcgtgtggatagtgagaatggtagttgcatctt

SEQ ID NO: 2063 - DNA, 2256 bp, Glycine max
caatggctgagaaaatgaaaactcactactttcctctcttttcattctttttcttcttcttcttaatctccatcaacgccaaacttgatctctacccttcagactacaaggcactcctcactctgcagaaggacctccgagtcaacggtcaactcgcggcggcaactgaggcgtgcgaaacggagggcgtgctctgcgagcggaggcggctctccggcaaggaaacctacgcgctccgaatcaccagactcgtcttcaaatcgaacaacctaaatggtgttttgtctccttccatcggacgcctcacggagctcaaggaactctctctctccgacaaccaactcgttgaccgagtccctccccaaatcgttgactgccgaaagctcgaaatcctcgacctcgccaacaacatcttctccggcgaggtcccctccgagctctcctccctcacgcgcctccgcgtgctggacctctccaccaacaggctctccggcaaccttaattttctcaaatactttcccaatttggaaactctttcagtagccgacaacctcttcaccggaagagtccctccctcggtccgctccttccggaacctacgacactttaatttctccggcaaccgcttcctcgacccctctctacaatcatcctcaccagacacaattctctctagacgttttctatcagaagacggtgatggtgatgttcctgcacctgctcctgcacctaataactcacagaagaagaaatccaatgcttctactcatgctgctgctgctgcacctggtcctgcacctaaccataccaataagcacaagcacagtaagagaaaactcttggggtggattctggggtttgtagcaggggcactggggggaaccttatcaggattcgtgttttctttgatgttcaagctcgctctcgcgttgatcaaaggaagaggaaggaaagcggggcctgatatctatagtccattgatcaagaaagcagaagatttggccttcttggaaaaagaagaaggaatcgcgtcgttggagatcatcgggcgcggtggctgtggagaggtctacaaggcagagttaccgggaagcaacgggaaaatgatcgctataaagaaaatcgttcagcctccgaaagacggtgctgagttagcagaagaggacagcaaggttctgaacaagaaaatgaggcaaattcgatcggagatcaacaccgtgggacaaattagacacagaaaccttctgcctctgctggcgcacgtgtctagaccggaatgtcactaccttgtgtacgagttcatgaaaaatggaagcttgcaagacactctgagcaaggtcgagaggggcgagagcgagttggattggttgtcaaggcacaagatctccctcggtgtggctgctgggcttgaataccttcacatgaatcacaacccacgaatcattcatagagatctcaagcctgctaatatccttcttgacgatgacatggaggcaagaattgctgattttggactcgccaaggctatgcccgattacaagactcacataacaacctccaatgtggctggcactgtgggctatattgctcctgagtatcatcagatactcaagttcactgataagtgtgatatttacagttatggagtgattcttggtgtattggtcattggtaagcttccttctgatgatttctttcagcacactgaagagatgagtttggtcaagtggatgaggaagactttaagctccgagaatcccaaggaggcaattaattcaaagctgctggggaatgggtatgaggagcagatgcttcttgttttgaagattgcatgcttttgcactatggatgatcccaaggagaggcctaacagtaaggatgttaggtgcatgctgtcacagatcaaacactgaatctgctgtatgtttaagtatgtgaaatattgtgtaccatatttgtgccaaagtgtgcttgtttaagaatatagttgataactagaggatcaatgttggttcatagggtaaataatgaaccgatgtaatcttgtttcctttatcacggattgctgaatttctttggaaaaagaaaaattcagcactgcgatgatctatgtataatctagtctgtcacaactagtttccactttacatgtttatggatacaccctgaaaataaaatagttttacgttgtttccaaaaaagaaaaaaaaaaaaaaaaaagttgaaagatatataagaacaaacaaaaaaaaaaaa

SEQ ID NO: 2064 - DNA, 1440 bp, Glycine max
ttttttttttttttttttgaacaaataaataaaaactacatgaattaaaatgcaaaaattcaattaaaatttcatcaaatgtcatttgaactcatggtaacaaattctactgagtatgaacagcatcaagcaatgataatagcaagtctacaaaacatgtgaaacaatgaacttgatgccaacaaacccctcttgattgagtgtcagcttcgactagtttatatatcccccacttgaatctatacacaccctcaatgattagaacataacattcacaaatttcgcctaacaaacggagttacattaagcacaagattttgatcaaccacaatgcacggcagcctgcaccaatgtggcaactcaactgggggaatcatgttttatgtattcaaaagattgccagaacactataataatccttatatatatgactactgattgactgacactaggctaagaccacaaaatgtcaggtcctaccaaattaagaggagaaacgaagcagttaatcctccaccaaaaaataacaaaaatgccgtatctcaaccttgactaatttccttctcttttgccttgcatatatcttccgcactcttgataaatttctttgtcaaatcatcaacttctttctccaatctttttatgtcatctttggggagacttgaatacaacttctttatcgcatccattgccttttgcctagctcttctaatactttgacgagcatcttcacatgatttagcaaccaacttagtcatagcctgcatatgctctttggtcaatggtggaataacagcaatcaatctttcaccatctgatttaggatttaaccccaatggagatgaaacaatagcattctctaattgtttaagtgtctctggatcatacggattaacagacaaggtttttggatccaagactgaaacaacagcaagccgattcaaaggcatcttcaaaccactagtttcaacaatgatatggtcaagcattcctggggatgcccttcctgttcgtagcttgcttagttctgttgataatgcagccattgcagcctccatctgcgagacagcatttgccttgatagtaggaccagcatttggtggaacttcaattgtactggcacccccttcatcctttgactttcgccctttggcaaaggctctgcgactttccgcaacaaaattaggcgttgccggaagagtcaacactctgttgctatcgcacatctgaatgggagaccacacgtcgcaaccacgaacaacacctgagtttcggagccacagcatgttccggtacgagaatgctcgtctaacgtacccagacatcatcgaattcacgcacgcacgctactttgattcttatttcggtgtgttgaggatctgattcccaagatcaaaaatggttagtctcctcggggggggggggggcctacgtagctga

SEQ ID NO: 2065 - DNA, 1501 bp, Glycine max
attttattttctggtcataactttaaattcttttgcacccctcattttgttttctaatatataataactcctctgcttcaacacactacttctcactctccctctctaatagtaatagtaatatacataagtaacataaccaatggaagcgcgtgcaggagccaatcagcgtattgcaagaatctctgctcatcttcagcctccaaatttccaggaagggagtgatgttcttcttaagagtgctgagtgcagagcaaagggtggggcacctggattcaaagttgcaattttgggggctgctgggggaattggtcaacccctttctttgctgatgaagatgaacccattggtttcagttcttcatctttatgatgttgtcaacacccctggtgtcactgctgatgttagccacatggacactggtgctgtggttcgtggctttctggggcagcaacaacttgagagtgcactcactggcatggacttggtaatcatacctgctggggtaccaaggaaacctgggatgacaagagatgatttatttaaaataaatgctggaattgtgaggaccctttgtgaaggaattgccaagagctgccccaatgcaattgtcaacttgattagtaatccagtgaattccacagttgctattgctgcggaggttttcaagaaagccggtacatatgatccaaagcgactactgggtgttacaacccttgatgttgtgagggcaaatacttttgtggcagagatacttggagttgatccaagagaggttgatgttccagtggttggaggtcatgctggagtcacaattttgcctcttttgtcacaggttaagcctcccagtagcttcactgcagaagaaactgaatacctgacaaatcgcatccaaaatggtggaactgaagttgttgaggcaaaagctggggctggttctgcaacactgtcaatggcatatgcagctgccaagtttgctggtgcatgcctccgtggcttaaaaggagaagctggggtagtggagtgtgcttttgttgattctcaggttacagaacttcccttctttgcaaccaaagtgcgtctaggtcgtgctggagcagaagaagtttatcaactgggtcccctgaatgagtatgaaaggattggattggaaaaagcaaagagagagttagcaggaagcatccagaagggtgtagagttcatcagaaaataaatgtgataaggaaaaactagtttttgtctcttatatttaaggaccatgtgtaatacttctctttgttcatagatttttttcttcttcttaagaatagtactctaaatttttggtgtcatccgtaattgctgatgataacggatttgacatcaataatctcagaaagatactaaaatatcagccttttgtactaattccagatcttattttctttaatctttaacatattcataacaaaaaaaaaaaaaaaaaaaaaaaatagtaatggctcttttgtccctttaaaaa

SEQ ID NO: 2066 - DNA, 1480 bp, Glycine max
cccatcatttgttttctaatatataataataactcctctgcttcaacacacactactacttctccctctctccctctctaatagtaacagtaatagtaatatacataacataaccaatggaagcacgtgcaggagccaatcaacgtattgcaagaatctctgctcatcttcagccttcaaatttccaggaagggagtgatgttcttcttaagagaggtgagtgcagagcaaaaggtggggcacctggattcaaagttgcaattttgggggctgctggaggaattggtcaatccctttctttgctgatgaagatgaacccattggtttcagttcttcatctttatgatgttgtcaacacccctggtgtcacagctgatgttagccacatggacactggtgctgtggttcgtggctttctggggcagcaacaacttgagagtgcactcactggcatggacttggtaatcatacctgctggggtgccaaggaaacctgggatgacaagagatgatttatttaaaataaatgctggaattgtgaggaccctttctgaaggaattgccaagtgctgccccaatgcaattgtcaacttgattagtaatccagtgaattccacagttgctattgctgcggaggttttcaagaaagccggtacatatgatccaaagcgactactgggtgttacgacccttgatgttgtgagggcaaatacttttgtggcagaggtacttggagttgatccaagagaggttgatgttccagtggttggaggtcatgctggtgtcacaattttgcctcttttgtcacaggttaagcctcgcagtagcttcactgcagaagaaactgaatacctgacaaatcgcatccaaaatggtggaactgaagttgttgaggcaaaagctgggacaggttctgcaacactatcaatggcatatgcagctgccaagtttgctggtgcatgcctccgtggcttaaaaggagaagctggggtagtggagtgtgcttttgttgattctcaggttacggaacttcccttctttgcaaccaaggtacgtctaggtcgtgctggagcagaagaggtttatcaactgggtcccctgaatgagtatgaaaggattggattggaaaaggcaaagagagagttagcaggaagcatccagaagggtgtagagttcatcagaaaataaatgtgataaggaaaaactagtttttgtctcttatatataaggaccatgtgtaatgcttctctttgttcatagatttttttcttcttcttaagaatagtactctaaatttttggtgtcatccgtaattgctgatgataacggatttgacatcagtggaactgcttaataatctcagaaagatactaaaatatcagccttttgtactaaaaacagatcttattttctttaatcttaacatattcataacacaaaaaaaaaaaaaaaaaaaaaaaaaaaaaacaccaccctagttc

SEQ ID NO: 2067 - DNA, 1877 bp, Glycine max
ggggggttttatagaaaaaaacaaaaatcatttccacattttagttttctcatttagtcaatcccaagtcaatacttcttttgcacaaaaaaaaacagtacttaattcttaaaacataattaaccagatcaaaatcaactaatcttagtggagctaaatgccagtggcaacacttaactcacattctaaaacaagggcaagaagcaatgaattcctcaaattcaaatatctaatgcaaccaatgctgccaatcaaccagagttaatacacttgattaggagcggacgatatttagcaaaacaaaacttcagattggagacaaagtgacacggattccagtagctgaagatgacacacaattccatacagaagcatgcaaaagttaatcagccacatgaggaaactgtggacacagaccaaagagcagcaagtggagaatgaaaaacatttggcgagtactcaattggttaaatggaatcactctttctagtcccagtcctcagagatcatagatcaacaggtgattttgccgaaggaggatacacaatacagtgtcctacacaaccaagatgatgaccattgctcccaaacggcaagcatataccagagaccacggatgaaacaagtagcattttaatcaaatgcagacaattagaagcagcaaccatcaatataactatatagaatggtgtgaagcagacactacacgcagttactcgctaaaggaaccccaatttaacttaatttcacaaagatgcagcaagccaatgactacatttatccatccacctttagactcctccaaatcataagtaggatgcatatgtagcattctttcctgaacagtaagcaaaaaggtcatatgcaaccaacttgttgacatcgaacctttagtcaacttatatgcagaagcaacaagatgagacgattgtgggggcatgaagcagagaagcagacaagatgtagtaagtggtgaaacgatgctgttttggccgataatcacacctcaaaacaaagaaacatgaacattttaggcacctttaatgcaaatatatcaaaattaccctagtggattagaaatagtatgactaagaacaaacaattaacataacttgctacataaagaagggaagactgaagcaaccttcaggtttcagtaagctgaagacacagctgacacaaaacagtgtccaacgcacccttttggcagctacaacactatgtagttttgtcaaaagccaagttcttaccaatacccattgtcatgacatcacaagaactaacatgtctgtggtatgctcaaccaatcccagaggaactacacttatagcagagagaacttcctaataattgttcagcaatcagcccgtgctccgttcacattctgctatagctgcgaccccggggaagcgatatgctacgtcgtcttggagatcttctcccacgagggctgtaactcctgcgatcatacccataacttggacttctacgacgccgataaggacttggacttcgcctccttccacttccaaggccacgtgatccaatgcgcaatcgacactcccgagcaaagtgtccaggttcaccacattcatagcattttgtgccttcacctccacgcccacgccctcctcggccaccacccttggaattatgagaaagctctacacgccaaccattttttccatccaaggcctgaattgcatcaagtgcatccctccgatcatcaaactcaataaatgcatatcctggtggtctacgagcaacccagacactgaatccttacacttgcagagacaagagtgcgtggcgaacaagagagaagtgagttcaccatacagaattgtctcgccttctggatgatcgaaagagaaagt

SEQ ID NO: 2068 - DNA, 1576 bp, Glycine max
tcagctacgtagccccccccccccccccaacttgtggaaaaatgaagttaaaatcactgcctctcgttcccactcaaacttagctagcgcaacacaagcaacaaaacacaaacaagcgaacaatagttcacaactaaaggaagaggttgttgaagagatagagatacatagtgtttgtgttagtgttatttatggtgtccctcaacctcaacccaaacccacctcaaacttttcacttcttcgaccccttcaacatggaggatcagaataagaaggtccgaaaaccttacaccattaccaagtccagagagaactggaccgaccaggagcatgacaagtttctcgaagctcttcacttattcgaccgtgactggaagaagattgaagcatttgtaggttcaaaaacagttatccagataaggagtcatgcacagaagtatttcatgaaagttcagaagaatggcacaagtgaacatgtacctccccctcgtccaaagagaaaagctgctcatccctacccacaaaaggcatctaaaaatgctcttactatatcccaagttgcgcggccattgcaatcttcatctgctttatctgaatcatcacacatctataggccagattcatcatctgtggttagaactccagttagcagtgtgccattgccatcttgggtttataatgttacaccaccagtcagtcttccccgagtgactaaagatgatatggtgttgatgagtcaacaaatcaatcctttcagcagtagtaatgagagcactcctaggggttggccaattagcaaacagacagatcagggtgaccaaggcaagccaactatagtaatgccagattttgcacaagtctatagcttcattggcactgtatttgatccaaatgcaattaatcatctacagaggctgaaacagatggacccaataaatgtaaaaactatattgctattgatgagaaacctctccaccaatttaaggagtcctgaatttgagaatgaaagaaggatgctgtcattgtactatgctaacatggagaaggaaaaatccagtagtcatcgaagccaacccctcactgacagatcagagagtgttgtcttatctgcttaaggtgttaccaatggtttatcaggaacatagtttttaaatatcttccaaaaacacaataagctttcctctcagctaccactaactccaaatggtgaaatatggggcacaagaggggaaaggattacaggttttactaacagtttgtaggttgcagatacttgcatgtgtgcatgcgtgcacgtgtatgtagtttactgtcctttaggcttatgtgtgtatcttatgaagatggttgtcataggaatgcaggataatgagtccagagtcctgttaaggtaacctggaggctgtactgtacagaatattgagagcgtctgtgtgtaatgttgtgatggttttttctacaatttagtatacaagagcggtgctatgatttaggaggtgctacctgtgttgtatataaaccaaaagcaataaagagcatatataaattgtgattaaagaaaaaaaaaaaaaaaaaa

SEQ ID NO: 2069 - DNA, 1011 bp, Glycine max
gacaagcaacattgctaaccattctctgcacttttcagttacaaagcatttcattgttttacaatatacaacactacaatggctgcttcaacaatggctctctcttcatcatcattggctggccaagctatcaagcttgccccctccacccctcagcttggtgttggaagggttagcatgagaaaaacagcctccaagactgttacctcaggaagcccatggtacggcccagatcgtgtcaagtacttgggcccattctctggtgagcccccatcctacctcactggtgaattcccaggtgactatggttgggacactgctgggctttctgctgacccagagacctttgccaaaaaccgtgaactggaagtcatccactccagatgggccatgttgggagccttgggctgtgttttccctgaactcttgtcccgcaacggagtcaagtttggtgaggccgtgtggttcaaggccgggtctcagatattcagtgagggtgggcttgactacttgggcaacccaagcctgatccatgcacaaagcattcttgccatctgggccacccaagttatcttgatgggtgccgttgagggttaccgtattgctggtgggcctcttggtgaggtgactgacccaatctatccaggtggcagctttgacccattgggccttgctgatgacccagaggcttttgctgagttgaaggtgaaagagctcaagaatggtaggttggccatgttctccatgtttggtttctttgttcaggcaattgtgacaggaaagggacccttggaaaaccttgctgatcaccttgctgacccagtcaacaacaatgcttgggcttatgccacaaactttgttcccggaaagtgaaatgacttgtgaattttatgttatttagttaaatatgtattggatctatcaagtgagaatgtgaattatattattatattttatatatctctttttagttcatttgacataaaaacaattaaaaaaacaatacaatag

SEQ ID NO: 2070 - DNA, 1132 bp, Glycine max
agaaattcagatatagatctcgtaaagataagtacccctctcttctttaagctatatattgctcgcctaacccaccccccccccaggcatcaccagtagccattctcttcagttttaagttacatagtttttcattgttttacttaatctacaatggctgcttcaacaatggctctctcttcatcatcattggctggccaagctatcaagcttgccccctccacccctgagcttggtgttggaagggttagcatgaggaaaacagcctccaaaactgtttcctcaggaagcccatggtacggcccagaccgtgtcaagtacttgggcccattctcaggtgagcccccatcctatctcactggtgaattcccaggtgactatggttgggacactgctgggctttctgctgacccagagacttttgccaaaaaccgtgaactggaagtcatccactccagatgggccatgttgggagccttgggctgtgttttccctgaactcttgtcccgcaacggagtcaagtttggcgaggccgtgtggttcaaggccgggtctcagatattcagtgagggtgggcttgactacttgggcaacccaagcctgatccatgcacaaagcattcttgccatctgggccacccaagttatcttgatgggtgccgttgagggttaccgtattgctggtgggcctcttggtgaggtgactgacccaatctatccaggtggcagctttgacccattgggccttgctgatgacccagaggcttttgctgagttgaaggtgaaagagctcaagaatggtaggttggccatgttctccatgtttggattctttgttcaggcaattgtgacaggaaagggacccttagaaaaccttgctgatcaccttgctgacccagtgaacaacaatgcttgggcctatgccacaaactttgtccccggaaagtgagggaaaaaaaaaaaacctgaaacgatgagaaactatgacttgagtgtgaatttcatgttgttatttaatgaaatatatattggatgtgtgccttatatatctttttggaacgttttgattggtcaaaaaacaagtttgtatcctcgagtctcgttctcccccatttaatttaataatcactgaa

SEQ ID NO: 2071 - DNA, 1054 bp, Glycine max
  misc_feature (12)..(13): n is a, c, g, or t
tcagctacgtanncccccccaaacaattaccattctcttcacttttaagttaaatagtttttcattgtttcatttaatctacaatggctgcttcaacaatggctctctcttcatcatcattggctggccaagctatcaagcttgccccctccacccctcagcttggtgttggaagggttagcatgaggaaaacagcctccaagactgtttcttctggaagcccatggtacggcccagaccgtgtcaagtacttgggcccattctctggtgagcccccatcctacctcactggtgaattcccaggtgactatggttgggacactgctgggctttctgctgacccagagacctttgccaagaaccgtgaacttgaagtcatccactccagatgggccatgttgggagccctgggctgtgttttccccgaactcttggcccgcaacggtgtcaagttcggtgaagccgtgtggttcaaggccgggtctcagatattcagtgagggtgggcttgactacttgggcaacccaagcctgatccatgcacaaagcattcttgccatctgggccacccaagttatcttgatgggtgccgttgagggttaccgtattgctggtgggcctcttggtgaggtgactgacccaatctatccaggtggcagctttgacccattgggccttgctgatgacccagaggcttttgctgagttgaaggtgaaagagctcaagaatggtaggttggccatgttctccatgtttggtttctttgttcaggcaattgtgacaggaaagggacctttggaaaatcttgctgaccacctagctgacccagtaaacaataatgcctgggcctatgctacaaactttgtccccggaaagtgagcatagcaatagtgaaacaaagagaaacacagtgacttgaaaattagagtgagagtttcattgttatttggagaaatacatattgaatgttttcttttaagaagaatatgaattatatatcttattgtgcattgagatcatttacactatcgcttcttctttttttttttttcgta

SEQ ID NO: 2072 - DNA, 987 bp, Glycine max
  misc_feature (172)..(172): n is a, c, g, or t
attctctttgttaaagtacatagtttattgttacttatcacatggctgcttaacatggctcttttatatatgctgccagcttaagctgccctcacccctgacttgtgtggaagggtagcatgaggaaaacagctcaaactgtttctcagaagcccatggacggtttatctgngtaagtacttgggcccattctcaggtgagcccccatcctatctcactggtgaattcccaggtgactatggttgggacactgctgggctttctgctgacccagagacttttgccaaaaaccgtgaactggaagtcatccactccagatgggccatgttgggagccttgggctgtgttttccctgaactcttgtcccgcaacggagtcaagtttggtgaggccgtgtggttcaaggccgggtctcagatattcagtgagggcgggcttgactacttgggcaacccaagcctgatccatgcacaaagcattcttgccatctgggccacccaagttatcttgatgggtgccgttgagggttaccgtattgctggtgggcctcttggtgaggtgactgacccaatctatccaggtggcagctttgacccattgggccttgctgatgacccagaggcttttgctgagttgaaggtgaaagagctcaagaatggtaggttggccatgttctccatgtttggtttctttgttcaggcaattgtgacaggaaagggacccttggaaaaccttgctgatcaccttgctgacccagtaaacaacaatgcttgggcttatgccacaaactttgttcccggaaagtgagcaaaattaacgttcaaagatccagaaatgacttgtgaattttatgttatttagttaaatatgtattggatctatcaagtgagaatgtgaattatattattatattttatatatctctttttagttcaaaaaaaaaaaaaaaaaaaaaaaaaaaaaaaaaaaaaaaaaaaaaaaaaaaaa

SEQ ID NO: 2073 - DNA, 1667 bp, Glycine max
ttttttttttcttttactttaggctgctcttcttgctgtcgcttctttctttttaaaaccttggttacaaaaggtagatgtttataatatttgaacagaattgaaaacatcgccatatgtcattttccctttatgacgaggcaagcatttgtttcagcttcaagaatagactgctcttcatttacagtgtagggtgattgattaagcacagttatactgcctatgacggcagttaaacttacaagctgtatattgcacaagggagtccagtctaattacattcacagaatgtacataatttaggtttggagctgcaaagtttttttcagatatgaacatgcccgtgcttgaaacatttggtagaagaaaactgctggaatcttaatgtattcccaatttgaacgccatagcatagctctcctttaaaactttggttctctaagtctgctgcaacaaagagccttatgaatatgtgaatctctagggtcctctgcttgtggttgctcttcaatcctacagtaatccagattgctactccttggcaatcaagttatgcaactttacaaaatcatccaatgttagttcctctggccttgaagtggctagaagacctatgcttgttaaagcttcttcgatctcaagtgatgtgcatatgtgctgaagtgacttgcgcagcatcttacgcttctcattgaatgctgaattaaccattgagaagaagcttttagtggaagaaacttggggatattctgagggtagtttcagcttgaatgagacaacggctgcatcaacattaggctgagggaaaaaattggatcttgggactttaagtttgtactctggatctgagtagaaattaacaaatacattgatgggacgatactcaggggtccggagtgatgacactaccaagcgcacggcagtctcctcctggagcaataaaaccacttctgagaaaatgtcacccattggtagaagtagtttgatcacatctgtactgatattaaagggaatgttggcaaccacttttgcttttctagattctggatttatgcttccaaccaatgatgacatatgagagcgcacatgacatttgacaatatcctcagtcaaaacctttaactttcctgtacttgaaaatctttcactcacaagggcagccatgtgtttatccttctcaacagcaagaacaaatgcgcccgaatttaaaagaacattagtcaaggaaccagttccaggcccaatttccaacaccacatcaccttgttcaacaccagccgcaccagcaagttggtcatttatgtcagcattcaacatataatgctggccaagtgattttctggggaatctgcctttggagttgagagctttgagagtggcgtggtaatcatctgcgcttcgcgtcgaagcagtgctgcttctttcagaggaaactacgtatggcgttctattccgtacgccggcggtgctatcgtgcgccggtttgtggtggcggttaagcaatgcgtgagatattggcggggacgcttgaagagagcatagcgatgaaggagacatgtttgggtgttcgggacttccgcagctacccgttttgaaacttaccacatatatacaaatactacagtgttgtctctttatcctatgttgttcaattgttttcaaagttg

SEQ ID NO: 2074 - DNA, 1324 bp, Glycine max
  misc_feature (1168)..(1168): n is a, c, g, or t
  misc_feature (1171)..(1171): n is a, c, g, or t
  misc_feature (1173)..(1176): n is a, c, g, or t
  misc_feature (1180)..(1180): n is a, c, g, or t
  misc_feature (1182)..(1183): n is a, c, g, or t
  misc_feature (1186)..(1191): n is a, c, g, or t
  misc_feature (1194)..(1194): n is a, c, g, or t
  misc_feature (1199)..(1203): n is a, c, g, or t
  misc_feature (1210)..(1210): n is a, c, g, or t
  misc_feature (1213)..(1213): n is a, c, g, or t
  misc_feature (1216)..(1216): n is a, c, g, or t
  misc_feature (1230)..(1231): n is a, c, g, or t
  misc_feature (1233)..(1233): n is a, c, g, or t
  misc_feature (1237)..(1237): n is a, c, g, or t
  misc_feature (1251)..(1251): n is a, c, g, or t
  misc_feature (1261)..(1261): n is a, c, g, or t
  misc_feature (1269)..(1270): n is a, c, g, or t
  misc_feature (1275)..(1275): n is a, c, g, or t
  misc_feature (1277)..(1278): n is a, c, g, or t
  misc_feature (1283)..(1283): n is a, c, g, or t
  misc_feature (1287)..(1288): n is a, c, g, or t
  misc_feature (1291)..(1291): n is a, c, g, or t
  misc_feature (1294)..(1294): n is a, c, g, or t
  misc_feature (1296)..(1296): n is a, c, g, or t
  misc_feature (1300)..(1300): n is a, c, g, or t
  misc_feature (1303)..(1303): n is a, c, g, or t
  misc_feature (1311)..(1311): n is a, c, g, or t
  misc_feature (1313)..(1313): n is a, c, g, or t
  misc_feature (1319)..(1320): n is a, c, g, or t
tcgagttcgctacgtaggcccccccccccccctacgtgaaaaggaaatcgcaagaagaaagcagagcctctactacatcatcacattcacatttcagtaccttctctttctcccagtctctcacacacaacaattgaagaagaaaatggttgacaatgattcgctctcggaattcctcgcatctgcggtcgacgcggctcagaaagctggcgagattattcgaaaaggcttctaccagaccaaaaatgtggaacacaaaggacaggttgatttggtcacagaaactgataaagcatgtgaagaactcatatttaatcatctgaaacagctttatcccactcacaagttcattggggaagagaccacagctgcctatggcactacagaacttacagatgaacccacatggatagttgatcccctggatggaactactaactttgtgcatgggttcccctttgtttgtgtctccattggtctcacaattggaaaaactcctacaattggtgttgtatacaatccaataattaatgagctttttactggaatccatggaaaaggtgcctttttgaatgggaatcccataaaagtatcgtcacaaactgaactaatcagctctcttcttgcaactgaggctggaacaaaacgtgacaaagaaacagtagatgcctctaccgataggattaaaagcttacttttcaaggtgagatctcttcgaatgagtggctcctgtgctctgaatctgtgtggaattgcatgtggaaggctggatgtattctttgaacttggctttggtggtccttgggatgtagcaggtggtgctgtcattgttagagaagctggaggtgttgtatttgatccgtccggtgcagattttgacataacatctcagcgagtagcagcttcaaaccctttcttaaaggatgcacttgttgatactctgcgccaaatggtgtgagaaatttactattaatcaatggcaagaacttatcatataagccatctttgttagttcgtttagcttttgctcaaataattttttagattctcagttttaagtaaaagttgcatgataaaaatgttttagaatttttaacttcttctgtggattcagagtattcaataataaatcactttaaatcctttcaaacaaaaaaaaaaaaaaaanggntnnnntttntnnctnnnnnnccncactnnnnnaaaaaanatnctncccccgggaccctnntnaacngccccccccggggncccccttttntccttaanngggantnncctgngaannggnaantntccnggnaattcccncncacccnncacc

SEQ ID NO: 2075 - DNA, 1177 bp, Glycine max
agctgcttcccacgcggccggaactggatagacagagtgtagtacgtgaaaaggaaagcgcaagaagaaagcacagcctctactacatcatcccatttcagtaccttttctttctgagtctcagtttcaacaattgaagaagaaaatggttgacaatgaatcgctctcagaattcctcgcatctgcggtcgacgcggctcagaaagctggcgagattattcgaaaaggcttctaccagaccaaaaacgtcgaacacaaaggacaggttgatttggtcacagaaactgataaagcatgtgaagaactcatatttaataatctcaaacagctttatcccactcacaagttcatcggggaagaaaccacggctgcctatggcaccacagaacttacagatgaacccacgtggatagttgatcccctggatggaactactaactttgtgcatgggttcccctttgtttgtgtctccattggtctcacaattggaaaaactcctacgattggtgttgtatacaatccaataattaatgagctttttactggaatccgtggaaaaggtgcctttttgaatgggaatcccataaaagtatcgtctcaaactgaactaatcagctcccttcttgcaactgaggccggaacaaaacgtgaccaagaaacagtagatgcctctaccaataggattaaaagcttgcttttcaaggtgagatctcttcgaatgagtggctcctgcgctctgaatctttgtggaattgcatgtggaaggctggatgtattctttgaacttggctttggtggtccttgggatgtagcaggtggtgctgtcattgttagagaagctggaggtgttgtatttgatccgtccggtgcagattttgacataacatctcagcgagtagcagcttcaaactctttcttaaaagatgcacttgttgatactctgcgccaaatggtttgagaaatttactattaatcaatggcaagaacttatcatataagccatatttgttagttcgtttagcttttgcccaaataatttttaagattctcagtttttggtaaaagttgcctgataaaaatgttttagaatttttaacttctgtgaatccaaagtattcaatagtaaatcactttaaatcctttcaaaaaaaaaattttaaaagacgggcccagtata

SEQ ID NO: 2076 - DNA, 1597 bp, Glycine max
aagcgagtaaaagtggactagtgattaattgattcgaaaaaatatactgactacaattgctatagctacatcaataagccatcccatataccgactacaattgttacatacaaaacatgaattcctccacctggccttccacatgaaaaatctaatttgctaattgctatatagctacatcttgtcaatttggcattgatttatctagtcatagaaatgccatgacctacggatatgtaactggaaaacaaaaaaaaaaaaaacaaatgtgcaaggaatgcttagcagcacctacaccagtctcctcatttgaagggcttctatggcgatgggttcccatttgcaacaccatcaccattatcaaccatggtaacatcttccatgctgttttcaggtggcatatctacagcgacatggttatcaacagttgtagctttgattttatgtggcatgtcgtcctctgtttgttcaggcatatcagtgtccatagtctgctgcccactttgcacccaatctgtatttgctgatggttctaaatgactaaaataagccccattttgatcaaactgatgtctcaacttttcctgatacagtctgtctatgatactacccatctcctcaatgccactgacaagatgtaaatgatgccccggtccaggatcttcaacatttcgttcagtatatgatgtaatctcattcacattaagggcaaggtggtcaggtctttcaagaagcagctgaaatgtaggttgcagctcatagcattgttcaaaaagggaacgacggcaaaagacatataaaccaagccgagcacgtgacattgcaacaaccaatcttcttacatcacgtaggtgaccaacaaatcgagtacgcacaatagatagcaatataaaatcattttgctgaccttgaaacttatccactgtagtaaccttgcttggaggacccaatgaaatcgtatggaacgcatctcctatttacaacatcacggatgagaagtttctgaccattgtatgtagtcaaaattgatatcttatttgcaggataccctaaaagacgcatgtatatatagacactgacaacatattcggcttctccctcattttggtaaaaccaaggagatggagttgtctcccccttaccaaggtaatctggaacatccactaactgataatcataagcaaatccagcatttgccctattgaatacgacttcctcctttacagaaggaaggtctcccaaatctctgtatctccaattgtaaagtttagctatacttggcctggctcttccctgagcatttagctcaatgtaaggaatgcccaatcggacaaaccttgtaaatagactttgatccatgtggctgtacttctgaaaagccatattcttcacaacaggaggcaactggtgatgatcaccaatcaggggggggcgcctacgccgcgcatgaccatcctcctgccgctggagtaacattggaatgaaagtctcaatttctaaaatttgggcactttcttccattagcaagttgtcatacttgaaacctaactggaggaaatctttcctctttagagctgcatgggtgcaagtcatcgga

SEQ ID NO: 2077 - DNA, 1227 bp, Glycine max
tttttttttagactgttacaaatagtaaatgatatataattaataaaaaaaatagtgaatgataaatgcatgggatcataaatacaaactgaaagtttcgtcttttgttttcaccatcaaataataaatatggatatattaacatttctgacttctatttaatttccattttgaagaagtattttagacaaaaagtgtgatagcaagacttattgacagagttccgaaacaagaagcttgtacgtatagacaaaggagaagaaattggggtaaagaaggggaaaagaaaaagattgggggagggagaagcaaactcaatcgaataattcccacgtggttgaggatggaggatgatcaaaggtctcccacttggttgtaacaacaacaggctttattcttgcattagataccttaagttgatccagtttttcaacacatttttgtactctctttccctgcaaatttttctgtgcggaagcatcgccttctgcagaaatgctttctaatttgattgcttgtctcataagcatctcaattagtgttgtgatttgaacttctggtactttgactccgttggaaatagacttttcaatggcagagacctggtctgcgagctgatcaagttggacagcgacattgttgattgcccgatgtgcggtttggatcttagcgttgatacgcatctggatgaagcgtcgctcaatgctggaagggtcttggattagcaccacttttgatctgtctttcactccgcacacgtccaagtactctccattttctcgctctttgcctctgtacaacagtctctgttcatccacctctaaccccgtttccccactcagcaccttcttcacttccccgaaagtggctatggaactgacgcagatctcgtaacggagagcgccatacgcgattcggaggcgcaaattgcgtgttacaacatccgtattcgtggttcttttctgcaccagcattcctccgggcctcatttcccattcgctctcttcttctctcgccgccgtcgtcgacgacgacgaattctctctcgcgctcggtttcttcttcatcatttcgaactcagttttcccgggcaaaacacaagcacaaatggagagtgttttttcttttttcttggaaaaatatctcttaagtcgtgacgagtgtgagcgataaacgctgtaccctctaccgacgcaaacatgtgggggggggggcctacgtagctga

SEQ ID NO: 2078 - DNA, 1456 bp, Glycine max
ttttttttttttagtagtacaaaaattctggggggtccattagctttatattattggaaattagctgaaaaacgcgcgcccctcttgtttttagaagcctcacattaacacacagttaaaagatgatcaataataaaacatggtcacactatgttacacgttcaatcacaactggagcagaaagtgtttgacatggacaagactcataattataattataatatatatacacgcatataaatcttcaataaaaatagcaaaagacttcatccagtcaccaccacaaacagttattcttctatcacctcagcatgcccttaatcaaaaacttaaaagagaatcctatcttcatctgcctcctcagcaatctgcagtgatgaaactgcttgagctgcaatgagatcagcagagaaatttgcaggtccccatcctgcaccttcatataatggtccatgcacattcttttcaaaaggctctgatgagaatgaccattcaccattttcagcagcaccccacttgcaaccatatctgtatgcatcagagacccaacccactctttcaaaagaccatctgccaccatctagatgagggaagcaagcactttctccacccaaggagatgccgagagttcggttgcagttccaggtcttgcacccaccgtcatcgatcacaaccttacacgactcgtccgagtcttccccaagtagcacatgcagagcaactgcctcagcaatagcagcaccctcttcgtcgagcctctgctgctcttctttctttttctgtttctttttctccagttcagaaataatggctgcggaagtcgcgagtgccttttctaagcgtctctttttcttctcagcctgtttaagacgatccagctcgtctttcacctgcttcttcttcgcctttctcacattttgccctttattgcatgccatggtatccatataatttactacacctaaatagtaaatactaaagtgacgtctttgagacttccttcaagtgaatttctttagagctgtatacatttttcttttctgtaattcttttccactctttccctaattgtaataatgctaaatatattatttgttgaagtatcaagactaatactactatgttccgaaccactacacccactcaggtctgtaggagtacctcattttgcgaactatgcaatcccaaacagaaacaacaggagccagcatcagagaaaattcataagcactcatatgacttggcctcattcttcctaactttccacaacccttgcacttgcccatcctgttggaatggcatagagagcaaaaaaagggttgaaccttatcagagacacagttgaagagtgagaggtaaagctgaataggcaaaaggggtgtgttcctggtgacgatggaattggttggatctgaaggaaacgtaggtgggtaaggaaagaaagtgaaaataagtt

SEQ ID NO: 2079 - DNA, 1536 bp, Glycine max
ccaatacggttctgatcttacaactattactagcaataaggaaacaataaatattcactaataggctaatagcatgtcatagtggttgcttgtaatcgttgtatagcataaaaggtatgcgtataatacaaagaataatagacacgagtgaaataacatactactatcccagtcacaattccagtagctggacttgaaaagggtataaaaaagaatattcatattaatggcactcaagtttctatacaaaaaaaaaatgacttgcgatatctaactgttttcatcaagggccatccacttccaaaaccagccactgaccacaatcaatactccatttggacagcaacaaacaccaaatattttcaaagctcggataatcagaaaaagcaactaagatgctctttcttcacctggagattcttccaataaagcataatatcgcatgacgacaatgatacttaaaatggacggagatggaagcattcagagattaagattaattgtgtgaaatgaggccattgttatctaatcctgggggagacagtggtggtacagctacttggtgaaatgcaacagattcaatagataaagccttccttgtagctgcttgagattctttggttcttccaacctttcttgaagttgaagggagggtggttacggaggcgacggctctcgatgagttactactatcaattgacagcagaaagttttctttggaaagtgacggggcagatgcaatgacagaactgaagactccagattcccttaaactttgaattatgaccatgggagaatatatacgagtcaatactcccttcctcaaaagtttcatcttcaggtctttatcaccccacacaacatgttcattataccacttcatcatttcttcttcagttgcagttgaagcaatgataaatgcagttctgtcaaattccaacatgaagcatcttttgacatcttcttttgtaggtttgcaaccacagcggtcacgtctagaagttaagtctgagaatttagcatatgtgtaatgcaaaacagcagcctcttccaatttgatttcatttggggttttcatataattatgccatctatgtgcaccattaggccgaagatgatcttgtatccgagcagctgattttccatttccgtaagtcaggaagtagtttggattgccacgtacagaatctttatacatgccaaagtatgtatcctttggaagatggtcataattctttttaaacatcgatacctcactaaaaggttctttgatatcatctcgctcgatactgctctcatagttaggaaatatgaccatatcaacatgtcctggaacatcaaggagcaactgccttaaagaatattcccgagcaccagctgggtgcattaattcatctgtatcaagatgaagaatccagttcatgccagaatcccttgccataacaatagccatctccatgttgagagattgcttcacaaaaagttcataattgcagggtttataaaagaaaggggggggggggcctacgtagctga

SEQ ID NO: 2080 - DNA, 780 bp, Glycine max
tttttttttttttttttttttttttttttttttttttttttttttttacaataaaaatgcagtatcattcatcatcattatcatcatcttaaatacaatagacaaaataatggaaagaatgaatcctcacacagcataaaaaaaaagcaaccaaaaatgaattactagaattcacgatccgcgtaaattcggaacgatgataataataaataaaaaaactccacgaaaccctctctagtctctacataagcaaagcagcagcgaaaacgacaacagcagcagatccagcgacagtgaatctgttcaaagcggcgccgttttgagagggagctggtgcttcagacggcggagaggagattgctgagggagtgacggagggaacaccggccggcgaatcggagggagacaacggaggagatggcggagagtcgacggaggtaggcgaaggagacggagcgttcaccgtcggagcaggaggagaggatgacggtgacacggcggaaggagaaatcgccggcgaaggagacttctgcggcgtggccagcacgggggtgcgctttggagacagggctggggaggacgccggggactgagccacgacggaggttacgaacaatgcggcgactagtgtaaacaagacggtggagctagccatcataggaagatagaaagttgaaacagagattatatactattgagtgggaatgtgagtgtgtgtccccttctgtcgtcttctcgcagccgtcggacgcgtgggtcgagacgggaatgcctaaccgg

SEQ ID NO: 2081 - DNA, 1072 bp, Glycine max
  misc_feature (19)..(19): n is a, c, g, or t
ccggtccggaattcccggngtcgacccacgcgtccgcattgttttgttccttctctctctctctctctcttctctcgttagggttttcacttttccttcttctttctctcaggagtaggggtttcgtgtatgtatgtatgtatggatcctgctctcaagctctgcgtcttgttactcattcttctcggattagtgaatggttcttttgcggaaaatgattatggacgctgcgaaagcgttgttaagagttgggcgcgttcttcgctcgatgaggaaatgacaaaagatgataagcacacattaagagatttgctgttttttctgcatgttcctcggacgcgtgggagaacctattttcactgttttttgaagaaattgtatcccagctatctggagtgtcctcgctcgtatgataagttgcgctttgatccaagtaaaccaaaatgcaggctgttagttacacatgatgactatagtataacgtccaaacttccaagggagagaacttctgttgttaccatacttagggatccagttgaccgtgtttttagtacttatgaattctcaatagaggttgcagctagatttttggtgcatccaaacttgacgtccgcaacaaagatggctttacgcctaagctctaagactaaaggagtaagcacactggatatctggccttggaagtatctggttccatggatgagggaagacctatttgctaggagagaagctaggtacagtaggggactgaatatcattgaaagcaatgattcttatgacatggaagattttgcaatgccattacaagaatacatcaatgatcctgtggctgtggatgttgtacataatggagccacattccaggttgcaggtttgacaaacaattcttatatagcagaagcacatgaagtgcgccattgtgtacagaaatataagactcttggtaaatatgtgctacaagttgcaaagaagagactggatgagatgttatatggtggtcttactgaggagcacagaaaatctgccacaatgtttgcaaatgtggttggtgctcaagtgatatcacaactta

SEQ ID NO: 2082 - DNA, 1515 bp, Glycine max
tgaaaaggacgcgccgggagaggcgcgtggcagattatggatggtcgaacccgcaagcattatatggagttcagctacgtaggccccccccccgtggacgcaattcagaataacaataaagggtggatgaggatccagaggttcttggccacactggccataactgtctccatactcttgggaaatggaaaccccgttcagtgcttcgacggcggtagccaccaaaaacagcaacacagtttgtgtgaagagctcattatcccctacggttacccctgctccgagcatacgattcaaacgaaggatggtttcttgttaggtcttcaacgtgtctcttcttcttcttctcttcggcttcggaacgatggagaacgaggccctccggttctgcttctgcatggcttattcatggcaggtgatgcatggtttctaaatactccggaccaatcacttggcttcatacttgcagatcatggttttgatgtatgggtaggaaatgtgcgtggaacacggtggagccatgggcatatatctttattagagaagaaaaagcaattttgggattggagttggcaggaattagccctgtatgatgttgcagaaatgatcaattacattaattcagtaacaaactcaaagatatttgtagttgggcattcacaggggacaattatatcttttgctgccttcactcaaccggagatagtagaaaaggttgaggctgcagcccttctttctccaatatcatacttggatcatatcagtgcacctcttgtacttagaatggttaagatgcacattgatcagatgattcttaccatgggcattcatcaactaaacttcaaaagcgaatggggggccagtctcttggtttccttatgtgatacccgcctaagttgcaacgacatgctttcatccataacaggtaagaattgttgcttcaacgagtcacgtgtggagttttatcttgagcaagaacctcacccatcatcctccaaaaacttgaaacaccttttccagatgatccgcaaaggtacctactccaagtatgattatggaaagctaaaaaatctgatagagtacggcaagttcaatccaccaaagttcgaccttagtcgcatacccaaatcattgcctctgtggatggcctatggtggaaatgatgctttggcagatataactgatttccagcacacactcaaggaattgccatccacaccggaagtggtttatcttgaaaactatggtcatgttgacttcattttaagcttgcaagcaaaacaagatctttatgaccctatgattagttttttcaagtcatccggaaaatttagtagtgtgtaaatttccttcattccggtatgatggatgcaatacaatggtctacgtgtttatatattactgcactttctgtaaagtgaaaatattaatattgtgtggagttcaccttgattttctgtatgtaaatatgatgacagatataataaagagtggcgttgcatggcctatttctgc

SEQ ID NO: 2083 - DNA, 1257 bp, Glycine max
attattattaatgctgttgctattgctgttgggacgattgcaactgattattggatggaaatcagagaaccattcacactcggtcaaaggaacttgttcgattttctcctcaaacagatcatatttgttcaatatcaacaagaagtccatttgctcaaaggttggatgagtgacaatggtttcaaaaaactttctgcttagtaccatcttgttagtgagacaaccgttgccatcaacagaaaactgatcatagtcagtcaaggaaacacagaagatgaccatttcaacatcctcaaacatctctagccacttgcaattttctcctagcccccttgcatgcaccctaattagttgatacctgaccaaagaatcatatcgatcggtagtgtcaacagtttcctcagacactgattggggaaatgaaaactccacacaagccaccccattagatgaagtaactccctcagcataaaggatgtctaaatctgagggttcataatctgtccttaatattttaacagcccgctctaagaaataactggcaacactaggcagcatttctaattcgcttctcctttcgtatgtagccttaatggcagcatcattccataattcctcaatcaatggtgcatattcacgagtagcagctggaaagatggcatcaagtttgcccgacaccatagttttcagtaaccaatcagagaatgctttcaatcttggaccaatggaatatacagtcttctcatccagttttggactagttcctgttgtatcatgtacagatgattgcctttttttaaaatcccccaaactttcatcttcaaaacgctcacgtccctcaagcagcatgccaaggtaggcataaacattactctgaatggtcagctttatattttcatgctcatcttctgagaatgggacacttttgtacagaatcttggcctgcttaaaaatagtgctcgttccagatccactgccaccaactaagagaagcttctgaactatcccatgctcaaggtagtcaggcattgttctgctggcccgacggggggggcgccctcccagcggatttgaagatttagaaggaactggcagggacaggaaagcacatacaagcttcgttccagcctttccccatatatatccccttgtattcttctgcccctctctcttggtaggaaccatcctcattgacccaaaaatgtgggttgccagcacattgaactcctgccaactgcaacatacgaacggctcgag

SEQ ID NO: 2084 - DNA, 1505 bp, Glycine max
ttttttttttttttttttgaccttcacgaatattatgtcttttttatgccattcacaaacgggatgaagccagagagcctagtaatatcttaggcttgaatacatcatgtattttctagcacacagaatcaggtttgcaactcaaatataagttgacagaccactgactaaaagtgatatacaaattctatgatcaagatgctaccttaccatatgaaaaaaaaaaaatgaatttgaacattacaccatgatctgtggtatgtgccgactgactcaccagcatactctaatcgctggaaaccttacctacatgtgtctacgtctagtgaaatcttacaagtggatagctagtagaagaaaccatcccttttactccgagttagcagtatatgtacacgaacaggtgtcaagccatacacaagtatgacttgcaactcttgcctgaattagcaatcaatgagagaatgaactcgcctcagtgctatacatcgagtactcactcaagctaaagtttggtctctcttcactccacttcaaaatttctttggcgtatttaagtgatgcatcaacactaccaggctccaaccccttcaccggcgacacatacaactttcgtcctgtaagagatgaataaagccttttaaacttaaccgctatgtaatgtgaagccagctgaccaagggagggattattattaatgctgttgctattgccgttgggacgattgcgactgattattggatggaaatcagagaaccattcacacttggtcaaaggaacttgttcgattttctcctcaaacagatcaaatttgttcaatatcaacaagaattccatttgctcaaaggttggatgagtgacaatggtttcaaaaaactttctgcttaatatcatcttgttagtgagacaaccattgccatcgacagaaaactgatcatagtcagtcaaggaaacacagaagatgaccatttcggggggggggggcctacgtagctgattgcaattttctcctagcccccttgcatgcaccctaattagttgatacctgaccaaagaatcatgtcgatcggtagtgtcaacagtttcctcagacactgattggggaaatgaaaactccacacaagccaccccattagatgaagtaactccctcggcataaaggatatctaaatcagagagttcataatctgtccttaatattttaacagcccgctctaagaaataaccggcaacactaggcagcatttctaattcgcttctcctttcgtatgtagccttaatggcagcatcattccataattcctcaatcaatggtgcatattcacgagtagcagctggaaagatggcatcaagtttgcccaacaccatagttttcagtaaccaatcagagaatgctttcaatcttggaccacccgtctgtcctcctctccccccctggtttgggataggtcctggtggaacaaggacaggttggaaggcttggccgacggcttggtccgacccgg

SEQ ID NO: 2085 - DNA, 1196 bp, Glycine max
aatgaaaaaagagtatttattttatatataaagaggatattttttccgaaccattaagcactcctcctttaaatgtaaaagattttgaacgataaataaattaaatatataaaaaaaaaagttctaccatgcaagaaaatgaagcaacaaaacaaaactgaaacggctcatcaagtagtccagtttgtttcaattgaattcaacgaaaaaaccaaaacaacaaaccctacaacttttcacatctacctaccacgtttctatgctaccctacccttttttttcctcctcctattttaaccccaatattttcctagatttacattttccacccctacgcacccttctgccaaaaccatcgcaaaatctcgccgcggtcacctacatagcttgtaatgactccgaccgccacaaaacatccgccgccgggtccgaatagtcaaacaacccatccaccgtcacaaaacctccggcgccgccgtcactctccgccgcaaaccctgacccaaacccgaatgcatcataactgggtatatcatcttcaaaacccattaacctggcaagctccgtcatttccggaccaacccgacccgtttcctcaccgtcaacaaccgtcggcggcaaccccagttcgtcgtcagaggcttctagaagataccccaagttagattgtagctccccagagtctggttcctgggtcgggtcacccgaaccagaatccgaaccaggagcgtttatctcatcttcgaagcttttgatcactgagtcaagaccctgcaccgagtcacgctcaggcacattatcggcgtcgtcaagtatgttaaaaatgtcgtcttgtagacgcacctccgagtcaaggaccgagtcgagttgagactcggacgagtcaactcgacgaatcttagactcaggtgagtcgacccgctgactttcagactcgggagagtcgaccagctgagtttgggactcgggtgagtagctggactcgtcccggactcgtttcttgctttcctccatggaaaagtaatttaagataaagaagagagaaaatgtgaagggttgaatagagtgtagagagagaaaaagagaagtgtttgggtccccttctggcgtcttctcgcagccgtcggacgcgtgggcggacgcgtgggcggacgcgtgggcggacgcgtgggcggacgcgtgggcggacgcgtggg

SEQ ID NO: 2086 - DNA, 816 bp, Glycine max
  misc_feature (708)..(708): n is a, c, g, or t
  misc_feature (711)..(711): n is a, c, g, or t
  misc_feature (716)..(720): n is a, c, g, or t
  misc_feature (722)..(725): n is a, c, g, or t
  misc_feature (727)..(727): n is a, c, g, or t
  misc_feature (730)..(730): n is a, c, g, or t
  misc_feature (732)..(732): n is a, c, g, or t
  misc_feature (734)..(734): n is a, c, g, or t
  misc_feature (737)..(737): n is a, c, g, or t
  misc_feature (742)..(742): n is a, c, g, or t
  misc_feature (745)..(746): n is a, c, g, or t
  misc_feature (750)..(751): n is a, c, g, or t
  misc_feature (758)..(759): n is a, c, g, or t
  misc_feature (763)..(763): n is a, c, g, or t
  misc_feature (770)..(771): n is a, c, g, or t
  misc_feature (791)..(792): n is a, c, g, or t
  misc_feature (797)..(797): n is a, c, g, or t
  misc_feature (803)..(803): n is a, c, g, or t
  misc_feature (808)..(808): n is a, c, g, or t
  misc_feature (810)..(810): n is a, c, g, or t
  misc_feature (813)..(813): n is a, c, g, or t
  misc_feature (815)..(815): n is a, c, g, or t
aattcccggttcgaccgactcgtacgtccacgcgttcgaccacgcgttctgagacgacagaaggggaggcaatagaaaggaaaaccaagtcatgttctcactttgaagagaaaataacaacgtaaagatgtctgcatcaggaggcagaggaagccaagaggaagagaagaagccttctgatcaaggagcacatattaatctcaaagtcaagggccaggatggtaatgaggttttctttaggattaaaagaagcactcagctcaagaaacttatgaatgcatactgtgatcgtcaatctgtagattttaactcaattgctttcttgtttgatggaaggagactccgagctgaacagacccctgatgagctagagatggaggatggtgatgagatagatgcaatgctgcaccaaaccggaggtggacacaagtttctttaaatgtatgatgatcatcttcatcaaaatgcttgataaaacgcatggtattcggtgcttgtttcaaggtttctatttttgtatcatatcttacgatactaatgtagtaaagttgacagtttccgatatggatttttcatgtttattgaagtcttgatgcttaaaagctgctattactgtgttggatacaatactatggtcttcactattcattcttggcttgatgatgaatttgcattgggtgtttggaatttagctccatcgatatttgntgncaaannnnntnnnntnttntntnaanaaatnaanntttnnaaaaaanntttnccccggnnccttttaaggcccccggggnnccttnttttangggantnccncng

SEQ ID NO: 2087 - DNA, 972 bp, Glycine max
taatgttagatatcgagtgtgcttttggaaaccagacgtcctcaaattttctagttacaattttttaaaaaaaatatagatcgtatgtaaacaataaagaaatgcaacgtgcacccacaatgcactagagacaattttggcaatagcagtcaaaaacttgaataagagaaatctggtgctgactatatttttacatctcagccaaaactaaaacaacggtaactgttactgtacattgttttaagtggcagcacaaacatttcatccgttcagagcaatcaattatcctctgaaccaaaaatttgtcccttgagctcttctattttagcacccaattcatctctattttgcttgaaaagcaggtaacgggaagtgaaccacactgtatatgcaagccccacaacttccaacagcttgggaaacaatgggatagaatcaattgcgccaataaccgctgatgttagccacagagccaccaaggcaccacccccatacacgacaatggaaccagtgtcatcagtatcaaaattgagcttatccagcaaatcaaatgatagaccctgtccatcatcatcaaacaagtcttgctttgtatcttcaatcaccgttttatcgaactcattcttattattatcctctttaacatcctccaggattattacaccatcgcgcttctcattgaaaaattgacttcccccactggacctttcttcttcagaagatgttgcctttggcgacagattccttaagcaaactgaccgagataagtgtgcggcggagggagtgtaagactgaggaagagagggtttaggtttaggaagaaaagaggaggcgttaggaagcttcgagagagtgataggctgaactgtacaaagccccattgttatttgtgatcttctgtcgtcttctcccagccccccccttctgtcgtcttctcgcagccgtacccttctgtcgtcttctcgagccgta

SEQ ID NO: 2088 - DNA, 1853 bp, Glycine max
tcagctacgtaggccccccccccaatttttttaaaaaaaaaacaaccttgctcggagagagagagagagaatgaccggagtggtcatggttaccaagggaggtggatgcggcggcggcaagcgggcgagggcggcgcgaaccgccgaggaggaagaagagcagcagaaccagctgtcgctggtggcgcttctgttggcggccatcagaaaatcgatggtgtcgtgcagggtggacccacccgacgatgtaatctccaccgtccatcacatggagatcggatggccaaccaacgtccagcacatcactcatgtcaccttcgaccgcttcaacggcttcctcggtctcccctatgagttccaagttgagatccctgctagggttcccagtgctagtgtaagcgtgtttggggtctcagcagaatctatgcagtgttcttatgatccaaaaggaaacagtgtccccactattctcttgctaatgcaggaccgtctatactcacagggaggcttaaaggctgaaggtatatttcgtattaaccctgaaaatagtcaagaggagcatgtgagggaccagttgaataggggcattgtgccggatgacattgatgtccactgtttggctggactgatcaaagcctggttccgagagctaccttccggagtgctagatggactttccccagtgcaagttcttcagtgcaacacagaagaagaatctgttgagcttgtgaaacaactaaagccaactgagtctgccttactcagctgggctattgatctcatggctgatgttgtagaagaggaggaacttaacaaaatgaatgcaagaaatattgcaatggtttttgcaccaaacatgactcagatgtctgatcctctaactgccctgatgcatgcggttcaagtgatgaacttactcaagacacttatcatgaagacacttagagaacgcgaagaaacagcaacaggtggctattctccgatgtcatatcattcatcagatcgtcagtctgaggatgaatacgacagtcagcgagaaatggacacaagcggtgaattgagagggaccaaatcagactatgatgatcgtgctcacaatggtcacagcagtgaaggggaggctgaatctttaagcgagatagaggattgcttcttgaagcagttggatgaaaacacagaaggattctcagaagaacctgcatatcatttggacaagtatgttagcaccagaagttgctctggctatagcatagaaccttttatatctactactgatggaaaagcaggaaattcctgcttgaagacaacactgaccagtctgacctcaaatgctgactcaagtaactcatcaatagaatgtaccggcaccaaagatgtggagatgatggataaatttgcagattccatttcaaccgtgccaccactccttgcttctagttaagaactggttttctttgtagttttttagtaccatgtttttcagattttgtctctacaagcagcagcaggtttgcttgtgtaaattaatacatggagtaggaatcgtttccttcttgtgtatctgtggacaggttttgttcagtttagggctgaatttgacctggttctgtatgttcttgtactagacaattctaaccatgacaaatgggaatgggctaaaaaggtgtagccaccacttcaaatttcaggtaagtgctgtgaaatcgatgaacctgcggaatggggagattgatttagcttagcctgacatgacatggatgctttctatgtatcttgttgagtatgatcaaaatttgaatggttcagaaatttatcaagatggaaggaagtgtttcaaaaaaaaaaaaaaaaaa

SEQ ID NO: 2089 - DNA, 1410 bp, Glycine max
aaaccaacgattgttttcttatggtattttattttttttttttttttttcttttgatagacaattttgtagaagagaaaatccagaaataacattaaaagatatccagtaatactgagggagacaccacacaaactatgtgctgagatttactttcttgaccttttcagcccgtccaaataatatatgtctagtgtcttcaaatatagtttgagaagaataaggaaacagtgattgtaataactcaaattgtctccttagcacagctacagaaaccagaaggtccaaaataatgactctagaagacaacagtatcaagcatcattccgagagtttgaacgatgttggaagacatcaaatttgagatatgctcttcgagatgtttctttgcatcttgtcttcccacatttgctattgcaagcttctctggaggcagctcatcttcctcttgaacagccttgttatatttgacagctaagttcagcatttcctgtacagtctgttcattagttttggaatgtgtatcaaaatgccgaagtgtcaaaccatcagtccatttcttcttgtgaagattaagcaacatcttctcctcaagttcattcttcctgtaattaatggctatggaatagtaatgccggttcaacccatggatcaatgcttgaatggatggtttattcagatgtcccagattggatgttgtctgccttggttcttgaccaagcatcattgtctgcggattgatcaatcgaaaagcatcaatcaccactttgcctttaacactttgtattggatctacaaccacagccactgcacgctgattcaaagcctcaaaactctgctgtgtattgatgtcaacaccagagagccaacagccaaatccaggatgggaatggtaccaaccaacaaccatttctggtcttccagtttgtttgagcatgtcaagcatattagtctgaaaaacgtgatcaacagcctcaacactaacaccagtgccactctgcggcattgcgaagacatcaaccacacgaacggtgtactcgtccacgaattctccaagcatcaaacccatcacctccatgggaaccccagcccttccgtgcttaagcatcttgaggagagcgagtgaggagatgtagacctgctcggaggaatcgagagttggggaatctgggggagggtgccctagcgctccacctgcacctgcaaacattcgctgaagcctctccatcgcaaatctcacttcggattttgattcggatttgggatttggactcagctgaattggtttcactgagaatttgaagttgaagctgaacctgaagcggaaaggaaacccaccaacaaaggaacaagaaaaatctttactcgggggcctacggccctgtcgctgccgttcggtcgcgatgagaaa

SEQ ID NO: 2090 - DNA, 2382 bp, Glycine max
  misc_feature (3)..(3): n is a, c, g, or t
cgntcttttttttttttttttttttttttttttttcagacaacgaactgaactgagggtgattttgcgaaggaaaaactaaattgcagatttgtggttaatttatcgttctactgaagatagatagcatattacttctgaacagcaaactgtttaggaaaggaaaaaaataaaataaaaatgaagcttatttctaaagtttggcctacgtacatacacatattatttatcattgaatccaaactcccaagggtgagggcacaagggacttaagattttatcggatgccttcagaaggcgctgctatttcatgcattgcacaaccaagatgacaccaatttagtgtcaacatagtaagctgctctctcttttatccaccgaaaattcattaacatggggcacatttaaatctttctgaattatgaaacccaaacttcaagcttaaaaggcatgacaggtgaaacaaccacttaaggaacccatctgactggctctactaaataatatagccttgtgaggagttctgggaacatgatgaggctggttggctaaagctgaacttctcatttcctgagcttttttctgagccaatctcagcttgttcataatcttatccatagatgatgctcgcttcttttccaacttcatctccagtttctgtattgcagcctcagcttttgccttttgcaagttctcccatgcattgattttggcttccacccttttggcctttgaaacagtctttgacccttcagaaatgtcccaagatgaagatcgactacttgattccttaattttccagctgtcaacattttctgagcctctgccagagaatagggccctgtgtttcttggaccaccttgtcatggttacatgttcatctactggcacatccctgatatccattttagagaaaggcaaactcctgaactctgagagaggaagggaaggtggagtggaggcagagaaagaaggcctcaaactgggagaggagcatgagctaccctctgggctcatctgggtggccatatccctccttgaaagagcaggagatacattggtgcccgcatctttgaaaccatcaaacttctccccttgggcaggcagtgatgactgactatgcatctgagagcaaccatggacactaaccgagcgagccatgcaaggatcagttctggttgagagcaccccacaactgccaccggaactggcagttaacccatcagcagcagcagctgggacactaacagcagcagaaaacggagatgccgccataaagctccttgaattcgcaccttcaaacaaaggcaccgcaggggaatacatggaataatacgcaacagcagcaactccaggggggccaagaggcccactcttcgacttgggcctcctctgcggcgccgggagcgaggccctcccggtgccgccgtcaccggaaacaggactaagaatccacctctcagcatcttcccatttggacggcaaagttcggccgttgttgaaaggcaacagagccgcaccaacctgcttgcgtgcagcactggtgtgcaaaggaactcgctccgaactccaacccttttgcatagcaacagtggcgtgaagataattaggcgttccaggactcggaaaagtgccagagccagaccttctagaacaaagcgtgctcttcttcatagcacttaatcccaaatgaggcgaagaaacattgccattgccaatggcattgttcagatctaacgaagcaggccttcgccgatcgtgcttcttgaataacgcctcagatcttgacctccgatcctggcattctgtaacgcaaaaaagaagcaactcaaaataataatcaaattccaagtgttgatttccgtcctcagtgtcaccaccgtcactgtcttcttccttttgaactttcgctttctctcctttcccggagaaacgatttcggcgatgcttcgtgtgtgctgcatctgaatctgtatctgcatgtcgttgttgttgtcgtttattcggatccagatccggatctggaccgctccagctttcgctatgagcgaaatcaccgtcatgatcctgtgctgccaaatggagtgagatttcggaggctaaggagtcgtggtcgtgcgcgtcggaggcgaaggagcagcggtcgacgctggcggaggcggaggagaagaggctcaagttggattcgagagtgaagatgacggagtcggggctggtgtcgccgcctctccgcctccacgaccttcgttcctgaaaccctaactctcgcattctcatcgagcttcttcgaatcacattcgcatttcgcagagagaacaacacactcacactcacactcacactccccttctgtcgtcttctcgcagccgtaatatggcctggt

SEQ ID NO: 2091 - DNA, 851 bp, Glycine max
ggcttaaccattaccttcatttataaattggatttctcttttttctatttataaatttataagatacgagcaagaacattgaaattcactattaatcaactgttaaaccaaaaatagagagccaaatctaccaattagagctcaaattctatgttttagagctcatcattttcaagagtcctacatttctaggtgaagaattcaagtggattttaagcagaatggcatcctattcctctaaagaataggcactgtcgcctaaatacccagaaaactaaaagggcaacaaaacatattatgcttctaaatgcttgaaaacttcattatccatgaaggatgtcagtgctcgtaaatctctagtacaccatcaacttgcactgagaagtttctgcaattcaccactttggacggcagcactgagatcatccgatccaccaatatgcttgccattcacaaacacttgcgggactgtccttctacctatcaaatccagaagaacactctgaatttgaaacccatcatctcgcaaatcgagctccaccacaaaaggtttttcattgagttcagcaagcaagcgtttggcgcgcaaacagtaggggcaataggatttggagaaaacggcgattctgttggagtagatggcgttttgaacgaaggcggaaacagaattagaggctttgacttgcaggggtccaagccaaaacagagaaacagcgaacgtgaccattacgagtacactccaccttaacctcatcatccttctctttctccacgctcgatgcgtttcttcccgtcccatacaaagaagaaggaagggggtttcttaaacaaaaaccgcgggccgacgcaac

SEQ ID NO: 2092 - DNA, 1156 bp, Glycine max
  misc_feature (9)..(10): n is a, c, g, or t
cgcgaaatnnaactgcagtgtcattcttacatgtttgaaattaggtagcaatgtcattcttacaagttacaaaccacaacacatggagcatattacacaagtggcacatatgcaatagtctagtttctactttatacacaactataagtagcttaaactcactcattggcgatgtccttctggaagaggaaccactttgtggaagggcactgtcctttgtggtaaagatccatcttcctcatcatcatcaaattccaacacgtaatcctcggtcttccttctgcgatggccttgaacaactgttgctttataaagtgcagtagttcctggatagaccgccaaaacatgtcttccaggagggaaatctggagcgctagaaggatcattactcttggggaaaggaatgatatttgccatgggaagcttgtattgtctttggccactgctttcttcatcatcgcctggttcctcatccagtacttcaaattcctttgattccttatcaaaatgaatcacttttacgacaaaccactcgtccttatcggcatttcgtggtgtgaccctagccgctacctgttcgcctttaagactggcacaagcctcaagttgacttcgcatattaggagttagccttgaaatgtctgactcagtcttcactcgtttccttttctgctcattaccttcttttcctattcttcttcgtgtttgcccttgtggacccgtaggcagtagggcatcaatttggtttatcagtaagttggaaatacttgcttcactttctgaaagatcttttgcttgagtgtacaaaaatttcagcctagccaatgagttatccccaggcttctcaactacttcaggagttgcttgaagcttcttgtgaagtttgttgatctccgacagaatatcctcttgttctttcctcacccgatcgaactccttcgagttctccaatatcgagacaatgtccggcgaagacattgttttgatggcgaaaacaacaaccacgacccaaaaaccagattcttccaacgattttgctctcacctttccttccaacgttgctatcaaactccgaaatcgaaaatcgagagcggaattggaatttttccaatttttattttattttttttcgtgaaatttttaacaaagtgggatg

SEQ ID NO: 2093 - DNA, 1499 bp, Glycine max
ttttttttttttttttttcttacacaattcttatatagttttattactacatgtcctcaacaaacgaatccatgatttgcaaaacaaaaattacgattattcccgttatccagatgcataaagcagaataaagggataattccgcaactcgaaccaaatcaatctcatcacgccatacttacacataaacatacaaataaataaatttacaaattctacgactacgaccttaagttatggattatttacaatggaccaattctattctgaggcatcataataattcaaccaggtacaaaataatccatcttctccaccggaagattcagaacagatgtctccacctcttcaaatggaacaaagacaaagggagtcatgcccctcttatgtgagacagctggtacatctgggttgtgtgtttcatcatcctgccatccttcaacaactccaagaatgtcctcctcgggtgcacttgcctcactactgtttacaccactagtgacaagtgagatcaaatccatccgattgttagcccctgttgttgttccccttaaccttaaacgtatcctcaaaacagtgggtcgcatgcctggatacaagactgcagcttcaaccttgtcatctgacaatgtgtagtggccaccaaaaacacagtctattttagatgatcggaaattcatgcactttgccacatccttgatcttctgagatgaattcttgtaaaggaatcgcccagatggaaaaaatctcaagtatcggaaatagcagaccacatgtacgggattagtgattttccactcagcaactccagctcgaatgtaagtatttctactcacataaagaccatcagtccgcaaccttggtcgtaacagccacattttccgccatgagccatcatattttgattgaagtatcttatagttttctacaattccaaatagctgccaagccttcaagcatgcattgcgccaaaatacagggttacgaattgtgtacttccattttcgacaaacacaagatgccttccccaaatcatatggagtcattcgagcaaaaacctcaaaaagcagctcatcaggtaaggaacgatgtataagtgcaggatccacgtaaggcctcctacttgcactcccaacaggcgcaacaggtctcacgttaactccataaagatcgagccatggcctcctcgtaacaaagtagttaacagtcttcagcctcaaaactgactcgagttcagaagaaaccgctaacgcaaaatctgaagcagaagccatgggggaatgcagcaacagagtgaggttccttcacgaatttctcagacaaattgagaagaacgacggaaaaaaggggaatgagttcggtaacaattgcagaatacctcaaaacgctgccgtatcgacgtaggccatgtacgtacggtacgcgcggcggtcgtttggcgctgccttgatgtgagattgagaagcctgacctgacatccactcactcctttgcttctt

SEQ ID NO: 2094 - DNA, 613 bp, Glycine max
cacaataatcaagtatatatatatatatatatccttatggaagttttcaaatcacacttgttctttatcacctttatatccattttcatgtcataaagtaattttttaacacgtacagtgcttttaatggcaagtaaagtaaccactcttactatactaaattccttattaaaaaaggatttaccacttagcagaaaacaaaccaaaacatcattgcaatatgaacaataaatattcaaacaagattttaggccaaattcaactgcactggagaacaaataatgcgcatccatgacctggtacttctgctgagaacatattatttgttcgtatggttcttccactccacatttcatttccagaacaaagtataaactttcttctacctggatgcactatagccaagtctattatgcttgcagatattgttgttttctcgttactcagattgaaaaatgcaacataggtctccccttttcttccagttgcaatccaagatcgaatccgattaggataaccttcagctaggacatgttctactgttgcacacatgccagaatgaccattaactagagtcccattagatttcaacttccatatctgttcagattgg

SEQ ID NO: 2095 - DNA, 682 bp, Glycine max
tcgaggtcgacgtactcaacaagctttttttttttttttttttcccctcgtgccggcttttttttttttttttttgcaatagggagaaggaaatatcttatatatttattggtaatacagaagctgaaagcattatttgaactaattaattacaagcttggttattccaagttttccttttctcccagttgttgttatcccaactatgaaacacaccatctggtttgactaaccaatagatcttttgatgacctccttccatggtaggatcatatgcatagaaaatcacacacaatacatcccaatacattagaatgactttgtgatcaaaattggcgagtttagtgaaaggctttccgggatgcaaatagattcgagtttctccgtagttgtaaaagaagaacactggtgggtcgttaggggacataccactagcaatggaaagaaacaatatgttgatgtttgtgtcgtttgatgaaaggtggtaattgcttggaattgcagacctattcagagaagaagattcagaacaatctgcattgattaataaacacatggttagaagaaacaagagggaaacatggtggattgatctacacattgtttttctcatcttaatttcacttcaccaattgatcgcgtattctctctcactcaacatttatacacccagcggacgcgt

SEQ ID NO: 2096 - DNA, 432 bp, Glycine max
gaccgccctttttttaagtaaacatatcaccccacttttatatatttaaaaaaaattctgaattagaaaaagaggccaaagggtaagccaccactaggaccaaattgtactatttatatttccatcccacccttgtttcttcactcttgaattagagggtataattacaaaaccactttttacaaatatgaccccaaataaactcacttttctcatatctggcgtcgttgctcacttctgtaaaaacccctgcttcgtgccattgacataaagcgaagatttttctctctctcactctctttgtcttccatcttcgtcaccacccgcactatgcaatcccaaatgcttcttgattccaccatccgtaaggtatattcctttcttccggacgcgtgggcggacgcgtgggcggacgcgtggtgtcgcgacccg

SEQ ID NO: 2097 - DNA, 888 bp, Glycine max
  misc_feature (765)..(765): n is a, c, g, or t
aattcggcgcctcggaccccatctctatcatgtgtgtggtctacactcacccctccattctcattcattaataacaacctcacaaaaacaaaagcacacacacacacctatgctcgctcgatcatcgaatgaaaaaaccaaccaaaaaccctttctttcactttggttgtctcttctacaccactttcccttcaccttccgttctccactcactactactaacataaattaaaaacacgccatgaacaacaacccaacaacaatcatcggttccactacccacggatcagaagaagaagatgaacacatcactgaaataagggaaatccacgcgttaaccccgccgccgccacgtggcagagcctgggagacagtgcatacccacaggtcaagctctctctccgtagcttctgaaggcggcgcctcttccagcgagaacttcagcatgagcagagagttcagcgctctggttctcgcagggtccagcatcgaccacgacaacagcaacaacaacaacagcaacagtcccatgaacgaaaacaacaatagtaacagcttgttggggaggatcagagaagaggacttgatggaagagacgaaccctttggcgatcgtgccggataaccaccctctggacccggttccgtcgtcgtcgtctcagggagtaaggggtggcggcgctgcacgtgaggagcacgtgtcggttcagcgggtgaagaaggaggaggttgatgccaagatatcggcgtggcagaacgctaaggntggcgaagattaacaacagattcaagagagaagacgctgtgatcaatgggtgggagagcgagcaggttcagaaagcttcctcctggatgaagaaagttgagaggaagctggaggagaaaaggg

SEQ ID NO: 2098 - DNA, 1199 bp, Glycine max
ccccggggctgccgttttttttttttttttttttaattaatataatctataaactttcatctattctggttcaaacggacaggattacataaccactgaccaaatatcatcgacagagattaagattaagaagaagaaaaaaatcatctaaataggtgtcagtgttttcaatcttataaaatccagatgaattaaaacgaaaaaaaaatctatataagattgaatcagtcattgttcttacaggcacaaatcaacaaagagaacccaattttgtcctgttccttgtgcgcgtgcaaactcttctccaaccatagcctactatcgaggccactccttgtcctgaacatgaacactgcagatgaagcagaattcgaattaaaaagccaatcgtgcacgtcccacatcatatcaacgaccaaaccatcgacaaaaattgtttggttcccacgaaagttccacctcagcctcttaacctggaacattgtcttcttgtccacgcacacggacaacacgtgacccttcggctctcctcgctccgcctccgcgccgcacctaatcaatatatcgtgagaacttcccgtctgcgagaatttcgccttcgtcgcgtaagccgctgtgccggaaaacgtctcgctccgtgaaaccatcgagaaagtcgcttcctttgcgtcaaagtttggtaacaattcttccattgaggaatttttgtcgccgaggcgtaggcccagttcggagtccaccaaaacgtcgacgtaaaagccaccaaccggttctggtccttcctcgtactttgcatcggagagatcccacaagacttggacttgaaaattttgggattggaatgtttcgttgcctttgttctttctcaattgccttgcgttggatttattattagagggagaaagaaaatgttcagaattggagatggttatggtgaagccttggcccaagagtttcttggcccaagttattgtgatgaagagttgtttttgcgttttgatgagggagagtttgtacatgcaggtaacggaatctctggtggaagggttgagttctggacagagatacgcctggttcgaaggtcttgaacaatatgaatcggacactctaattgcatgttcgttgtaacaagatgctatgcttctcattataaaagggggggggcctacgtaggactcgagggggggcccggtactgga

SEQ ID NO: 2099 - DNA, 3483 bp, Glycine max
  misc_feature (2202)..(2202): n is a, c, g, or t
  misc_feature (2605)..(2640): n is a, c, g, or t
aaatgaaatgacgaaattcacatttattcagtagtaaaaatgtacaccactagaaatttaaacagaacgaaatttttttaaagaaaattctaattaacacgttacaaaacctagacacaattctgccataaaaggaatttccagtatttacaactttcaatttaatgctcaaattacagacaagtttttgaagtaaataaatagtttgataaaaactattattgattggcaacacagaataatgcaagatcccccgctctgctgaacaaccggtttcccttgtggcattagcatgtgcaaaagccgggagaaaagtaacatttctgctaaaatctcactgagttttagcaagggaaactgaaaaatgcaagaataccacgtatagcttggtccaatacgcctctacaatcaaggaaatggaaactacccaatactcaaacaaaatcttagagttgatcatggcttcagctcatagagtggttgcgaaagagtttttgaccaggtgcttgctggtcattctgcttgtacagggatgcagcagattcagatggtactgttggaattgcattgtgccccagcgacaaagcatccaaagcatctaacgtcagctgccaaccacaaagggcaattgcatcactacttgtgcttggaacagaactagcacagccagcagcagcaacattgccattaacccaagggcaacattgattgtgatgcacaataggatcaaactctgcagcttcataattactctctccttttggagggcctatcccatttgcaatggcaaaatctgattcagggagagcactattgttggcaaatgatgatttatcacgcttcatgatctcttccttagtattttcacaaccagagtaaatattagcattacaagaacgagaagggtgactactattagcaggtagaagattgcagttttgactaatcttttcaccactttcaacagattctgtagagcagccaatttttgacccactgtctgttcttcctgcagagtgagacatcatctcctggctatcaccaataggatcttccctgttcatatcagggataatctcatccatcagacctggatctggaacagactcacctgtctgtccctggttttcagcatcttctactctctgttccatttcaccaacaacactatcagctctgtgcacatatatatcagccccgtggatttcagcttcatgactagcacacattccaacactccctccactgatgcccaaactgattccatcacgagcctgagcagtcacagtttctgcattgaaaagttcttccccatagtttgtactactgacacccacatcaccacgggcaacttcagtagctgtttgtaagcaagtgctttgctgagcttgattgctgttattcagttcagatgtttcattcatgtccacattgcaggggggggggcctacgtagctgtgaacatcatcaaggtctccagggtagttttcaacactttccatagaatcaccattcacactatgacatattgtgtccattgcaatgacacaatgatgcacgggttgagtctctagctgattggatacccattgggaggtcactaccttgacggtatgaagaaactcgatttccagtaatgtaagcctctaaacccattgaatgactcggaccggcaccagatgagtctctttgttgaggtgaacaatatgtgtcgaaaatatcagagtcacgtgcacgttttgaaggaccagctgaatattgtccaccatctgtaacttcatcaccatcacgatcaatgacagttccttcaacactatcagcctgctgctgcagcctaagaacaggccgattatcagagcatccacctttttcaagatttctcttacgacagcttggcccacgtgattcatatgaagctgcacgatcaccaatctcactccctgaaggctgaccgatcattaaatcccttcccatatcatcgtgagtatattcagatgttgctgtcctgctcaaaggagtaaaaggaaaaccccctgccatggtaagatttaaatctaaatccgtgttcgccaacaatttcccctcatttgttgttgcaacttcgtcacggtcttcagtctgatctttctctgtaccctcgcctgcggccccccccctgattccactagctgcactcgctccacgagtcaatcctattaaaanactagtatcaggaatatctatactgttagatgcaaaacgagcaggacgaggaactgtcagaaaatctgaaattctaactgtagcgccacacaagctacaatcaagcaaaggtgacctagagtcaagtctagactccttaagaggcgcctttgcctttcgggcatccaatttagtagaagcagaaactgcctttgacccaggatcttgagtaagatgaagttgagtcttgcttgggccaaaagaatatccatttctttcagattgggcagagtgttcttcacaatcttgaacatttaaacgccagcttgattcccacccacaaaggcttataagcttctgtgcctgccaaaatgaagatacattaatagaaaataagcatgtaacagagtagcaacaaaagtannnnnnnnnnnnnnnnnnnnnnnnnnnnnnnnnnnngagagtataaacagtatgcctcatcttgagcatttccaaggtcagatccaatgtctggtttgatatctacttctcctgacatagaattctgagactgtgatagaaagcgttcaatttgtgggccacgagaaacagacatcaactcaattgcagagatggctaccacaggaaggcagtgaaattgtacgagtccatcacatctatccttgtagcccccaattaatgcagatggaggagttggagggaactgcactaagctttctggacagctgtttcctttccaagggcaattaactttatgacccgaatccagctgcctggcaaaggattcgctggcattttgagcttcagctgatgtccaagatggcaatgctgtaaaactcaggcaagaaccacatgactcgcaagcaattttgtctacaccattattcatccatcctttctgagcacaagccaatgaactgatgatctgaggcttcccaagccaatttgaaggaataaatgtagccaaacgtcttaataaatctcccctttcccaaggtctacacgaagatcttgaagaaccaaaagcagaaccaccagcacttgtgctcaaggaagtccatggtggttgtgaaccaacacatgagagagaagccgctttagaggcttgtccatgacttgacccatctatgctgccaacattcggaacagctggggatgatgccccagcagaactggcagcaggtgttggatcaagggtgcctcctgagctgataacctcttccctcatttctcgaattccgaagcaaatgaaaatgaggccgcggccggacgcgtgggtccacgccggggattgcgaat

SEQ ID NO: 2100 - DNA, 1186 bp, Glycine max
gggggaaaaaagtgcttattataaagaaaatgaacatttattcacaaggtaaacattgaagatatcaaactgtcatcacaatgtgctggaacctttaatcagaaacatttaccaatgagagcaaatgccctctacaacatatgtcattttcattaaaccgtttccatttaaatacaatatttttattataactatctcattcaagataccatcatccactttcataagcataatcacaccagaataaatataggagctcccacttttgagggtctgagaccgagtgtaatggtactactgaggtatagaggcaagcacctctaacaaggaagctgcgaattgcatttgagtctcttcatttattgtcacgaagagcggcacgtgcacgaaaagggatttgatcccgttttgctcggtgaagcgaagggaatgatagtaaacgtaattgcacacaaacctgcctgcatcaactgataccataacttcatatcccttctctgccaaggctttggtgatctccacaacaggaagtgaagtctcccttgttcgcgaaattccaccatccgaaggaacaatggggactttctggggcttccatcccatttcatcagggcatcggaaattagcctcattgacagcttggttctctatagcaaaccttgttgcaccactgttaaccccaaaatgcagccaaataattctattggaatttgaagattcagtgtccttggcaataacggcggattgtaatctctggtacagtggaacaagtgctccttgaccagcagtctcaagaatgctgcagctcccaataactaaaccctttggcaaacccttcttattcatgtactccgtcaaattattggcaattgtttctgttggattctctgaaactccatggaatttcttaaatcctgtcacatgaattgttgttgtcggtgtcgtaggaccttcagaccccatttgccaagtatattaaatctggtaatgattagatcctcaactcaaaactattttccaaatacaataattagagacgagacatccagcagtattatctactcaaagttgagtttctattaactggcgaagattcgaattagatttagaagagaagagagaaagaggaaaacatttatacgaataccaaaataatacaagtacaggtaggtgccgctgtcaatgt

SEQ ID NO: 2101 - DNA, 1533 bp, Glycine max
gagagagagagagagaactagtcttgagttttttttttttttttttttactttaagtcaacatgctatgttatatataattctaatttaattatttcacttaagctcaacacactgtcacagcaaacctacccaagaacatccccaaacagaggaaatagttagtgatctgaatgatagaactctactaataggaactgttaatggcttcattttttttttttttttttagccgaaaaaccactttgtgaatttttagttttcaattttactcggacacgcgtttcgtatacaattcattcataaccaagttacaaccaaaaaaaagaacagtatcttaaggacaaggaaaatgaacatttattcacaaggtaagactgaagatgtcaacatgtcttgacaatttgttgaagcctttaatcagaaacatttactgatgaaagcaaacgcttctgctacacatgccatttgcaataaacctttttccatttcaaaacagcatcttgtaatcataatttaaagcatctcattcaaagtacactcactcatccactttcataagcatggcaacaccagaacatttgcatgagtcggatgttactggcatgttgaagcaagtacctctagcaaggaagcagcaaattgcatttgggtctcttcattgattgtagagaagagtggcacgtgcaaaaaaagggatttggtcccattctgctccgcaaagcgaagggaatgatagtagacatagttgcacacaaaccttcctgcatcatcagatgtcattacatcatagcccttatttgccaaggacttggtgatctcttccacaggaagagtagtcttccgtattcgtgtaattgcaacatctgaaggaacaatagggactttctggggcttccatcccatttcatcagggcagcggaaggtagcctcattgacagcttgacgctctatagcaaaccttgttgcaccactgttaaccccaaaatgcagccatataattttattggagcttgaagattccgattccttggaagtaatggcagactgcaatgtcttgtagaggggaatgagtgctccttgaccagcagtctcaagaatgctgcagctcccaataactaaaccttttgacaaacccttcttcttcaaatattccgtcaaattattgacaattgtctccgttggattctcagaaactccatggaatttcttgaaacctgttacatgaactgtcacagctgctggaggaccttcagaccccatctgccgatgatgctctgttaatattcagagcttcaacgaaagagtatttccttaataccaggaaggaataataacaatattcaacgttgaataaaggagatgacacatccacgagtcttatctactcaaagctctgattaaatggtgaagattccgattagatttatttagagaaaaaatagaagaggcaaagaatatagaatagaatagaagagaaggctaagtgggagtcactttcaaacaaccaacacagcatgactcccgccccggt

SEQ ID NO: 2102 - DNA, 2184 bp, Glycine max
ttctgcacttgagattctaagcttctgtctagcagattatggaaacgcattccttgttcccacgcctcttagccctgggtaacaatcactttcccatctcccaactattcattttatgttgcagacatgtttttaaactgcacccatgtgactacagttgtggccgcaaacactccgaaaatcttcaagttgcggtcaaaattgcagttgcagttcaaaagttttgcagattttaatttggggttgtaatcacattttgtcacaactgatgtgactataattacaattaaaagattctaaaaacttgatgctgcaatcacaattgaggttgcagactgtttctttaaacctttgcctgctttgacagttttgaatacattgtgcagctttgacggggttgtaaaatggcgcactggcgtggagatagtacctgttccctgccgcagcactgatgacttcaatttaagtataacttcaatcgagagaaccttcaatcaagcaaagatgcgtggtcaaaaagttcgcggaattataataaacaacccctcaaatcctgctggcaaactattggatagggaaacactgttggatcttttggactttgctagagagaagaacattcacataatctctaatgaaatgtttgccagctcttcttatggaaacgaagagtttgtgagcatggcagaaatcatggaggcagaagatcatgaccgggacagagttcatgtagtgtttggtttgtcaaatgagctctcggttccaggtttaaaggtgggtgttatctactcttataatgacaatgtcgtggctgcttctagcaaattggcaaggttctccactgtttctgccccaacccaaagattgctcatctccatgctctcagatacaagttttgtgcaaaattttattgaggttaacagattgaggctgcggaaaatgtataatacatttgttgcagggctgaagcagttggggattgagtgcactaggagcagtggtggtttttgctgctgggctgacatgagcaggttgattcgctcttacagtgaaaagggggagcttgagctctgggatagattgttgaatgttgctaagatcaatgttaccccgggatcatcatgtcactgcattgaacctggatggtttcgtttttgttttgctacatccactgaaaaggctgtttctgtagtaatggagcggcttcggagaattgttgaggccacaaatggacatagttgatgtggggtcaattagttctgcaaatttagttggtttattgattttttattcttttggagaaggcagcatcatcctaggaggaataaataatcaccaaggggtagttggatgacatggacatgggtgttatgcaatggagttgcttcaaaatgacatggacaaggtggcaccactgatgctatcaagttaagtcgcttacaatgacaaaagtgtatgaaaagaaaggaaagataaaaagaaaaaactcactgcaagaacctaatttggttataggcatgatggcagtttttattttttattcttcaccttcatttttagcatttgcttttatttcataaacttatattagagattagagaatcacatatccttcaagctttgtatatttcagcaggaaggtcctattgtattatatataacatttggtgtgataattgacaaacccgagggcagaatttgataagtgttcttgattgctcagcccctgaagtttaatgagcttttggatgacatgctctttctaaggaattcctgaagaccctttatcagggtgctcctccttcacgaggattgatcaaatttaatgttgatagcaacttccctagacaacactttgtaagaagaaaagccagttttgtggggtagaatatgggtaataacaggcattcatttgctttttggggggaaaaggcaaagaaagaagaaaaagataaagattagaaacagagccgtcgtatggtatcatgctttctcaacgttttctcgtatcatcgtttgtattgtacctcgtgacatttctggaaagccaaaagagaaaaaaagttggaaatgaatcataggaatcttttgtatttcccttgtaaacacgcgtagtaatggaataaacaaatgcctttatttgcaaatgttacaaattttatggaaaaaaaataatggcaatgt

SEQ ID NO: 2103 - DNA, 2235 bp, Glycine max
acctgcacaaagttcgcgtcggttggagtaacgggttggctaagccgcgtaacaatgaacaaacactgaaacaccgattaccattacttacaagcgtttttgtctttctttctttctttctccatttcctcatcgatcagatctgaatcaatctcacattcttcaatttaatttctctcgtaattcacttatcgtgatttccgaatctggccgccaaaccctattacctttgtatagatcatctcaactttgctgctcaggagaaataacaaacgaaattagcggaggaatatctccgccattgacgacaattgacaaccgatgtaggctatcactgtgggtaaagaagataaaggtgagggaagagatggtaagcagaggctcgtacagctctagcagcctcttgactggtagatttcatgctagaaagctatctcctagcattatcactttctacaccatgttcatatttgctttctccatcttcatgttctttttcgaggtgagacacatcagtgttgatgaagatccaccactccctctgctttctcaacaatctaaatctcatcaggtgccagagttacctgtacactataaacaactttgggataccccgttcaatcatggcttacaccaatgtgtcaagccgactactaaatataaagctgcccaaggatttgatcgctatctaaccgtgagaagtaatggtggactaaatcaaatgcgaactggtatatcagacatggtggctgtggcacatataatgaatgcaactttagtcatacctcaattggataagcgttcattctggaacgactctagtgtgttttcagatgtatttgatgagcttcatttcatcgaatccctgaaaggagatatcaggattgttagtgagcttcccaaaaacttggaaggtgtcccccgggccaggaaacactttacttcctggtctggagttggttactatgaagagatgacaagattatggagtgactatcaggtgatacatgttgcaaaatcagattctcgacttgcaaacaatgatcttcctctggacatacagaggttgagatgtcgtgcaatgtatcatgcacttcgattttctcctcctatagagaatttgggaaaggttctgagcatacatgacggttacaaaacagaggttggtggatcggctgagatcacatggaggaagatatatagctctccatctgagatatgagaaagatatgctgtcttttactggttgtgcatatggtctgacagatgcagaatctgaagagcttagaattttgagggagaatacaaattattggaaagtaaaaaagataaattcaacagaacagagaattggaggattttgtccattgactccaaaggaggtgggcatttttcttcatgctcttggttatcccccatctacaccaatatacattgcagcaggagtgatctatggtggtaatactcatctttcagagctctcatcccgcttccctagtataatctttaaggaatcccttgcaactcctgaagagctgaaagattttgccaatcatgcctcccaaactgctgcacttgattacataatctgtgtagagagtgatgtatttgttccgtcatattcaggaaatatggcgagagcagttgagggacaccgcagattcttaggtcaccgcaagacaatcaacccagacaggaaaggacttgttggaatttttgatatgctggaaactggagagctagtagaaggaagggaactgtcaaatatggtgcagcgcatgcacaagaacaggcaaggagctccaaggaaaaggcacggttctctaccggggattaaaggccgagcacgatttaggactgaagagcccttttatgaaaatccatatcctgagtgtatatgtggttctaaaagcaaactagaaataacataacgacaaaccaaactgctgttctaatctagaatttttggaaggaccggttaatctgtaaatttggttttgatcaactgcgtaattataattagccatttctggtgtacttggtttgtctgtgaccaatagctatacccttgatcaccaactcataatgttggctgcttattttacaatatttgttttgtatttcttattcttcatagaactcaaaaaacgaattactttattgttagattgtgcatatttgtacggccttatatttttattcatctgatggaatatatattatttttcctaaaaa

SEQ ID NO: 2104 - DNA, 1397 bp, Glycine max
agagagaattatttttatttctaaagttatagtggtgaataaattaagaacacatttcaactatagacaattcaagtgcgctatttattactggaacatatgtctgcctggaatagattaagattctatagctagcaataagaaaaaaaagtaagcataaactgcgcccccttgacaaatttgtattagcagatgtcaacaaaaaggacaaatgcaacctggattcggtcatccactgtataaccttcaatttagtaccctcattattcatgctacattacactttcattttccccaaaattcaaaagaaaaatacagatcaaacaagatcatcaacaaataaaccaataataagcctcccaaagttccaaaaagactaggaaaccaagttaacaaattaagccttaaaatatatctcttttaagaccctaatgaagatgaagatgttaatgtgaagagaggaaggaagcccttagacacacgcacacacacacatatatataaactctgatgagatgatgatattgattcacagctttagcctaatgagccatggctacctgaggttgtgactgtgactgtgagtaactgatgcttctttggtttggcatggaaagcataacagtgtgatccaagaaatccttaagctccacaacagactgaagaatggttcttagatcctcagcacaggaaaagccaaagcttcctacttgcctaacagcatagacatagaaagttatgcacccttttctgaacttgaaccttgccatctcacatccattgaggccccttatgagcctcttgttgacatcaccaagtgctatctctggtggccaaattctgtccactgaggccttcatggcctcagtttcaaacacaaagaggagcaccttggacttcttggtgccaaggccaagggtgagggtgtgccaagcatggtgtgccaagatggtgaagtttgtgggcaagaatgctgtggtggaagggaaagggagcttgtcctttggtttgttggtgttgttggttggtgggaaagaaagaaccttgagaagctccaagggtcttgctcttctgattgtgaaggacttcactatgaactggcctccaaatttgataccctttacctctgagcttggcttgaaggagaaatcagagttctgctttgtgctttggtcattggggtgttggtgcttttgcttcttgttcttgtttctcttctctttctctcccatagctagtgggtgaggagttgaggggttttgttttggtggacacaaaatggttggttatctatcttgattgatatcataacataacaagaccaatctacaatccccttctgtcgtcttctcgcagccgtacggacgcgtgggcggacgcgtgggcggacgcgtggg

SEQ ID NO: 2105 - DNA, 1062 bp, Glycine max
tttttttttttcgagcgaaacaaaatgtttactatttctttaattaacaacatattcctaaccattgcttgtatcatttacatatgttcaatttctgctaattggcgttagcatggctatcaggtgtgagcgaattgttgtagggtccaaagattaaacagatacagtgattgaataaagcgcaatgacatactcatttaacagcgtcagggaagtctctgagaatccaagagaagctttctttttcaaccctgctggctcatgagtatttccactgccacattgagatcaccatcagcagctgccagtgccacttccacctgcgtcctatcaaagcccattgatacaagttttctaatcccttcttccgaaacagctgcaccctgattctgtggaacaccagcagctgctgtagctacattgtcaactgaatgccttccttcagacaaccgttgaggattactaggagtggatgaatctaaaggactattgggactgctatcctccaaaagtctagcttgaaggtttgaatctgaatgaagatgagaagcagtttgaccttgaacggcaccaagggtccttcccctcccagggaacctactgtcctcagttgactgagcagacacttccctttgaggcataaatgatgataggttcctccaaacatttccagaaagtaatccactggttgttgaattttggcttgtctgtgtaggaatataacccgaaggatttccaccagtgcaaacaataaattttggacgtctcacacatgatgaaagccaagaggaggattcaatggaagaataaaaagatgtcccaggtatgaggaaattaaacaagccatatgtatatgcaaacccagataaaatgccacaaaggtgcccaagaagtgagacattttgcatgagaagctggaacactaccgacaaaaagaatgcataccacttggcaggcacattggggggggggcctacgtagctgactcaatagaaaaagttactaaattagtgaacccttaccgattaatgatacataatgtagcatagcacatctattaaa

SEQ ID NO: 2106 - DNA, 504 bp, Glycine max
cgacacttgacaggaaaaacagtaaagatgggtttgaagaacaacatggtggtgctaaaggtgtgtttcttggttcttttccttgtgggggttactaatgcacgcatggaactgaacctcttcaaaagtgatcactcatcaagtgatgatgagtcttcaaaaccatgctgtgatctctgcatgtgcacagcctcaatgccacctcaatgccattgtgcagatattaggttgaattcatgtcactcagcttgtgatcgctgtgcgtgcacacgctcgatgccaggccagtgtcgttgccttgacaccaccgacttctgctacaaaccttgcaagtccagtgatgaagatgatgactaggaattaatcaacaaaagctctctcaaatgaacaaagccctttaggctttctttgtcttttatgtaagggagacaaataaaacatggaataaaaagctcgcagtggccagtaatttgcttttggcaaattttggtcatttttatcaag

SEQ ID NO: 2107 - DNA, 1227 bp, Glycine max
ttttggttccccttaaagaaatttgtaaattcaacaccttggtggggggttttaacttttttggaagttcccggaaccctgcaaagaaaagctaagaaaatttgtttagaaaaaacccttgattcccaaagtaatctaaaaaggttcagcagggaaggagaatttttgatccctcaagataaggagaccgatgaggaagagagtgaggaagatgaagttaaacctagaaaaaaaattccgccaaaaggcaaggtgaagacttctgtccaacccaaaaagcgtaaaggagaggagtctgatctatccagtaagaaaagggtcaaacctgctaaagcagcctcagaagacaatagtgatgcagaagataatgggaagaactctgaagatgatcagtcccattcatcaccagagaaaccttccaagaagaaagaagtttcaaatcctgtgtatggtaaacgtgtggagcacttaaagtctgttattaaagcatgtggaatgagtgttcctcccgtaatttacaaaaaagtcaagcaagtgcctgaaaacaaacgagaagggcagctaattaaggagttggaggaaatactgtctagagaagggttgtcttcaaatccatctgaaaaggaaatcaaagaagtaaaaaggaagaaggcgagagccaaagaacttgagggtattgatctaagcaatattgtgtcaagttcacgtagaagatcaacaagtagttatacatctccacctccaaagccaaaggttccagttgaaaccagtggcaatggggctgaaggtagtgataatgacgatgaagataatgataatgaagaggatgaagaagatgaggaagaggatagcggtgacgatgatggaagtcagagtgaagaatttaacgatgatgaagaggacagcgattgaactcggacagatttcacaataattaaggcgatttttttcacaattaattaggaggtgatggtgtataatgtaatgtcttgtaacgtgtttgctcttttgctttattttctgttgttccgaatatataatgtggtaatggccagtacttgttgctagttgcagaagtattaatttagtttcttccttggtccgttaatagtaacttctgctttgacagtattggtttaaatttagtatattttatttcccctacgaaaaaaaaaaagagaaaaaaaaaaaaaaaaaaaaaaaaaaaaaaaaaaaaaaaaaaaaaaa

SEQ ID NO: 2108 - DNA, 1070 bp, Glycine max
tctcgagccgaatacagtgcaatttagctgaagcaaagcaatggctacttcaaagttgaaaacccagaatgtggttgtatctctctccctaaccttaaccttggtactggtgctactgaccagcaaggcaaactcagcggaaactgtttctttcagctggaacaagttcgtgccgaagcaaccaaacatgatcctccaaggagacgctattgtgacctcctcgggaaagttacaactcaataaggttgacgaaaacggcaccccaaaaccctcgtctcttggtcgcgccctctactccacccccatccacatttgggacaaagaaaccggtagcgttgccagcttcgccgcttccttcaacttcaccttctatgcccctgacacaaaaaggcttgcagatgggcttgccttctttctcgcaccaattgacactaagccacaaacacatgcaggttatcttggtcttttcaacgaaaacgagtctggtgatcaagtcgtcgctgttgagtttgacactttccggaactcttgggatccaccaaatccacacatcggaattaacgtcaattctatcagatccatcaaaacgacgtcttgggatttggccaacaataaagtagccaaggttctcattacctatgatgcctccaccagcctcttggttgcttctttggtctacccttcacagagaaccagcaatatcctctccgatgtggtcgatttgaagacttctcttcccgagtgggtgaggatagggttctctgctgccacgggactcgacatacctggggaatcgcatgacgtgctttcttggtcttttgcttccaatttgccacacgctagcagtaacattgatcctttggatcttacaagctttgtgttgcatgaggccatctaaatgtgacagatcgaaggaagaaagtgtaataagacgactctcactactcgatcgctagtgattgtcattgttatatataataatgttatctttcacaacttatcgtaatgcatgtgaaactataacacattaatcctacttgtcacaaaaaaaaaaaaaaaaaaaaaaaaaa

SEQ ID NO: 2109 - DNA, 616 bp, Glycine max
gagagaacttgtctcgtgtttttgtgttttttttttgagattgtaaatcaaatctttaaagccttatgcagaattcaatttaagtacaagcactcaataacttctacacagatgttcaagaacagaaaaactacgtccctattatgtgttcttacagtcttacatttccttcctaccaaggcatatttttcattttcagtttccttcctagagcttaaacacccaagtcatatagcatgttatatcaagcaataataactaccaggtggtttaattctaattagtgttgctctccagctcccttttcaactggagagaaaaatcatcactaacatcatcatcatcccaatcatcctcccactgctgagtcacttcttttccttcctccttgtcatcccactcttcattgatttcaaactcttcaaactcatcatcgtcttcgaagagatcgatcttgacgtcatcggtggctgcttttggttcggtcgccatggatgcggttatttcgaaaaccgactagggaggttggagtgtcaaccctatgagcccaagaatcttgtactacttttgaatcaagtaacgtgtctgcccccttctgtcgtcttctcgcagccgt

SEQ ID NO: 2110 - DNA, 868 bp, Glycine max
aatttttttttttttttcatgtacaaataaatttctttatatattataatacacataaatccgcagtcaaaccaataactgacttttgacagaaattaacagaaaaaagttacaaaacaacccaatttgtaagaactgtagctatagctataaagaggacgatagctcatgcccttttgtttaattgtcattgcatttccatttagaagttggaacacatgttagatagtgacaccaatggcagtgatcatatccattctcaccccggaataacatcactagagcaatagataacccaacaattagtaaaatggccgagacaatccatagaacatattggtaagccttgtattttgacttgaggcgaacaccagcagggggacgtcgttgttctaaccacccaaactgagggcggagcagcaaaataaacccaaggagaaatcctgtgaggaatcccccaatatgagcaaagttatcaacatgtggtaacattccaatggcaagattgatgacaataataaacagaagtgtgaacaaagcagctgccttattagtataaatactccaatttgtgataagttctgaaagcattgctccaagaagtccaaaaagagcaccagaagcaccaacagaaatgttgtttctaatgaataaggaagatagtacactcccgccgaatccagacaacaagtaaataattcctatcctcacaaacccaatttggtgttcaagacgaatgccaatgaagaccaggctcaacatgtttggcagccaatgacaactcagcgtgcagcaaatgcaggacgagctcatgcttgtgatgatcacacatcatccacgagtgctccatctttgtaaagtgacgaga

SEQ ID NO: 2111 - DNA, 1144 bp, Glycine max
tgttagatagtgcccccaatggcagttgatcatatccactcctcaccccggaaatagcttcctaagaccaatagataacccaccattcagtaaaatggcagagacattccatagaacatattggtaagccctgtatttggccttgaggtgaacaccagcatggagacgttgttgttctaccaccccaattgaggacgggagcagcaaaataaacccaaggagaaatcctgagaggaatcccccaatatgcgcaaagttatcaacatgtggcaacattccaatggcaagattgatgacaataataaacagaagtgtgaacaaagcagctgccttattggtataaatactccagtttgtgataagttctgaaagcattgcaccaagaagtccaaatagagcaccagaagcaccaacagagatattgtttctaatgaataaggaagacagtacactcccgccgaatccagacaacaagtaaatgattcctatcctcacaaacccaaattgttgttcaaggcgaatgccaatgaagaccagactcaacatgttggcagctaaatgaacaactccagcatgcaaccaaatgcaagtgacgagtctccatgcttgatgatgattcacaacatcatcccaccgaagtgctcccatctttgttaaggtggatgaagagggcccaaataacggattctccctaaggggctgaaaggagaaccgacccagaaacctggcgacacattccccttcaaagccgagatttttcctgggacaatcgttgagatacatggccacaacgaacaccacaacgttaaccgccacaaacagcggcacgagccatgacgtccaatgaacttcgggatcgtaaacataggaagtgggagcagcactgtagcttatgttgttgtagttcttgttcgcccctccactttctagatctctccgtgttgttgatgacatggtttcgtctttggtctgaaaagtttcaaagaaagactcaaagtttcaacgcaaaagggtgagttgggaagaagaaggtggagaagggtttggagcttatatcggaaatgggaaatgggaaatgggaaaggaaagtgattgggaaggttggtgtcaccgagcagtggaaggagacgtttcagcgagccga

SEQ ID NO: 2112 - DNA, 963 bp, Glycine max
tttttacaaaattgcacatattcattcatgtattgcaagatacaaagtcatttgagattatcgataggtaaccaaattatattgaatcatagaattgaaatcgtcaactataagattctaataactatgggggacatctttaacaaggttaactagattaacaggatccaataggggtcagattatgcagttttcagaattgtaactgactaactgaaaacactagtctgaagggcaacaaaagaggaaaagttgagcaaagaacttgcttttacacagtgctagtgaacactgatatataacaaattacagcagtatgtatccaatacttgtgcacatttttatgggctatatatatcaatcaggctacaaatttcaagcaacgggtatcattgtgtacattttgacatctatgggaacaaaaccgcataccacatctcacacaagtgtaattagcagaaaaaccacaaacggtacagaagtggcgacgggaggttgagcttgggggtccaactgcggctttccaataggagggcacatgaggaggcaatgattctaagttagcctcatgtaagagctcaaggaatgttcttggggcccttctagcttcaagtgcttttgcctgcctagttttccttttggtgcctttagactgctttttctgcatataaaattgatcctcctcgtctagagaagcgtcatcgtcatcattattggcatctgcgatttcaaaacccgcattgtcattctccaatgcatccaagcgtgcaagtgccgcctgagtgcggttgtcagcgctggaaagcgcggcggccattttggacgcaacttttcgcgttcggcttgacatgcggcggatcgagttggaaccgtcgtcctccatttcggaatcgccaactcaaacgcaacacacaaacacggccttaagctcgtatttttaatttgcaaagtttttttttaagt

SEQ ID NO: 2113 - DNA, 1480 bp, Glycine max
ttttttttttttttttttttttttaaaataagatgccactagtttccattgagagatatatagcatatacatatttggaataagaaacagtgagtcttctgtatgtgacccacaatcacaccctcctacatcactccaactaattactttgcctactttttcaacaaaaatagaatcgagagatttgaccatgatgcttttatgtggtagataattaattctacacacacagtcattagtcagtctaattatagttctcctaactagttagggaacttcctagtttgtgttcttggtttggatcttggcaaattccagggtctttttaccttgtaacttgtttgttacatagtgtttactgtactctccatgattgtatattttatacttgcatgggtggttttcatccacaaactcaggcattggaccaagctccacttcatagctaggagcaaaaaatgtcacaattgagagtctagctttctcctcatgagccacagctctatgctccacactcctgtatttcccatttgtaagaacttctattgtgtctccaatgttgatgacaagagcatttggaattggttgaataggaacccatgtattgtccttgagtatctgaagtcccactgggcctccctttgcttgctgcagaacagtgagggcacttccatctgaatggggactcagacccaaaacaaggtcaggtcttgaacatggagggtagtagttcatcctcacggcttgcaccgatacgccaaacatctcctcaaactcatcccctttcaaaccaaggcctaaagctatgtatgttaacagattatagcagagtttccttatttctcctgagtattcttccacagtttcgctgaatttttctggtttctttggccatagatttgggttcctaacatattgaggttcaattccaagagcaaacatgttgcaccagtccagtttttggtcctctgagaaaacaaaagcttgtccatacccttggactgttcctggagccatagggtatttctgtttctcttccaaaggtagcatgaaaaactccctgctcaggttctcgatgctctccagcagattgaggtcaatttcatgattaattacctgaaaaaatccccactcttcacaagcagttgcaagattgaaaagttcagtgaggacttcctctttgttccctttgctaagcttagagaaatcaatgactggcatgtcactatgtggtgggggaagaggtgtagtgagtgttggtctttctgtcaagtctcgtacaaatctttgaggaattgtccttggcttggtttttcttagctcttggacatcatcaatgtgcccaactttgatgggggaaattggtacgggaggcattggaacagaatctgggagcttgagttttcttttgcacactactggttactctatatggggggggggcctagtagctgagccccggcggctcgagcggctcgag

SEQ ID NO: 2114 - DNA, 1919 bp, Glycine max
agaaaatacatcgttctctattttgtaatgaattttctgtttgagatactactactcttaggcgttctttttttttttttttcttttttttttttttttaagacaaaactgatagggattgtcttttatttaaataattcacagtaacatcaagaattcacaattaacactcaacttgaatctgaccttatttcataaatataacctcacagcagtgatccataaagccaatggattaaatgataacagtttaatagttatgcgctgttggtataaaatctttacactacaaccaaccaattagaaatcaccattgataagactttttaaaatagttatcgtaaaagttaacaaacttacaatacatagtgattagtaattggatgacagtgtaaaattattttacattatcaatgcataacctatttcctcatatcataaagttcatctgctcagccctcaaaccctgaaatctgctggtgttattatcaaactgaacaaacacagaactcacaaatgtgtagatgaaacctttacaactgcccaatgctgccaggaagaacagtttcaacattacaacttcaaccactccaaacaaggacacaggccccaacaatatctagcagggtaataatccttcaaatacacctctctgccatattctataatgtagaaactgaaggattgtcgacgatgagccatggtgacacgagttactggcacaactgagattgcatgcctttcacatatgacccttgcagtggcaggcacttgagctctttctgcaatgacatcagaagagaatttgttgagaaaataagaatcagcaaaaaaggctggagtgcattggtatgcttgagtgttgcacaattgaacccctttggatctatggaaaacttcatccggtactgatgctgctccacttgttgcatttactttccgagttgaaagtgtcttccatcgaataatggccagattgcgtgctagaagagaaccacttccattacatgttgcacactgaattagtccacgagatccacatgttacacaaggaatctttcccttgccattacatttcacacatacagtgtcagaaccatctttatgagcgattaaaccccttccataacaagttgcacactgagtcatctgattttccttataaaatccaggttcttggtctgcattgcatgtagcacagactgtacttccccgtcctgcacaaactgtgcacttttctataacttcagaatggggaatcttttcccgcacttctttatagggttcaaatagaacagggaactgagatcttagatccaattcccaaataccaagttcaggtccattatcctttccgtcaatactgccaccaaggtatggttctgtctctcttatgatttctctttcctctataaatgtatccagagttcctacatatacattacagtcttccactgcatgaatcctccatgttcgagcaggacgactaccccaacagcaacgatgaccaacatgatcaatgagcaactctcgtatctccacttcatccaagattttcctctggaattggggtgtgggtccaccataatctcctccatatccaccctgataaacaagagcttgctctgtaggatcaggctcaggtgaaccaaccaaggctccatgaagggaagggggatagtaaccagaagcagcagcagcagatcgaatttcatccacactcacctcagttccagccaatgaagaagttggcctcacagaaccggttccacccacatactgatacgagctccattttccactctcttcttcaatcgatccagttctcttctccgataataacagaggcgcctccatggtgggggtggttagttgagagttggggggggggcctacgtagctgactcccttataatcga

SEQ ID NO: 2115 - DNA, 1594 bp, Glycine max
ggctcgagtgttttcggacggtataatgagttttttttttatccttgagagctttggtatagtaccctgtcagtgtttcatagatatgtaagaacctggttgcactacacgaacatgagtgaattgcaaaagaagtctctctaggcgtttcagtgaagactggtggcttacagttaatttgtaagagctggttatgagttttgtaaatttatttttgctcatggactgatttaatgcactgtttaattcatttagcatcacctcaagcactgtgattctctgcatctgcactcaatttcttctttgtgttggacaggaacccctcactaaaatttcagaaactagaaatgaagacattagggatgataaatttattagtcctgcaattgatgcacaagatgatgtctctcctaatcgttcaagttctgagactcgagatggaaagcatgctcaagctcgtacagatggcgtgggcaatggttttttggatcctaaatcttccaaaggggataagtggcacaatggggaacttggacattttaaaggtaatgagaaactaaaaggagactttgatgatgaaacactggaggctaatgtgaggaaagcacattacaataggaattcatcctctgaaagtggagggggaaaatatagaatgtcaggaagttctccttctcatggtagatatagaagtcgatcaagatcaattggtcatactagagacaggtctcgctctcgtagtatcatagatgaatatgctcattccaagagaaggcgctctgactatgaccatgatgaggaaagagtgagggtacgtggaagggagcatggtcatggcagtgtggtagatgatagaagggaatacagtaccagatatcacaatcgagaggccagggatagagataggagtagggatagagatgtggatagagacttgcacagagaaaagaaacaagaggaaactagcaggggtaaagagattgagtgggaacacaaaaggggaaaggaacgtgaaaggagccgtgagaggtatagaagggatgcagaaaaagataggagcagggaaagggaggaggatggggacaggagacaagaaaaggaaagagataggagctgggatacagtgtttgagagggataggagaagggaaaaggaaagagatagaagtagggacagaacaataggtggcaagagagatagagacccggagaatgaaagggatgataagaatcgggaaaggcgagatgatagatatgggcacaaagatagagacactgcaaatggtaaggataggcatctgcgtcatgaggatggtaatgacaacggagatagatatagaaaacattcaaggcatgaagaaaatgaataccattgggaaagaaaaagaaattctgataatcctgtaaaggtttataattcaatgggaagtactgcagaagtggatgaaagcaaactaaccagtgaggttgaaccagatgacttagagggggatacattgccattacctgagcaagaagaggaagatctcaacaggattaaagaagagagtagaagaagaagggaagcaataatggagaaatacaagaagcagcat

SEQ ID NO: 2116 - DNA, 1069 bp, Glycine max
atcaccctcatattacttgcggacactaaattcaagttttaaacatttggtaaataaacatactacaccgggaggaaacatagaagaaacagacggtaagagattcaatgtcacaaagtaacatgcaatacaggaaagttatccctccaactgaaacaaatatggaaaagaggaacttgacaacataacatcgattgtaggacaacaaagaaccaattgcaaacctggagtcctgaagtatcacaaggaggataaactcgcttaatacggtcaggaaatctccaaagattttcaatatgggatttagtccaagatgaattgaccatagctaggtgtgcacaagatcctacaaatccatacaagcagctgaatactgtataatagactattttgcaccttgaaagccaaacactttttgtaattaaggcatcgttattatacatgaagctgcgctgacgaacacgagctaacatgtctgagctgatagtaggataatgtgtatagcaaataactttgcatccaaacaaccgagcaagtggatatgtaaaagcatatccacttgtgtcaaagtaatatattggggtaaacttgcacaaagcctcccatgcaagatacacagaacccagactttgaccaatcatggtaaagtgcggataagtagtctcttctatccactttctcttgtacaaatgaaccacctttggaggagagaggagcgcgaccccaaagcgatcgagggcacgagccatgagcgattgaggggtggcgtcatgatctccggtgtacacgtagcaatcaaggtcggggctctcctcctggatacctctgacggcgcaccacagcaccctctccccgccgccaccgtcgttggtgtacggatggaagaacgccacggccctcttcctccgccgcctgccgttgattgggccaatgcaaagtcccgcaagtatggcggtgatgagcgcagtgatgatcatcgtcaacattagtcgcagaacccaaaaagcataaccttaaaaactaaaatctgcaaaatctggtggtgtaaaaggcagcacctctgcagtac

SEQ ID NO: 2117 - DNA, 693 bp, Glycine max
tttttttttttttttttttttttttaggtgataattaaataatcaattatgaaacacgtatagctatttccgtaacaaaattcttcgtctatattctgaagttacaatcatgctaattagatcccatagaccatcacctagaagtatgagacaggataggacgcactgcagctttgaagtcatcataaaacctctgctcggaaaacctcctcgcctgtctccttgcggctgcagccatctttagtctctccatctccgacatcgatacaattctcaccatggcatctgcatattcttcaaccgtgcaggcaagaaatcctgtttgctgtccatcttcatctaatacaatgtccatttttgggccagcagaattatgagcaattggaatggcaccagcagccatgtattctaccacactaatgccaaaatgctcatctgtcattgaatgaatgccagcaacagcaccccctgtatgttacattcttatgaaattctacatgttcattcacattcagctcaattgctttctcctttaacatttgaagtctgtcttcatctgatttatttctacagctacccacaatttggaacttaggttttggcaaggtaggatctaatctcttaatggcagcggaaaaagcctcaagttggagagtgtgtgcctcttgttggggggggggcctacgtagctga

SEQ ID NO: 2118 - DNA, 1387 bp, Glycine max
  misc_feature (1372)..(1372): n is a, c, g, or t
gatcaaggcaagtgcttgtgcaccaaacaaaattcaacttaaatgttcataatatataagagtttacattaatggccactcaaaagaagacactcagttgaaagtaaaatcttaaaccttcagcctgtatactaagatgaaaaaccctaaacagcaacttaaaagccaccaaagcccaaatatttggcatgatcaagtgaagttttggccaatatttgaccaaagagtgaaaccaatggtggctgcaaccgccacaccatagcacaaccgcactaggaaatataaaaagctgttagactcaaaatttgtttcatgctggagacaagtccctatctaaaagacctatccactcactaactgtacaagcaaccgaggacaagaagaatgcccttggatatagttataccacgattattagcatgcaccaaacacttgatatgaggcctaacaactaccatccacatacaccccattgccattggtatatataccatttaaggaaccattggatgaattgaagccatttcccttttggtgtgctttcagttttggtgagtgtccattgcacattccatttccattagttaacttggcgtgaccattacttggcaccatgattgtcctcctagattcacttgctgctgctattaatcctgagaagagcggagaaggtttccctggtctggacttgaactcagggtgaaactgaacgccaataaaaaaaggatggctaggcaactcaactatctccatacgcctcccagtttcatctttgccaacaaaagatagaccagcattctctagcggtgatatcatgtcaggattaacctcatatctatgccgatgtcgctcatcaacaaagcttacattgccatacaattttgcggatttgcagtcagcaacttcaaagtaagttcttcttgagccaagacgcatagttcctcccatatgagtctttgagccttctggcataaatatgacacaaggggtcttggtttcaggattgaattctgtgctagtagcatcatgcagaccgagaacagatcgtgcaaactcaataacagcaatttgcattcccaggcaaatgccgagaaatggaacattatgttctcgagcatacttagcagcaagaattttcccttgcactcctctatcaccaaaacctcctggaactagaaccccattagcaccctttaaaagactccaagcagctttatgcgcctcaggatcctcattataagtagcatcttcaagatccccagctggaacccagtccacaataagtttacggtttcgagcaacagaagcatgtaaaagtgccttcagaacagaaagatatgcatctgaaaggccagtgtatttctcgagccgngttccgggctgcggg

SEQ ID NO: 2119 - DNA, 1314 bp, Glycine max
aattgccagccccttgagtgttcaactcattttattttaatatattatttgacaataacatggtaattttttttcttaggctcaaccatattttgatttcattgagaacaagtatcatccacaagcttgggtattatatgattggatggaacttggaaacataaaaagcagttaaataatcaaaattgcttcatatgctggagagacaaatccccttatgagctaaaagtccactagaaactgtacaagctaaccccgtggacaaaactgtcattggagaaaaatcaaacccacatttgtaagcaaaaaaggaaagaacccagatgattgattaacagctcctcccatcaacacaccccattggtagttgtacttgtatatacaccatttaaggaactattggaagatttgaacccattatttccattatgtgctgctgctgctttcaacaatggtgagtgtatcccatttgttaacttgctatagccattgcttgcaggcacaattgtcctctcacatgctgctgatattaatcctaagaataatggagaaggtttccctggtctggacttgaactcaggatgaaactgagcaccaatgaagaaaggatgactgggacattcaactatctccatgcgcttcccagtttcatctttgccaacaaaagatagaccagcactctcgagttgtgatatcatatcaggattaacctcgtatctatgccgatgtcgctcatcaacaaagcttgcattaccatacaacttggctgatttgcagtcagcaacatgaaagtaagttctccttgaaccaagacgcatagttccccccatatgagtctttgaaccttctggcataaatatgacacaagggttttcggttttgggatcaaattctgtgctattagcatcatgaagacccagaacagatcttgaaaactcaatgacagcaatttgcatccccaagcaaatgcccagatatggaatgttattttctcgagcatacttggcagcaagaatttttccttccactcctctgtcaccaaaacctcctggaactagaatcccattagcacccttcaaaagaccccaagcagctttatatgcatcaggatcctctttagaggtatcatcttcgagatgttcagcgggaaccaaatccacaacaagcttatgattgcaagcagtagaagcatgcaaaagtgccttcagtacagaaagatatgcatctgagaggttagtatattttcccaccattgcaattctaaccatttcatgaaatttgtcatatacttttgttgtcgcaatccactcctta

SEQ ID NO: 2120 - DNA, 4168 bp, Glycine max
  misc_feature (11)..(11): n is a, c, g, or t
  misc_feature (4105)..(4106): n is a, c, g, or t
accggtccggnaatccccgcgtgcgcgctcacacacaccaatggaatcataacaagaaaaagataaacactccccagagttcaaagagcaagcactatttcctctgttgtgtcttttttcaatttgttttccctctctgtagcagcagcagcagtgatggaacgtgctcgcaggctagcaaaccgcgccattctgaggcgtctggtttcagaggcaaagcagcatcagaagaatgaatccgtgctgcactcttccaccacccccatgctgctctattcttcctccaggtgcatgtcctctgttctgcgaagcaggggatccaaaacagagacccttctgggaaggaacatcaacatgtcacgcggcgttgttgttgctgctgctggtggttttctcggcgttggctcggcccggtccatctcggtcgaagcgcttcgaccgagcgacaccttcccccggcggcacaactctgccaccccggaggagcagagcaagatggcagagtcgtgtggcttcggtagcctcgactccctcgtggacgccaccgtgcctaagtcgatacgccttaaggatatgaagttcgggaaattcgatgcagggcttacagagaaccagatgatagagcacatgaaggacttggcctcaaagaacaaggttttcaagtcctacattggaatggggtactacaacactcatgttccaccagtgatcctgaggaacattatggagaaccctgcttggtacactcagtacacaccttaccaggctgagatatctcaggggaggcttgagtcactgctgaattaccaaaccatgatcactgacctcaccggcttgcctatgtccaatgcttcattgcttgatgagggaactgctgctgctgaagcaatgtccatgtgcaacaacattcagaaagggaagaagaagaccttcatcattgcaagtaactgccaccctcaaaccattgatatttgcaagacaagggctgatggttttgatctgaaggttgttactgcagatcttaaggacattgattacaagtctggggatgtttgtggtgtgcttgtgcagtaccctggcactgagggagaggttttggactatggggagtttgtgaagaaggctcatgctcatgaggtgaaggttgttatggcaagtgatttgttggcactgactgtgttgaagcctcctggtgagttcggggcagatattgttgttggatcagctcagaggtttggggtgccaatggggtatggagggcctcatgcagctttcttggccacttcacaagagtacaagaggatgatgcctgggagaatcattggggtcagtgtcgattcttccggaaagactgctttgaggatggcgatgcaaactagggagcagcatatcaggagggacaaggccaccagcaacatttgcactgctcaggcactgcttgcaaacatggctgccatgtatgctgtgtatcatggacctgaaggcctcaagaacattgcacaccgtgttcatggtcttgctggggcatttgctcttggaataaagaaacttggaactgtggaaattcaggaccttcccttctttgacactgtgaaggttaagacttccaatgcacacgcaattgctgatgctgctctcaaaagtggaataaatttgcgagttgttgatggaaacactatcactgttgcttttgatgaaacaaccacattagaggatgttgataatcttttcaaagtttttgctggtggaaagcccgtctccttcacagctgcatctcttgcaccagaagttcagagtgcgattccttctggattagttaggaagagcccttatctgacgcaccctatctttaacacgtaccaaactgagcatgagttgcttaggtacttgtataggctacaatcaaaagatctctcactatgccacagtatgatcccacttggatcttgtacaatgaagctgaatgcaacaactgaaatgatgcctgtgacatggcccagctttagtgatattcacccttttgcaccagttgaccaggctcaaggttatcaggaaatgttcaacaatttgggtgaactgttgtgcaccatcactgggttcgactccttctctttgcaaccaaatgctggtgctgctggagaatatgctggacttatggttattcgtgcatatcatttggcaaggggagaccaccaccgcaatgtttgcattatacctgtctcagcacacggaacaaatcctgctagtgcagctatgtgtggaatgaaaattgtctctgttggaactgatgccaagggaaacattaatatagaagagctgaggaaggctgctgaaacacacaaggataacttatctgcacttatggtaacatatccttcaacccacggtgtttatgaggaaggtattgacgaaatttgcaatattattcatgataatggaggccaagtatatatggatggtgccaacatgaatgctcaggtgggactcacaagcccgggttggataggagcagatgtttgccatctcaatctccacaagacattttgcatccctcatggaggaggtggccctggcatgggacctattggtgtaaagaaacacttggcaccatttttaccttcacaccctgtgatagaaactggtggaattcctgcccctgacaaacctcaaccacttggtaccatcgctgctgcaccatggggctcagcactcatattgccaatctcttacacttacatagccatgatgggttctaaaggactcaccgatgcatcaaagatagccattttgaatgcaaactacatggcaaaacgattggagaattattacccggttcttttccgtggagtcaatggaacagttgctcatgaattcatcattgacttgagaggctttaagaatactgctggaattgagcctgaagatgttgcaaagcgcctcatggactacggttttcatgcaccaacaatgtcatggcctgtgcctggcacactcatgattgagcctactgagagtgaaagcaaggccgagttagacaggttctgtgatgctcttatttccattagacaagaaattgctgagattgagaaaggaaaggttgacattaacaacaatgtacttaagggcgcccctcatccaccatcactgctcatggctgatgcatggacaaaaccatactccagggaatatgcagccttcccagctccttggctccgtactgcaaagttctggcctaccacaggacgtgttgataatgtgtacggtgaccgcaacctcatttgcacccttctcccagcatcacaggctgttgaagaacaagcagctgccacagcataatgtgttcaaatgacaactattttcatttcccgttgtacataaactcttattcctattcatacagttcttgcacttgttgaatattgcttcatcatatgtgacaatgatgataatccactgctcttaagtttcatccaatcacaggaaaaaaaaaaaaagtaattcgtataattgctgctgctataggattttaggaattggatttaaaatcatgcgtcccactaatttgggaatagaacttaccaaatgaggaaggagactcagatttaatgggacctatataaatttcacccaaatagtgtgtgtggtactaacatttattatagtctattgaaggtgtgctatgttgtatgtagtgactgcatagtttagtttgagaaataaatgcatagactaattaatgaatgaaacatgtgtatcaggacgtgttgataatgtgtacggtgaccgcaacctcatttgcacccttctcccagcatcacaggctgttgaagaacaagcagctgccacagcataatgtgttcaaatgacaactattttcatttcccgttgtacataaactcttattcctattcatacagttcttgcacttgttgaatattgcttcatcatatgtgacaatgatgataatccactgctcttaagtttcatccaatcacaggaaaaaaaaaaaaagtaattcgtataattgctgctgctattggattttaggaatgtattttaggcccatctgttacagtaatctcaaccaatggatttgattcatgtnnaaaaaaaaaaaataaaaaatattattatttttttaataaaaaaatttataaaaaaaaaaata

SEQ ID NO: 2121 - DNA, 3740 bp, Glycine max
attcggctcgagcactcacacacaccaatggaatcataacaagaaaaagataaacactccccagagttcaaagagcaagcactatttcctctgttgtgtcttttttcaatttgttttccctctctgtagcagcagcagcagcagtgatggaacgtgctcgcaggctagcaaaccgcgccattctgaggcgtctggtttcagaggcaaagcagcatcagaagaatgaatccgtgctgcactcttccaccacccccatgctgctctactcttcctccaggtgcatgtcctctgttctgcgaagcaggggatccaaaacagagacccttctgggaaggaacatcaacatgaacatgaacatgtcacgcggcgttgttgttgctgctgctgctggttttctcggcgttggctcggcccggtccatctcggtcgaagcgcttcgaccgagcgacaccttcccccggcggcacaactctgccaccccggaggagcagagcaagatggcagagtcgtgtggcttcggtagcctcgactccctcgtggacgccaccttgcctaagtcgatacgccttaaggatatgaagttcgggaaattcgatgcagggcttacagagaaccagatgatagagcacatgaaggacttggcctcaaagaacaaggttttcaagtcctacattggaatggggtactacaacactcatgttccaccagtgatcctgaggaacattatggagaaccctgcttggtacactcagtacacaccttaccaggctgagatatctcaggggaggcttgagtcactgctgaattaccaaaccatgatcactgacctcaccggcttgcctatgtccaatgcttcattgcttgatgagggaactgctgctgctgaagcaatgtccatgtgcaacaacattcagaaagggaagaagaagaccttcatcattgcaagtaactgccaccctcaaaccattgatatttgcaagacaagggctgatggttttgatctgaaggttgttactgcagatcttaaggacattgattacaagtctggggatgtttgtggtgtgcttgtgcagtaccctggcactgagggagaggttttggactatggggagtttgtgaagaaggctcatgctcatgaggtgaaggttgttatggcaagtgatttgttggcactgactgtgttgaagcctcctggtgagttcggggcagatattgttgttggatcagctcagaggtttggggtgccaatggggtatggagggcctcatgcagctttcttggccacttcacaagagtacaagaggatgatgcctgggagaatcattggggtcagtgtcgattcttccggaaagactgctttgaggatggcgatgcaaactagggagcagcatatcaggagggacaaggccaccagcaacatttgcactgctcaggcactgcttgcaaacatggctgccatgtatgctgtgtatcatggacctgaaggcctcaagaacattgcacaccgtgttcatggtcttgctggggcatttgctcttggaataaagaaacttggaactgtggaaattcaggaccttcccttctttgacactgtgaaggttaagacttccaatgcacacgcaattgctgatgctgctctcaaaagtggaataaatttgcgagttgttgatggaaacactatcactgttgcttttgatgaaacaaccacattagaggatgttgataatcttttcaaagtttttgctggtggaaagcccgtctccttcacagctgcatctcttgcaccagaagttcagagtgcgattccttctggattagttaggaagagcccttatctgacgcaccctatctttaacacgtaccaaactgagcatgagttgcttaggtacttgtataggctacaatcaaaagatctctcactatgccacagtatgatcccacttggatcttgtacaatgaagctgaatgcaacaactgaaatgatgcctgtgacatggcccagctttagtgatattcacccttttgcaccagttgaccaggctcaaggttatcaggaaatgttcaacaatttgggtgaactgttgtgcaccatcactgggttcgactccttctctttgcaaccaaatgctggtgctgctggagaatatgctggacttatggttattcgtgcatatcatttggcaaggggagaccaccaccgcaatgtttgcattatacctgtctcagcacacggaacaaatcctgctagtgcagctatgtgtggaatgaaaattgtctctgttggaactgatgccaagggaaacattaatatagaagagctgaggaaggctgctgaaacacacaaggataacttatctgcacttatggtaacatatccttcaacccacggtgtttatgaggaaggtattgacgaaatttgcaatattattcatgataatggaggccaagtatatatggatggtgccaacatgaatgctcaggtgggactcacaagcccgggttggataggagcagatgtttgccatctcaatctccacaagacattttgcatccctcatggaggaggtggccctggcatgggacctattggtgtaaagaaacacttggcaccatttttaccttcacaccctgtgatagaaactggtggaattcctgcccctgacaaacctcaaccacttggtaccatcgctgctgcaccatggggctcagcactcatattgccaatctcttacacttacatagccatgatgggttctaaaggactcaccgatgcatcaaagatagccattttgaatgcaaactacatggcaaaacgattggagaattattacccggttcttttccgtggagtcaatggaacagttgctcatgaattcatcattgacttgagaggctttaagaatactgctggaattgagcctgaagatgttgcaaagcgcctcatggactacggttttcatgcaccaacaatgtcatggcctgtgcctggcacactcatgattgagcctactgagagtgaaagcaaggccgagttagacaggttctgtgatgctcttatttccattagacaagaaattgctgagattgagaaaggaaaggttgacattaacaacaatgtacttaagggcgcccctcatccaccatcactgctcatggctgatgcatggacaaaaccatactccagggaatatgcagccttcccagctccttggctccgtactgcaaagttctggcctaccacaggacgtgttgataatgtgtacggtgaccgcaacctcatttgcacccttctcccagcatcacaggctgttgaagaacaagcagctgccacagcataatgtgttcaaatgacaactattttcatttcccgttgtacataaactcttattcctattcatacagttcttgcacttgttgaatattgcttcatcatatgtgacaatgatgataatccactgctcttaagtttcatccaatcacaggaaaaaaaaaaaaagtaattcgtataattgctgctgctattggattttaggaatgtattttaggcctatctgttacagtaatgtgaaaaaatggatttgattcatgtaaaaaatactcagcattagtttcttttagtaaagaatgcatttgccataaaaaaaaaaaaaagaaaaaaaaaaaaaaaaaaaaaaaaaaaaaaaaaaataaaaaaataaaaaaaaaaaaaaaaaaaaaaaaaaaaaaaaaaaaaaaaaaaa

SEQ ID NO: 2122 - DNA, 1769 bp, Glycine max
atgctgtatatcatggacccgaaggacttaaaaccattgcccaacgggttcatggtcttgccggggtgtttgctcagggattaaaaaaacttggaaccgtggaagttcaggaccatccattctttgacactgtgaaaattaagactgccaatgcccatgcaattgctgatgctgctcgcaagaatgaaatcaatttgcgggttgttgatgggaacactatcactgttgccttcgatgaaacaaccaccttggaggatgttgataatcttttcaaagttttttctgatggcaagcctgtctccttcacagctgcatctcttgccccagaagttcagactgcagttccttctggacttactagaaacagtccttatctgacacaccctatctttaacacgtaccacactgagcatgaggttctcaggtacattcataggcttcaatcaaaagatctttcattgtgccacagtatgatcccgctgggatcttgtacaatgaagctgaatgctacaactgaaatgatgcctgtgacatggcctagctttgctaacattcacccttttgcaccaattgaacaggctcaaggttatcaggaaatgtttgaaaatttgggtaaactgttgtgtacaatcaccgggtttgactccttctctttgcaacctaatgctggtgctgctggagaatatgctggactgatggttattcgtgcatatcatttggcaagaggagaccaccatcgcaatgtctgcattatacccgtctcagcacatggtacaaatcctgccagtgctgctatgtgtgcaatgaaaattgtatctgttggaactgatgccaagggaaacatcaatattgatgagttgaggaaggctgctgaaacacataaggacaacctagctgctcttatggtaacatatccttcaacccatggtgtttatgaagaaggtattgatgagatatgcaaggttattcatgataatggaggtcaagtatatatggatggtgctaacatgaatgcacaggtaggacttacaagcccaggttggattggagcagatgtttgccatctgaatctccataagacattttgcatccctcatggaggaggtggccctggcatgggtcctattggagtaaagaaacacttggcaccatttttaccatcacatccagtggttcccactggtggcattcctgcccctggcaagtcacaaccacttggtaccatttctgctgcaccatggggctcagcactgatattgcctatctcatactcttacatagccatgatgggttctaaaggactcaccgaagcatcaaaaacagccattttgaatgcaaactatatggcaaaacgattggagaatcattaccctgttcttttccgtggggtcaatggaacagttgctcatgaattcattattgacttaagaggctttaagaatactgctgggatagagcctgaagatgttgcaaagcgccttatggactatggtttccatagtccgacaatgtcatttcctgtgcctggcacactcatgattgagccaactgaaagtgaaagcaaggccgagctagacaggttttgtgatgctcttatttccattcgacaagaaattgctgagattgagaaaggaaaggccgacattaacaacaatgttctaaagtgtgcccctcatccaccaccagtgctcatgggagatgcatggacaaaaccatactctcgagaatatgctgccttcccagcttcctggcttcgtgtttctaaattt

SEQ ID NO: 2123 - DNA, 2615 bp, Glycine max
gccaaaaatagcctcctgatataaaattaataaattacaacccattgttttcaaaatatatagggtaactgtcctattaatatccatggctcatagggttatagccttgtttttggaattctgcagcatgcatctaaaatgaggggatgcatggcaagcttattttattaagacaaaagtgttcaaacctcatcaagatttatccataatcccaggaaggcaaagacaaagacatgaactggaagaaaaaaaaaataaagctggaagcaaataactcaaaaacactctttacaaaatgtttttcttataagagagattacagcctctctccaatctaaaaagacccaacaatttcctcaaatacattacatttgttagtgaccactcatttgtgggtacgcttcgtaaccctctaaggaccacttgatggcctgaaaacagtataaccattgacaccacatgccatatttgagtaatctggatagtatgcataactaccattctctgtgtttctcatgcctaaatacaacacatcggaaccggccacctgccattggtttcgaatcaacccatcaacctgcccattgacgccaggcacactactcatcggttgaatataatccctcagtgaatcataatgcccaccagacaagtcataccctccttggaatctatggtcatgatggtaactttgtgatcgctcaaacctgcaagaactggttgaagatcccaaatcatcatctgcacccagatccccaggaaaagtgaactgtcgattcagcaactgtggtccattattcagagactggaatgctgaacttgccttggccgtcttcccaataccttgttcatcatcaagcaggtcatttatgatatcaatgtgtgggaactcatccaccaaatacccttggttctgacgcccagatgtgcaggctgggaactcggttgacatattgcccatggatctactgtgtactggcctgtacaagtcatgattttgaacatcattaagcccagagggttgatcatagtgcatgcttctgctcgattccctttgagaactctcaatccactggggaccattctgtaaaacatcctgtgtaatcatggtaaaaggaacaccagactgaccagcactagtgtccaatctgtcagagctctgggataaaaacattgatgacacgaaggaagatggttgagaatagccaggtgatgggatcactcctgaacttgaggagctggaatgggccagactagcagcagttgaggccacagggttccccatcattgcatttctgtaggattgaggaacatgactatgagtagctggtgagggatcaggacccaaccggccagttgcactcactgagcgtgcaagtagaggagctgtttgaaccatagaaacaacaacaggagcagttggcctgggaccaggaactaaaggagcacttgaaggtcttgacatcataggcacttgtgccacagatctttcagatagtcttgcagttgaaggcttttgaatctcagttttggacacagctggaaccggtgatgcagaagtaaaaggtgaagatggatctttatcagtctgttgggagccacttgaagatgttttcctgacatgaacaggatctacagtagcactagtcttgtgttctaacttcatttgaacagaggacaagtttctgggaggactaataggcgaggatggcacagttgatatcttctctttctgtaggctttcgttgtcaacaggtctctttgtctcaaccaggtctttgatgcccagtttattaagtgaaagaacctcctcttcctttctgacaacatgcttctcagcccacttcaaccgatcttgtaaggagattacagcaacctcggactcagatttgccaatcttaccatttccagactcatcattaaaatccccagcatctgctgcagaaccagatggctgactatctatttcaatcgtcaatctacccacattagatgatgttttgccttggttcttacctctgctaggtgacttttggactttataatttgaaaagcagtttcccttgtggggatcattcatgactactgacggcaaagaatcagtagaacatgttgaagaactatcatctatcactgaactgctccttttctcagacgttccattttgtatggttgaaccactacctatgccattgtatctagcctcagttggaggattaacttctgatgcatcagtatcccaattaacaggactagcatctctgtcttctgaatcaagctgaagcgtttcagcaactccatctacagagtcggacacgtcagaaacatcttccatgggatcaggcttttcagacacagcttgagcctcctccgtcccggggtcatttttctcatcaacagcattgttttggttcttgtcagttacagacacagcagtcctctcctccctctctttatcctttcctttttggttgttacgtttttgtttggcctgttttttcttggacttcttttccctctcacccccacgttttgctttttgatcactttcagcttgccatgcagcttcttcttcacggatgagttcttcttgtcttttcagagcaacagcttcc

SEQ ID NO: 2124 - DNA, 2666 bp, Glycine max
tcgcgatctagaattttttttttttacattctgaaaactaatttccagaaaaatgatatatatttggggggaaaaaatggcggaacacaattgcctaagaattaagaagtttggaggatattttttcagtactcttacagggactagtagatggctgcagtgtgcttcgcaacaagcaaggagaaccatctcagcaagggaagatgaaaaatgattctgccgaactctccctattttccaccattgggtgttggaatggaacaaaacaaattgaagataatcccaatatggattatcctcaacaaaacttaagtttctagagcaattagattgattaaggatcttagtactgtaaatatatttacaattaacggcactataattatcgattgtacaatatacatggccttagaatctcgctcaatgccgtcttaattctagccggggaagtgaaagaatgtcatcattttgatacatttaacacattataaccaacaagcagcattttatgaaaggaattgtaaaatgaggacacttcatggattagctgcaaaatgattaaatattgtctcgagagttgattggctgatgctgtactctgcaatccctaatctatttctgtttctttcaagaagtccaaaaacatctgctagggaaaaatcttcattatatggtaactgatatctgatgctcaaaccattgcacccttggcatcttgccccacgaaatgaagagagaataaaagaatcaatttctgagaatttttgtttagacagccaccactcagaaaatactggcaatggaatgccaccatctcgaaacagttgttctgataactgttcctgagaagctccatcacagacaggtgtaccagagattagtgtttttactctttcttcattgtcaagccagcgcccaattaagcctatcatttctcgtgtcaagctaatctccgcaatggatgtatttcctgatgtgacggagtcagtgcccccaatgcaaatttcaaggtcattaagtaagcttctaggatgagaagggacatcaagaagtctttcttgaatagcttggcagaggttttgcaagtctgcagaactcacttcagtaggtttgacctctagttccagatgattcccaaatcttgtttttagatgctgtggacttccaatgcatcgtaatcgtccaccaaccattatccctattctggtacataaggcttgagcttcattcatgctgtgagtagtaagaattactgcagtctttcctcgccttgttgagatcctagatattacatcccacatgaaccttttggcaatgggatccatacctgtggatggctcatcaagaatgacaataggaggatctccaatcattgcaattgcaacagacagttttcgtttattccctccactaagtgaaaatgatggtttattagcatgcttcaataagtcaaattctgtcaacttttccataacaacattgtctattgcaaaatctggaacaccttttattctagcataaagctcaagatgttctcggacagttaagaattccaatagagcatcaaattgtggacaatatccaatatatcggcgagcagccttcggatgggaacatatatctttgccaaaaataaaagcagtcccatcagaaggacattcttccccacatagcatagaaatagttgtggtctttccagctccatttgttcctaaaaagccaaaacattctccttcctgaactgagaaagttaatgaatctactgcaacctttctcccatgatgcttctcctcaaaatataccttacggagattgcgaaggtagataatggaattgtcaagggaacctgaaagtactctatttctctctgttttcacatctacatcttcatcgaagtccatagcaacagtttcggaagatgattctaacagaggttccaaatagggattattatgctggaagatattaatttttccccaccacttcttgatcatgaatgaagtcaaattgagagaaggaaacatttcaagtgcaagcgtcaacagaaagtaactaaagctctcaacagcaagataacagatggaagccccagtaacattccaatcaaacaccccatcacttgttttatctttcattccttgccgtaaaagagctagtgaagcaagaccatcagcgaaacaaaatccaggagatattctgaaaaaattcttaagaaaagaattggcactcattgttgatggcatgagtcccataatgaatgagataaccatcagtatcaatccagagaaaaagtggatcaagagaaccacattctgcgccatggtatggtcaaaaaagaaaaatgtaaggcaataagttgatgatgcgattgcaagtccatattccaaaagcatgaggattgttggtaacaaagaaacccctccaacaaactgatccagaccaaagacgtaaaagagaactatggcaaaagaggccggaaacaagaagctcacgaagtcccaaataaatgtagaagcccaatatgacaggacagaaaccccactgttcggtcgcggcggcttagctttcacttcacgttccttaacaattgaaacggcaaatgaggcaggtataaaagagaaagcaatattgacaataactgcagcagagaaggcatccctcgagcc

SEQ ID NO: 2125 - DNA, 1498 bp, Glycine max
tggatctctccctctctgttcttttctgtctgtctctttctctttctctctcttcggggagcgagatcaatcagctacagcttccccccacaaaaaccaaaaatcagataacccagataaaaacaactcccaaaaacacaaaaaaataattaacacaattaaaaaaatatctagagttctgaataacaaaattccctcttcgttttttgttttctttctctttcaactttttccttcccaccaaacacacaccattcccgctcctccattctttcattccaagaaagtcaggattcaactgttctcagattggtaccagctggtgcaccttttttttttcttcaatttttttcgaattttttttggttcctaattttatccggagaagctaaattttccgggaaaatttgtgttttttttttctcctccttgcgaccttcgccgccggctgctattgatttgtcaaaggcaacaacttcgaggtgttttgcctgatttgttgatcctgcggagaaggtgcttggaaagagggaagggaaggcagagggaatgttataataaatcccaaatttccaattgatgaaatttttatgttagttgatttcttttatttggtgaaacgttgttggtgatttcaagttgtttgagggttttgaatgcattttgatctatggcttcggaagtagccccatcttccggggatttgttgaaatgttgcaactgtggatgcggttgctccttggtagctcattcttcggggacatggatgcgatccgttaaacggaagcttgatgagttcaaaatggacggccaattacccattcctgcgattgcgcggattgaagttgagaatgaatgtgtggccttacgcgagatggtcagcatgcagcagagaaccattcaggatttgaatgctgagttggaggaggagagaaattcttcatccacagcggccaacgaggccatgtcgatgatattgaggctgcagagggagaaggcggaggttcaaatggaggctcgccaattcaagcgttttgcggaggagaagatgacgcatgatcaggaggagcttctgtctttggaagatttgctctataagagagaacagataattcagtcacttacctgtgaagttcaggcttacaaacacaggttgatgagctttggtcttaccgaggacgaggctgagggtgatcaatatgaacttccaacctatgaatatcctcctttgaagtgtaatgtgatgcatgatgctatggatgctgataatgatgacactgatatagagaaatatgtgtttgatgaaaccccaagtgaccgtttgaggaacttggaaaataggatttctaaaatggagaaaacctcaacttacagtcagatagatggggattttacagggaaaaatgttctagagaaagtgatcgttggacagtctccaagatggacttagcctcctaggagatcgtccagtgaccccagcttctttgtgcgggatggg

SEQ ID NO: 2126 - DNA, 1217 bp, Glycine max
tttcaaaagtagaccaaatattttcttttcaatttccgaaggtcatcaaatcaaaaggggcattacaaaaatggtaaaatatgaacaaggcaatgcctctttaccaaaatgacaaaaccccaaatcaacacctatactttgttttcagttgtttctccacaaataatctgtgcaaaaaacactatccaaaaacactactctaccaccctatatgctgctactcctcctagaattagcaacaaaaaaaaaagcagtaaaatttccatcacccattgctgctgcatcatcatcactagtcaaacttcaaaccaacaaaggcatcatcatccccttccgtgaactccaactccccatcttccacatccaaatcgaaatccgagtcgccgccatcgatcggcctcctcctcctgtttccagcaaccttgttcgccacagtcttcaccctcatcctcctcttctcacgaatgccttgttgcaacccttcatttttcacaaaccctccatcatcattatcatcatcagaaatgtaaacaaattgtgcaatattttgtccacccaaaccattgttacccttaacctcgtaatacatcaatggcacactcgcttcacacgagtagtactgccggagctcctcaccctccacgacggcgtcgcccgtcttggttggcggcttcacaggcacgccctggaaggccttcccgcagacttggcacaacagcgcgcaatcctcgtaccttttctcgtactcgaagaggttccagcagtaggggcacgcggtccaaaacgacgtcgtcgtcctcctagggtttgcgtttgcgttttgctcgcggtcgtggcgggtgcggcgttcggggtgggagagcacgtgccaggcctcctgaacacgtgcgagggcctcgtcggagaacgggagcttatcggggttcgttgggtcgaggaggagtgcgagttttgcgtactgccgccgcgcgaggtcgcggttgccgccgtcagaagggcggagctggaggacggagtagaagtcggaggcggagaggacgtcggctacggcgaggacgcgggcgacgaagtcggagggagggaggcgacgggcgaagtcacggcacgcggagaagcggcggagggagagcatggagagacacgtggcggtagggttttcgggttcggatcccctgagcggatccatttgcgtgagtgtggtgtttgttgttgcaacg

SEQ ID NO: 2127 - DNA, 2176 bp, Glycine max
atatgtaactagctaatcatattaattttttttttgcagagaagacaattaattagtacaagctacttcaaataaatttcagtgactacagtaatcaaagttaaatcccatggttccaaaaacttcctcaagtgcaagcctgtgcagttatagagatagcatgacaccaattcatgaatagagtctaagcttctctagtttccaggtacacactatataacctaccttatgacagcaaaagaaaaaaataataacagacccttttctcttctcctaacagaaataatatgaactttaccaacaccttcaaaccccagctactcacacttgatggaccggtatatgtgacgaacaaagagcagggaggcacggaatcctacgctaccgagcatgaggaagaagccatagcagatacaggccatgtaaccaaagaagaacgaagtttgcataaaaccagacatatctgatcgtgcatagtagtaatacaagcaatagccgtagatgaacaagccagttgatccaccacaaaggaaagacctccaccaccattcatgatcctcagcagcaagttggaagtatgtcaaagccacagtgatgaaagcagtgacaatcaacagaataatgaagacaatgaagagtatgctgtagatcgtataaattctgtggccccatacactggcaaaaatgtagtacagctctatgtagatggcactaaaaggaagaaatcctgccattgccatctggggaatggtactcctgtaccaaggcagaggtggaatctctcggggatattttgtagtgcggacaggtgcttggaactcagttttgctatttttaccagcaataccacccaacacaagcaatggtgaagttaccaatgtccatattaggacaatcaccacaattgtgccaaatggcagggcagcagttgcactataagcaatcgcaactgtgttaaggaaacagaacataaggaatagggggccacaaaagaggcatcctgtcagcaataagttcctaacccaattagtcccttcaagttgaatatagaaggaagtagcagtgtagccagcgatgccagatgtgagagcatatatgaccaccagtgcagtaaataaagcgcctcggttatatggataaaacacaccaaccagtgcaagcataaaaatgaagattgtaagtgtgaataattgagtaccagaaccaagggctgctgaaaagaaagacttgaactttggaaaccggaaaacatccccatgaatgtacttccatcctgtctcctcttgatcatcagcagcttcctcatcttgagcatacttcataaagtcattcttcaatacacgcatgagaatggttgccagaaaaccagtcaaaagaagaactgttacacaggaatttatgattgagaaccagtgaatctccaagtgatgtggcaaagaagaagactgggagtatttatccattctcttctcaaaaggagtctctgtttccttccattttgcagtgtacacgaactcaacatctacatctttatcctcagtcaggtccaccacagaatgagggtccatccgggcactgatttcaatgactcgatctttgttgtaatgaatatcgaactgaatgtgcttgtaaagaaaatacttgtactcactagggtcagttttcccttccttgtcaaccgtcccaataaatccccagatcggcaagtcatcatagtacatctggaaataatagtccttcttaactgcttctcggaactgagcaacttgctcctttgtgagcttcctcttgcatacaaccttagagtctttctccttcttgaaactaagttcataaggagcactaacaaggcgatcgccatttaacacctcaccgagggcttcagtcttatctttctcatgacctgttacacagaatggcaggtcaaagtaccgatacgtttcactggggttgtgaaagggaccgactttgttggcgtaaagaggaacggagtctccgtccttgtaacgatgatcggaggcatcggatctaacgtggggggttccctgcaaagagatcagaatcgcgagaaccaaagccaaagtgctccttcccattgccgctggcgctgcactctcgttcgttcttcgcattcagatcagatagataaagaaaaagagcgtccgcggacgcgtgg

SEQ ID NO: 2128 - DNA, 1727 bp, Glycine max
ttttttttttttttttttgccacgaacaaaaaagttggctttttctaaataaaacctttttaacttttcaagtatatatacataaaatttaaatgttatcactcgtacaaaatcacttggctgataataagactaacctgtagggtccaaaatctaatattgtttctcctcttcactgccatcatctccatttgtcttatccccatccctgatttctccatcactcaactgcatatcagcagagttttctcttgctggacttgactgcctttgtattaatggttcgtcatcatcagattctgataatgcttgccttcgccgggctatgcttgaggaaggtgcaggcgcttcctcatctgcatcggaatcttcaagcccagctgctgcaagaagaccctgagcattttcctcagcatcatcattcatctgagtttggggctcctctctgtagtttatgtcagcttcttcatcctccatttcctgttcatccatcatatcattttcgggttcctctgtgtcatagcgcgattttgagtgcttatccttctttctccgctttccacctttttttctcttcttctcaccagtccctcctccctcttcatcatctgatctttctctccgttttgaatgactgctgctcttccattgctccttaacacgcctaaaatgttcctcctgttgttgcactcgctttagttcatcctcttgttttctcctttccatctgaaatttcctttgctcttcagcctttcgacgggcttcctcagcaaatgcaacctgacgagcaagttcttgtctctgccgtacttgctgctcttcacgttcagctgcttcaagatgaacttttgcagctgaaagtaagtggttgcagtatccaacatgagtgtcaattttcttctcatcaaacccgtgaatatgtaggttggaagcagcagacaactgactaaatacacgaacagcattttgaagctctgcaacagttgctctcacctcatctgcagtcctctttgccttttgtagtgttgatgctgaaaacttttgcattgcaacccctgcatcaaaccttaaggtatagtttgagggcgccaaatgtatggctctcagtagagtttttatacagtcttgccactgttcagcctcgtaatgtgtacgagctaaatatagaagtatttgagagtctgtgttgtgataaaacttccgcaagcaattttgatacattttcacagccaaagtaaaattcccctgagcaaaataaacatgcgccagatttatccaaacatcaggcatctggacaaaaacactaccactggcagcttcttgaacctgggtaaagatatcctttgacacatcaaaatggcccttttcagctaagactaccgcagcaccattggcagcatataaattagaagaatgctgaatcagaacctacaaatgtttgaaaataaaagagatacatatcaaataatacaattccattattaggacaatattttaattatacaaataataggcaaaagcacagacaatgcacaactctgcagctgaaatttagttacaattatgaagaatggaggcagcatggatcaaactcctgaccacttattcatagaagctataataccatatcaaggaccaagtcaacctggtaattaagctgttcccaaatgactttagttgattttctttctaattttctggggggggggcctacgtagctgactcga

SEQ ID NO: 2129 - DNA, 985 bp, Glycine max
aatcagaggccgggcagagcctctgatttagctaaggactatattaagatgcaatttcattgtgctgtttggtgttgttctgccatcacaattagagcttcactcgggtgattaggttatgcagatcataggtaaaactttgattctaattggaaacaacacccaaaacacataaacctgcatctaagttttgttcttaagttaatagctgattgagttgagtcaacatctcccaccagatttcgattgctgctttctatgcctgggctgtgaagactgaatgaactcttcctagtggcatagacttatgcttatgaggtatgacccattctaccaagcagacaaaagattcccattggtttctttgcagtgaatcccccacaaatagcagccttttcccttgaagctttctgagggctagctctgggttgaaacgtggcaaggtgcaatcttctggctgccactcccaatggcgatagtcagaatcattcctcccattcttgacacaagaaaattgtctatctatgtatggacagcttatgtcagagtagagaggctttattgaatggttaaacacccatttcccatttgcaacattgcactcctcagggtcaaaatcaaacctgtcatcaatccatgttgatgcattcacaaccacaacctcctcatctgcttttttgtcactagactttgttttggtggtttttctaggacatggtttgaacttgaaaatggacttggaagagaggaaactgagcctctctacatacaagatagccacaaaaacaagaacacatgttgtgatgacaatgatgggaagaggaagctttcctctgggatacttcattattcctgaagggatcatgggggatgagtaatggagcttaacggtgagaagaaagagttaatgaagtggtgctcaacacaacagaatgatgatgacattgtacaaagggtttagagggggaggttttatgcatttttt

SEQ ID NO: 2130 - DNA, 1021 bp, Glycine max
gaaaacaaatatcgattctttttcatgctttagaacacaattgaaatcttgaagattcatgggggggaaacacaatttaatctgcaggaaacgcccccccgttgtgtgggttgtggaaatttttgtctcctcagctctattagtccaggaatcaggatcaaagaagcaatacctactgtcaacaaacatgtgaattcataaatacattactgaataatgttcaacattaattaggctggttgaatcataagccttgtatggatccacccaaaacatcgaggatttccatgtatcaataacagtgaatctgttttttctttccacttttggctgaatattctccagcatctcaattttggtagtacaattgtgatctaattaatttcctaccttccaagcagaaatgtaactaagaagtgaaaataacaataaagagtaaaggagaagtatattttattggcagcaggtttaacctgaactgaatacatatcatatattaagaaggatgaacctttccagaagagagtcctttccaagctgatttcatggaagcagtggctgaattaagagcagcctcaatatacttcttggaagcaatagaggcacctttttccatcaaatttcccatttttctggctctctcagcagtttgaaccaagccttccatttcattctttgacatcctctctagctcctcttcaaagcgtctaaactcatccatggcactctccatcactgagtcaaggtactcctcagcttcttccatgccagcctctgcttcttccacctctttctcttgctcaagctcagctgctgcccatgccttgtaggactcgatctcgaacagcttcattagatcttcgattgtcgaaggatcgaagttcttgtcttgtagggcctggtctgagaggaaggtgaattgggagagcagagcttccatttttctttctggagtgaagaagcagatctaaccgcgtgtgtgtttttagtgcaagaaaaaagtgggtggggaatatagcat

SEQ ID NO: 2131 - DNA, 1117 bp, Glycine max
gggtagatgagaatgaactccgtcagctacgtaggcccccccccccccaagccttgggactggtggacgtcttggcttttgaaacctgttgatgtctggcaggatgtaagggagcagcttgatgaatcccttcctggaacaggagggggccagaattctaaagacagttttcttgtgaaatttctgtttctgctaccattctgtgctttactcttctgctgctatcattcatttacaaagaatcaagggtacttcagtacactttgcagaagctcactatgtgatcaagtcagacacctttattataggattagatcaaatggaccacttgcatataatagtatttcgacatcaacaaccaattcagtccatcagctcttaaatggtgctcagaacaaggctcctgcatatttgggtggcatttctgtctgtgtctgttttgtggttgcagtggtgtctctgggactagctctcttgattgttcctcggcaagtgatgccatggactggattgcttttgatgtatgaatggacattcacaattttctttatattatttggaggttatatccatttgatttatcagtggggaaaaatagtgggatcacgcgtagcatcttccttgtcacagcctgggtctgattatgattccgaaaaacgtcatcagcgacagatatcatcttgtgatgttgctacatggtactatggtttagggatggccctgttggccattgcagctccatcgttgccttgtctttttggaattactgccttgtttttaaggttaggtttgatggttgttgggggcataatattggcttctttcatgacatatgcttccgaacatcttgctatccgatcatttctcaaaggctttgatgagcgcgaaaatgctcgaaatagtggctcatgtttcttatgttgatttgattgtgacaattgcgagtggtgatgtaaactatggtcgatattttcttcccttttcagcttacatatgtaatgctgttctagtggaaaatgtatttaatgaatttttgtctatcttctaacaatgtattttgccgaggttctgttgtaatattattgttattctttcaaataaaaaaaaaaaaaaaaaa

SEQ ID NO: 2132 - DNA, 1569 bp, Glycine max
tcgagtcagctacgtaggccccccccccccctttgtgtatgatgtttatcctcaagaaaccaagttggatccaaagtcattgaagtgtgctcgtgggttattctaggacccaaaaggggtatcgctgtttctctccagatcttggtttccagttttttaaacaaacatatccttgccatcctaaataggtgtcacttgaagctgaagccacatgtgaagctccaccagaggatctaccaatacctcttccaacatctgcagatcctccttcataccttgatttccctattgcacttcgtaaagggtgtactatcggatggcactgtagtagcagttaagcagctttctactaggtcaaggcaagggagtcgggaatttgtaaatgagataggcctgatttctgctttgcaacacccttgtttagttaagctctacggctgttgtatggaagaggatcaattgttactgatttatgaatacatggaaaacaatagtcttgctcatgctttatttgccaaaaatgatgactctgagaaatgtcaattgagattggattggcaaacaaggcataggatttgtgttggtatcgctaaaggtttggcttaccttcatgaagagtccaaactgaagattgttcatagggacatcaaggccaataatgtgttgctggataaagatctcaaccccaagatatctgattttggattggcaaagcttaatgatgaggacaaaacccatttgagcaccagaatagctggcacttatgggtacattgctcctgagtatgcaatgcatggttatttgacggacaaagcagatgtttatagttttggaattgttgcattggaaattgttagtgggatgagcaacaccattagccagcctacggaagaatgtttctctctcattgatagggtacatctcttgaaagaaaacggtaatctaatggagattgtggataagaggttgggtgaacacttcaacaaaacggaggcaatgatgatgatcaatgtagcccttttatgcaccaaagtctctctagcactcaggcccaccatgtctttagtggtaagcatgcttgaagggagaacacgtattcaagaggtggtgttagacaaaagagaggtattggatgatgacaaatttgagataatgcaacagtattatcaacacagaggagaaaataacataattgagtctcagaacctaagtgaccctacgggggaatcttctaaacttttcgctgatacaagttcttctggtgagcaaattgaaagttagagaacttatagaaatgaacatcttgtcgttgctctatatatatttagtgtttggcacaacttattttgcaaaaatgaagatacggttcttgtatctaaataagtaagggtttgaacaagtttgcataaccaattgtaatagaatttaatgagtggaagaatacttcgttttcaacggttgattctctaaccattaagaccatgtatttccaaatagatccatgaaaatttgtaagaataaatttcttaggtagaatgaaaaatcaagaaggcctttttcctgtggtcc

SEQ ID NO: 2133 - DNA, 1079 bp, Glycine max
tttttttttttttttttttttttttttttttttttttttttttttttttttttcaggaaaggattttttttcatttaagctttatgatctgagattaaaggagatgatgaaactcttgaactaaaagcatcagttcacatataacataaattacattcattttctactacttattattccactctgatcaaatacataaacaatttcatcaggcaaatcatacatagcaggtatcgcgtgtgaattagcccactactgaagcagccacctccatgaatttccttcataaattatcatcaagtatggtggacagcaacagcccttgaacaaactcgcatctttttgccttctcctccttatccttaactgacaaggttgatgtctccacatttcttgttgatacagtctcatctgagcattttttagatgatcttgtctcagtgtgtaagtgaggctgagagctggcatgttcattcgctaaaggcaatataaatgatgacaacagtggatctgcattagatgaggacactatacatgaagatccgccaaaaagggattgcaaatttccttctcgtagttccttcctcaataaagatagtgttgaatacgatccacctttccgtgatttccttttgcgctgcatcttaaatatactcccatgttgtagggttatatgtgctaccatatcaacccccaccctcaatgcacaaactggacataccccattttttgcctccattggatgctcttcatcaatgtggcagcataatccaacgatatcaaaatactcagaacaaaatgggcagagaaactcctctcttatatcatcgtccccatcattttcatcaaaacccatgaacatgtctgatcgagattgaagagcggattggtagcgcctggaagcggaagagagtcgagcactccaagaggaatcaccgtccatggctggtctctgtttgtttacgatccgattgtgatctcgattagggttttggtttagaaaccgaaagtgagagagagaaagatgtgtaagaacaatacaacgatgccgctgaggggaggacagaaggagcaaagag

SEQ ID NO: 2134 - DNA, 2021 bp, Glycine max
gatatcacaagaaagccctaaataaatcaggagataacatttccggggacaaatgtgaaaaacaaaataaaaataaggatgaggatttgatagttttcaatatttccaagcaccctgaagaaaatattgaatgacagtttgagacaagacatagtagctcaataataagcttcatttgctctcaaccctcacattctttcaagctaaagggggtcaactcccataagttaacataacatcataaagcagcagatgctttgaaagaaggaacatctataagaagaaactaagaaatggtgtaaagggtgaaggagaaaaagaaaattttcactggctctaggctttgccattgggctttggtgatggttggggaaactgatggtgatatggagatgcataagtaccatttggtattgaaaggctcctttgctgctgtccattacgggtgagcaatgcaccttgcattcgcccgtttcttgtgttcgggctcgctccaaatcggtcagcttgcattgcctggaaataatatgaagagcttgccatgtccttgaggcttggcaaaggctttaaagcttctacaacttcactcattaggggtctggattttggatctctactaaggcagtgagcagccagctgggcagctttctgagctccttttaccgaaaaatgaccttccaagcgagggtctatcaacctgtagaaccttctcctctctcctagatgtggccgagcccattccacaaggttatgctcaccgttgggtcggtgtttgtccatggatcttctgccggtcaacatctcaagtagtaccactccgaaactgtacacatcactttttgatgtaagatgacccgtcatgacatattctggtgctgcataaccataggttcccatcactcgagtagacacatgggttttatcaccttctggaccatctttggcaagaccaaaatctgagagcttggcattgtactctgcatccagtaatatgtttgaagttttaaaatccctatatattactggtcgttcagcttcttcatgaagaaaagcaagacccttagcagctcctagtgcaattttcattctaatggaccatggaagaggaatggatctcctaaataagtggttttccaggctaccccgaggcatgaactcatacactagcaacctttgatcctcttcaatgcagtaacctacaagtttaacaaggtttggatgaactaggtcaccaagaaaattcacttcagccagccattctttatgaccctggagcccatcatggtttagggtttttacagcaaccgtaagtcctgtgccaggtttcactggagcagttccattttcttcaatccaccccttgaaaacacaaccaaacccaccttcaccaagaaaactttcaggtcggaaatttcttgttgctaacttgagttcattgaaagagaactttcgcagcctggaagcaattttaagctcttcttcaagcttggaagtggatgatgaattgctttcagcattactagtggttgtagaagagactgctggggctgttggttggtctctactagtatcattagttgatttactttcagcataatgagtactggtgccactgccactgactgaggtatcaaccttggatcttgaagaaatgcagctcccaatgaacctcaacctaacccaacacccagcctcagcctcacccccttcatcccccttcttcttcttcctcccctttgatttacacacatcccaagactccaccaccttgccattctcagcacccaaccccatctattatctctaccaatcaatgatcaatcaatccctagaaacccagataccatcaaataccaaagaccacaacccccagatgggaaattcccagatgaaacctaaaaatcacaactttacatgccaacaacccttgaaaccgggtaacccacaaaccccagaaattgaaactgagctgaactgagtaatctccgctacataacagatatggggtcctctctatgcag

SEQ ID NO: 2135 - DNA, 1203 bp, Glycine max
  misc_feature (1177)..(1177): n is a, c, g, or t
tcggcggccgcccttttttttttttttttcgatatcacaagaaaagcctaaataaatcaggagataacatttccggggactaatgtgatcgccatcttgaaataaggatgtggttttgatggtgttcaatatttccaagcaacctgaagaaaatattgaatgacaatttgagataagacatagtagctcaataagcttcacttgctctcaccctcacattctttcaagataaagggggtcaacacccataagttaacataacatcataaagcagcatatgctatgctttaagagaaggtacatctataagaagaaactaagaaatggtgtaaagggtgaaagagaaaaagaaaaagaaaattttcatcagctctatgctttgccattgggttttggtgatggttggggaaactgatggtgatatggagatgcataagtaccatttggtattgaaaggctcctttgctgctgtccattgcgggtgagcaacgctccttgcattcgcccatttcttgtgtttgggctcgctccaatgcggtcagcttgcattgcctggaaataatatgaagagcttgccatgtccttgaggtttggcaaaggctttaaagcttccacaacttcactcattaggggtctggcttttggatctctactaaggcagtgagcagccagtagggcagctttctgagctccgtattaccgaaaaatggccttccaagcgagggtctatcaacctgtagaaccttcttctctctcctagatgtggccgagcccattccacaaggttatgctcaccgttgggtcggtgtttgtccatggatcttctgccggtcaacatctcaagtagtaccactccgaaactgtacacatcactttttgatgtaagatgacccgtcatgacatattctggtgctgcataaccataggttcccatcactcgagtagacacatgggttttatcaccttctggaccatctttggcaagaccaaaatctgagagcttggcattgtactctgcatccagtaatatgtttgaagttttaaaatccctatatattactggtcgttcagcttcttcatgaagaaaagcaagacccttagcagctcctagtgcaattttcattctaatggaccatggaagaggaatggatcctacattaatttccacatgagaacnggggggggcctacgtagctgactcga

SEQ ID NO: 2136 - DNA, 1966 bp, Glycine max
gtcaaaaatcaagcaaaatatctttaacaaacattaaaatatctcaaataagcagtcgtagtctgaactttgaaacttacaaatcgcatgcacctcacaggtatggtacaataataaccatgatcagagcaacaatgtacatatataagcctcactcacttttacatatgcatggtcccaacagtcacaaccaaactgagcaccttcaaatttggggaagcagaaaagggaggcaaagaatacaaagagtcaagaaatataaagagggggagaaaaaaaaaaacatataaaacggcgcggccttgctcctatgacgatttcattgtaatcgtctttgaagcttgtcggcacacttcgccctcaattcacctcagccattttctctcttgaggaggatgtacattgtttcctttggcactctgctgtgccttagatgttgatcgttggatgcggggagaaacttgcctaccagtggcaccaggtaaggaatgtctcttcttaacttcgatgtctccttcatgcacatctggacttgatcttggagagttatttgcattaaccttggccctagcagattcggtagctagcatgaaatggggaagagaattgttgttagtactattatctctaggttcttgatcaatgtgatcaggctttactaagccaaaggaattgcgcctctttccattctgctgatctttaggcagttgctccctactgtctttcgagcctgaatcatgatttggatttgtaggtgatttgttactcaatgataggctccgacgtttattgccagatctagtcttgttgatagtgctatctttaggtttcacagacacttcacttgaaggcgttccttgtgattcagggacagttaaatggcttctaggtgaagcttctggagatgatcttaaatcttgcagaacagactctggcagctctctctgcaggtcaggtgcatttttctcagtcttaatagcaggctcttcagagtccacagctaccactgagtgacccaaattggcactaatgtcatcaacaatctctgacttatccaaaacagaagtagctaggttagaagctgggatgacacgtgaaacattgtcattggcctcatcatcatggtttatagtgttctcaagattaccaatcccttccattaaatctttggcatctcgttcattttccatagcgccaggctctgatatgtcaggtgaatcaagagtggaagaaatagagagttcagtgccacattcagaaccagcaaacctagaaagataagcagcaggattttcaaatgcaaactcttttgatctatatgcagtatcattgccaacagaagaggtgtctccttgtgattcaacagctgaatcttggtaggacaaactgcttgtcctaacagaatttgctattgaactaagctcttcaaattttgactgtgcagcaataaatgcaggattactgacctttcttgaaccatttacaggtttctttccttcagcctctaattggtctgaggcaaatcttttcatggatcgtatgccctgctcaccatcaatttcaggcttctgattaaaataattaggctctgatggtggggcagtttcaggacccttatgaagagagctatgctctgatggtggggcaatttcagtccccttctgaagagaatgatgctctgatggtggggcaatttcaggccccttatgaatgaaattaagctctggtggggcacttgcatctgatgctgatttttcatttaggaaggaatcagcttcgtctgaggcaactttagcatcatatgcaattctttcttcaggaggaacctgtaccaagtcatcttttacaatagatgatgtggagtagcttgcttgaaactcaaagtcattagcatcataagtaattaacttttcttcatcctcagatggcagaagtgaatcttcaacagtgagctctgagtcagggg

SEQ ID NO: 2137 - DNA, 709 bp, Glycine max
ttttttttttttttttttcttgtcaaaattcaagcaaaatatatttaacattaaaatatctcatacgcagtcgtagtctgaactctgaaacttacagatcgcgtgcgccttacatgtatggcacaataataaccatgagcagagcaacaatgtacatatataagcctcactcacttttacatattcatgttcccaaccgtcacaaccaaactgagcaccttcaaatttggggaagcagaaaagggaggcaaagaatacagagtcaagaaatataaaaagagggagaaaaaaaagcatataaaacggagcagctatgcttcaaagagaattaaaaaatgaaatcgtagaagcttgtcggcacacttcgccctcaattcacctcagccattttctctcttgaggaggatgtacattgtttccttttgcactctgctgtgccttagatgttgatcgttggatgcgtggagaaacttgcctaccagtggcaccaggtaaggaatgtctcttcttaacttcgatatctccttcatgtacatctggacttgatcttggagagttatttgcattaaccttggccctagcagattctgtagcttgcatgaaatggggtagagaattgttgttagtactattatctctagattcttgatcaatgttatcaggctttactgagccaaaggaattgcgcctctttccattctgctgatct

SEQ ID NO: 2138 - DNA, 629 bp, Glycine max
  misc_feature (598)..(598): n is a, c, g, or t
  misc_feature (612)..(612): n is a, c, g, or t
  misc_feature (614)..(629): n is a, c, g, or t
gtgttcgtccatgtgtcgttcgtccggcgagaagacgacagaaggggacagcaaaaacaattaataaagatgagtttgaagaacaacatggtggtgctaaaggtgtgtttgttgcttcttttccttgtgggggttacagctgcacgcatggaactgagcttcttcaaaagtgatcagtcatcaagttatgatgatgatgagtattcaaaaccatgctgtgatctctgcatgtgcacacgctcaatgcctcctcaatgcagctgtgaagatattaggctgaattcatgccactcagattgtaagagctgtatgtgcacacgctcacagccaggacagtgtcgttgtcttgacaccaacgacttttgctacaaaccttgcaagtccagagatgactagaaaaactaatagctctctcaaatggacgaagcccctttaggctttgtttgttatgttaggggagacaaataaaacaagaaataaaagctcagtggccagtaatttgcttttagcaaatttggtcatttttattattcttattttaacaaaaaaaaaaaagaaaaaaaaaaaaaaggaaaggaaccgaaaaaaaaaaaaaaanccaaaaaaaaaaanannnnnnnnnnnnnnnn

SEQ ID NO: 2139 - DNA, 1602 bp, Glycine max
atttgcgggaaaagaaggggaaaaaaaaagttgaaaacactatgatgatgatgaaaagttttgttctggcaactggttggagaacaaatattggagaaagtgaaaatctgggtcctatgggcgttgattgttgttgaattgacttcctttttgaacccatatcacttgttataaacaccaaccaatttctctccttcttctcatctacttttctcactgctttcgtgttttttttccctctctctttgtagcacaacaacatagttattagttaatacttaatagcctctgttttcttcttgctaccaaaatctcacaccttcattacatcatcattcataaatggctcaccccacctcatcatcaggtcaatccaatgatctcacaaaagaagattgcaaggaaacaagttcagtggttgtttgcttcggggaaatgttaatagactttgttccaatggtgggaggagtgtcactggctgaagcacccgctttcaagaaagctcctggtggtgcacctgccaatgtggctgttggtatctctagactgggaggttcatctgctttcataggcaaggttggagcagatgaatttgggtacatgttggctgacattttaaagcagaacaatgttgagacttctggcatgcggtttgactctaatgcaagaactgcattagcttttgttacacttagagcggatggcgaacgtgagttcttgtttttccgcaatccaagcgctgatatgctccttcaagagtcagaacttgataaagatatcctaaagcaggctagaatattccattatggctccatcagcttgattgatgagccatgcaagtcagctcaccttgctgctatgagcattgccaaaaactctggttgcattctatcatatgatccaaatttgagattggctctatggccttctgcagactccgctcggaaaggcataatggatatatgggatcaagctgatgttataaagataagtgaggatgagattacatttttgactgggggtgatgatccttatgatgataatgttgttttgaagaaactttttcacccaaatctcaagcttttaattgttactgaaggttcacagggttgcagatattacacgaaggcatttaagggcagggttgcaggtgttaaagttaaacctgtagacacaactggagctggcgatgcatttgttagtgggattttatactgcatagcttctgaccaaactatttttcaggatgagaaacgtcttcgaaaggctttatattttgccaatgtatgtggtgccctcactgtaactgagagaggtgcaattcctgcactacctacaaaggaagctatcttgcaattcttactagaagcagctgtaatataaacagtattgacagatttttgttataattggttgttaagctatagcttaggtgatgctgtattctttttcctttttaattaaaatttttggctatgtaattttcttatataaattcaagttttcctttgctctcaaaaattgggatgcgtacagctgagttcacgaatttcctaggtttaatatttgtaatcaaataaaaggtattcagttttaattaag

SEQ ID NO: 2140 - DNA, 1757 bp, Glycine max
acagatacatgcatcatgaccatatattgaccaatatcaacgaacaatgcaacttgttcacttttaaacatatcaaatacagtacgtactataaattttattgtcattgttagttatagaaagacacttgataacgaacaagtaacaacagtttttcttaaaagctatggagaaccaaatagatgattccccaagtatcacctttccttcttatgactctcagtcacacatattctgaacaagtagaaaagcaccataaagatacgtaatctaatttatctaaagggcattccagtcccttccctggtgcagattaggatacagccaagtcaagttatcgcccctcttggacggtaacacaggatatagaattaattgccacaggaatttaattaaaaaattcctagacattattgtcatgacgttccacagttctgacgcactttgggtgcacttcatagccacattggagacactggtaggcccaactagacccttgctcatcacatacgcagcaaataaagggccctccaccgtttccatcagacaccaaattcagatcatggcggtgcccttcatgatacaccaatgccggaagacccttggcctcttcctcaagctgtttctccagctcctccactttggcgttggtgaaagggtacgcattttcttggtacaagtttatcaaactcctgccatgtacggttattgttttaccatcagggcctatgatcaccaaccagggaatcccttgcacgttgtagtgtctaacgaggttcttgatttctgggtcaccgaaaggtaaggctaaccaaggcatggtgctgtagtaggagtcaaaggatgcttggtcgcggtcgctggatattagcacaacttcgaagtcttcctctccctttccggctagctcgtgctttatcttctcgtaaacagaaatcagttttggagtgaacttggcgcatgggacgcaccattccgctgagaagtagagtccaattgttttacccactagccaagcaacaggtacctttttgagtcccgtgtgagtgtgactcaaaacatagtctctatggtggtttgctagtaaattagtgagagtctgattatcacgcttcactttgtcttccttttgcagctgctccaacctctcgttactgaatggataagcttggattccgtaacggtaaataagttcaaccccgtcacgaactgttacgtgctctttacgatcatcaggttgcaacaaaattaagcacggaacggcttccacgtcgtactttctggtcaaggatttctttgtttccaaatcggagaacggaattgcaagccacggcatgtttccatagaagctattaaaggcatccaagttttcatcagaggacacatacacaatctccaattgagggactctgcttttcagctcctcgtagattccaactaggatttgggtgaatccacggcatggtgggtaccaattcgcagcgaataatagacccactactctcccttcaagatcagaaactttcacctgagccccagttggagagagaagataatcacgatcttgggaagcaagtaggtgtgagaatttgccgtagttaccattatcattcagcacaacttgggctccatccttcatctccgctttctctctctcttattctttcttttttataaggtctgagtactaatctagagatgaaagcaccgcgagaggagtgggggggggggggggggcctacgtagctgaggtacct

SEQ ID NO: 2141 - DNA, 1708 bp, Glycine max
aattaccaataggaacagtgaattttggaaatgcagtgtagaacgaactttatatgtttttgtaaaacagtagtaggctatctttatttttgtaaattacacttccaatttgaatagacatctaaaatagtaaaatactaattaaagcttaatataattgttttcaatcatccacttgatgctccagaagttagagtcacatttgtaggcccaataagcccatccaaatttggcacgagagtatacatccacttggacttgcgtaaatttttgttggtcaatctttgatgcactctgaactttccaatcactactccattccccaacaaaaatgaggggtccattagatgtggtgagagagctaagatctgagactctttgctttttaataaaatcgatgttctgctgcacattcatgttggagaacctatccgaaaagagattgtagtagtgcacatcaatgaccactccgctgaaagctccagcaaaggacaaaagcacttttgaatctctatcaagagggttagacattatcacataggcactagaagtgtgtttcctcacagcatcataacctgcttgataatagcttttaaggctttccaaattaactccctgaggctcattcattagctctattgcaactagacctgaactgttagcatatctttcagctagaaagtctatggctgccacagtgtcagatatgtatgaatcatcccattctagatatccatctcttgaggcactgtgaggtcttccattttgtgagcctggagcagcatgcaggtccacaattaccttgattccatacttttctgcccatgtgaaggcattatccaacacttccaaggatcccccaacaaatggctttggtggtgttgggtctagggttgtccaccatcccacgggaattctcacagcatttaagccattttctgacatgaacttgaaatcatcttcaatgatatacgtgttccagtgatccctcatgattttggtagctttatctgggctataaccatttgtaatttggtattcgcctcttataatgctgccactcaaaacattcattttgaagattgaaggatcactatcatcccaactggatccttcataatttgcaagcaccacagtctcagatatggcctgtaaaaactggccatttggtgctctaatgcgaaccctgttagggtcatcatcattcctcagaatctcaaatgtttccaagtcgctaggtgaatctgaatcagccactaaattgcttcctccatctcgatttgtcaatcttataaattgcttattagaaactctaaaattgaaggtggattcattgaccctccacaacctgaaagtttcccaacccgaagctttggtgcggttggcaacaacaacacttcctcctccatgttctgcacagagatacttttgtaacttggtagacatgaattgcacttgagttccatccaaaagatctttgttaggttattccatcaaagagagaaggtttcatccacccttcaataacgagccaatttccaagattcacagctttgagtggcaaagggaaattttcagtctgagctagagcatagtgacatgagaggtagaaagcgagcacaaggtttgcgtagaataatttgttgctcatcatactacactttttggtgtgtggagtgaatgctggggggggggcctacgtagctga

SEQ ID NO: 2142 - DNA, 711 bp, Glycine max
tttttaattaccaataggaacagtgaattttataaaggcagtgtacaaacgaacttcttttgttttttgtgtaacagtaataggctatctttatttttatttgtaaattacacttcaaatttgaatagacatctaaaatagtaaaatacccaacaccctttttagagcacagggcaatactaattaaagcttaatataattgttttcaatcatccacttgatgctccagaagttagagtcacatatgtaggcccaataagcccatccaaatttggcacgagagtatacatccacttggacttgcgtaaatttttggtgatctttctttgatgcactctgtactttccaatcactactccattccccaacaaaaatgaggggtccattagatgtggtgagagagctaagatctgaggccctttggtttttgataaaatcaatgttctgctgcacattcatgttggagaacctatccgaaaagagattgtagtagtgcacatcaatgaccactctactgaaagctccagcaaaggacaaaagcacttttgaatctctatcaagagggttagacatgatcacataggcactagaagtgtgtttcctcacagcatcataacctgcttgataatagcttttaaggctttccaaatttacgccttgaggctcattcattagttctattgcaactagacccgatctgttagaatacct

SEQ ID NO: 2143 - DNA, 711 bp, Glycine max
  misc_feature (635)..(635): n is a, c, g, or t
gagaaaaacagaaacatattaatcttaaaaaaatagagcaaattaaaaaattcataactgagcaaatatttacaataacaaattccaaaaaaaatctgtaaggttattcttgtccgcttctactcactttcttcctgtttcaaagggccaaacatatttctctgatattcagttttccaaggctaagctgagatatattttatatcactcctaaaaacaattccaagacgagaggatatctgctttgagaccgcaattgcaggattatccgccaggttgaatgacttctttttcaacatgaaccgcaaacgtaaccgttggtggctgcaagctcgttattctgcaatgaatattaagatcatcgtgcatctgactaagacggttctttgcaagttcttcagctgcacatgctttcctgcaagcttctttcacctggcttccaccaaaaacgggattattgttgacactatcagcagaactttctaacatatttcttagatgagatagttccttcataagattatgagcaacctcttccgcatctaacaattgatttttagaaaactcaaatgctctttctgcatgaagccgaaaagaagcacagttcaaacatgcacaaacccctctgcatcctncttggatttctttttaaaattccttttttcaaaccaacagcgggaactcttaagttgttctacaactttgcagttg

SEQ ID NO: 2144 - DNA, 809 bp, Glycine max
tactttgtcgagaagacgacagaagggtacggctgcgagattggcattagatggcatgccacaatggttgtccctcttaggcactttcttgttttctctctcaccctcatatccatcatcttccacacccatggagcgttctctgagcaatcaataatcaagttacccacagaccaaccaagggtagagaaactgacccacttgcattttttctaccacgacatcttagagggcaagaacatcacggtggtgaaaatcatcgagccatcagcgagcgaggttcgtgaagcaactgggtttggaaccactttcatgatggacaatgttttgaccgagggtccagagctgagctcgaagcacgttgggagggctcaggggctgtttggcttggcctctttggaggaccgtggaatggtgatgctcattaacttggctttcagtgagggtgagtatgctggcagcactctcagcatgcttgggaggaaccctgttcaggacactgttagggaaatgcccattgttggaggcacgggcgtgttcaggtttgccaagggctatgccattgccaagagtctttgggaaatttctgacaatgagcattttgtggtggagtatcatgtcactgtttctcatccttagatcttatatgtcttttgttaagagtaataaattttaggcttaaatatcttcaagatggtatgataaatgaataaattttattgagttttaagtagatttgttgttgttttgaatgtttgatatattcaaaattttctcgagttcttataattaattaactggtaacatat

SEQ ID NO: 2145 - DNA, 1115 bp, Glycine max
atgatttgggttacagtagattcacaagtatcttcattgcttttcagcttcgttggccccccccccgtgatgcagggctgcgataaatagattgataaacttgactgagtcaactgttgcctcgggagatgatgaaggttgtataaaggtatgggatatcagagaacgttcttgttgcaattcttttaattcccatgaagattacatttcagacattacttttgtgtctgatgcaatgaaactgttggcaacaagtggagatgggactctgtctgtttgcaatcttcgaagaaataaagtgcaagctcaatctgaattttctgaagatgagctactgtctgtggttttaatgaaggctgggtgactagaatggtaggaaagttgtatgtggatcacaaactggaatcattctattgtattcgtggggatgtttcaaggattgtagcgatcgatttactgatctctcttctaattctattgatgctatgttgaagcttgatgaagacaggattattaccggatcagagaatagaattatcaacctggttgggatattaccaaacagagtcatccagccaattgcagaacactcagaatatcctgttgagtgtcttgcattctctcatgataggaagtttcttggaagcatttcccatgatcaaatgttaaagctatgggacttggataatattctacaaggctcaggaaacacacaaagtaatgaagctggagctgttgacagtgacgatgatgagatggatctagatgatgatccttcaaagaatagtaaagggaacaagagaaagaatgcaaataatgggaatgccctaggtggatcgaacaacttctttgcagatttataggaggtttgaatgcatctctgttcaaatgtgttgacccaattagaaaacttccttgatttcctaatcaatattaagttgaaggcgcccctccaaaaaattgatacatacgttggaccgtgtccagatgatggcttttttgtgtgttatattggtacaaggatataatttttttctttcaatatatgaagtaattcatttatgttaaattatgaaatatagtgaccatttttattgtcttttcctatgaaaaaa

SEQ ID NO: 2146 - DNA, 1994 bp, Glycine max
cgttcgcatggcacgcgtaccgtaggcttggatgccttcttagaggggcgcgccaaccccccccccccccccccccccaaaaaaaaagaattgtctaaaaacatgttgacactttaattcttccaaccatggctcgaacataattgatttaattccatttctcatcagacaaaaattctctatacaatcaatagttgttgtatacaaatgaccatatttcaatctatgcaatccagttaatctctagttattcaacgtgacatagcgaaaaagaatgagatagtagtaaagttctaaaaaaagcaagaaaacccgaaaagaagaacctagaagactagaaaaagccagtcccagccctcccatggtgcaacaaatagtgcgcaatatgatccctggcctgaagggaagcagaagatcgtattccattttccggcagcatctcatcatcgaaaatctgaaacctccactcatcatccatttcttcattcctcatctcacaaatattatgcaaaacgcaacacgcgccaagcacaacgggcaagtcctgaagcttcacttcagttctcttctgcaaacacccccaccgccccttcaatctcgcaaaggcctctttggctacgccttgaatctcttcaatcttctcattaaacgcgtgctgggtccacgtcagattcgcgtgcgtgtacggcactagaacccagtccataagcggatggcctgaatttccaacgatccaaacgccctttaagttccctctgctcgctctctggaacaacgcgcttttctccagaacgcgatcgtccggcatcgaacctggccaaccgatgcacacgtcattgaaaacgccttttgaatcaaccacgccttgaaccgttatcgaataactcgtcttctggttacgctccgtgtggcgcttgttgaaatacgcggagacgctgattttcggagcgattattggaacgtgcgttgtgtacattgctcctcctacgttaggtattcctgagattttctcgaactcgtctttgatttgcttcgttttttcctcgttcggccattgcaggaacttcggcatcagaacggtgcgtatagcggagcagacttcgaggacgagcttgtgacacgtggagattcctaacccgaagcgctttgagactagccggagcggatcgccggtggcgagccgccagatgcagacggccacgcgctgccgcaccgggatcgcgtcgcggagcatcgtgtttttcttcgtcaccgccgcgtcgagctcgtcgcagatcatgtcgaacgtgcttctgctcatccggaaccaccgccggaactcctcctccgggaagtccttccggctgatcttctcccaccagtccttcgaccggtccttcacccatagtctcctctgaaccgtcgaaccgggttccgaatcggttcgaggttgaacctgaaccgaaccggattcatataacataaccgaaccagttcctgtagcagcagcaaccgcgcgacgagcttttttggttattgtttgttcgaactcttctgactgcgcgtaatgggcctcgaattgggccttgtaggtgttcatggcccgggtctggttctcgaagttggcgttgtacatgttgcgatgctgttcgtactcaacttttctgttccgttcctcttgaatttcttcctcgtctaacataatcagcgaagcaagtaagtccttcaagttactttcactgttctcgttattattattaccattatgccctttttgttctgcacctccaccactaccttcttcttttctgttgttacgctttctcttgttgttgctgttgttattgttgagactgttgttagagtctgtgtcttcgtagaggttgtagaagtgagagtagtcctcttgggtgaaaaacgggatttggctgatttccatgtggtgtgtttggttatggagattgtttttttatgaaagcatgagattttgggggggggggggcctacgtagctga

SEQ ID NO: 2147 - DNA, 1075 bp, Glycine max
ggcccaaacaggaccttaaattgtcactaattcaaaacgtctacactggttaaatgaccatcccaaatttcaaaacattgatcaaaactcaaactagtttgccttttctaaaacgaactttctcaccgatcagagaagtgtaacttcactgaaaaactatagagctcattgacccctgcattccaagcgaaacaaagacataataacacttccattctcaaattgtattatgtatggccaacacatatgtctagcttgttaaaaatccagggtcactgaaccatcagttaaccctgcaaagatttatggtaagcaacctttcagaaatgcttgtcttgcccttacatagtcaaagctatgttaccgttcaccattctcgaatttttttatgctttagtatcaggtgcatcctttgcatcgctgcttacagcatctttcgtatcttgttctttactagcagatgcttcagctacaaactcctcttctgtgtcactctcatcagcatcgtcattgcctgcagcatcagaatccaatccttcaccccctcccatgcccaacttagaaaaatcaatgtcaccaaagtccatatcagatgctgcaggtttattatcttgctcctcatcttcatcaacccatttatcccaatcaactttcagaaagactggagatttccctccctgcttcaacaatctgtcccaccacttgttctcagcctttttcaccaagtagcagatgtgtcttgaaccaacactggctttgctattatttacatcaatcttgtcaaacagatcaatgtcaacttcataaggaatcttctctgcaccagcagttgcagagaagtaaaattttccttctggctccagtttgagcttaacatcctgagcatcaggcagctcaactgttaagtagagtacatcagacgtctgagcccatttgacagaagggtggcggctcatcttgttttctcaagagtaatcgatctgcttgggtttctctgctcaaggaagcgttctgtcaccgctgagggaatcactttctctttagattttccgggggggggggcctacgtagctga

SEQ ID NO: 2148 - DNA, 2035 bp, Glycine max
ttttttttttttttttttgatgcaaaagaaagtaaaagcagggcaattatagggtgatgccgggatgggttcagtaccagaaacatgagaagcagcatcttcttttgatatggccacataattcacgggagcagatagtctgttttccctttttccatcttttgatgtggacctgtttccattttgatgagcattaagcgatagccgtcggttaggagtagcattgactcctccgttagcacgaggacctcctgacttactggaactaactggcctagcagggctgggtcttgaaccaaagatggtttcttgttccgtgtttcgctgctcgtggtgctttttctgatccctcatcctccgtttttcctcttcccgctcatgtctgagcatggcatattcatctaacatggcaagaagaggaacgccatcatatgtacatgacataccatgatcttcttcccatgcacgagttttagcaaccaatgtatcaaccaaagctggaattttgttgaccaatatccgtgctttctctgcacgtttgaggtttatgtgtgcacctctgcttgcattatacctgttctcatcccggttatagtcttcaagccaactctcttcttcacatgctgacatccatttctcaaccttgtccaatatatcttttcggcttaaagcttcttcttttgcttttgctatctgattgtccatgtcagccagtaattcagttggttcaatgtttcctgaatcaatcaatgccataatcttctcccgggcagcatctggatctacttctatatgagcacgggcaaatatctcttcgagctctgcttgcttcttgaaagcaatttccttcatcctgctggctttcagctgatcaagtctctcaacttccacttcagcctgctcaatcagatccagagcaagggcaccaggaacagtgacttcatcaacagaagctgacatattacaggtaacatggtcaaatagtctcctttcctcgggatgagtatccattagattccaaagatcaatcaactgagaagctaattcttggagcttgtgcagcctctgttttttatcttctttcagcgttaagacggtcttagccagccttgctagggtgtcattacttatgctctttgattgaacaccagtagagtcatttagacttggatgaacctcagttgcagtactgaagaagtccataccaaggacagcacatagatcatgcacagtactcacaaattcaagaaccttgtgcaacctctcgctcttttccttttgaagttcttggagctcagattgatattcatccaacttcttcagggacaggtcagactcatcaactgcaggtgaaacatcattaaggttcaagtttccggctatctctccacatatttgttggatctgtgactgtacatccgagaactccttaattctttcttctttttgttgccataactgttcaagtactggtgctatagctgcaagctgttctttgatagttccagaagtattctcaggaattccagcaaagctcttttctccaagtgctgatagaagagtggaaagctcaagcttagcatcagacagagcttgaagtagctgcgcccttgactttgcagcctgctcaacctttctcttgtacacatccaagcactcctgttctaactgaagaagcatcttgtctcgttgctcatcgctctcaccaacctcatcccatatttcctgaagcttttttaacaaggaaccacatgtgttttctccaagaagaggattttgagcttcggtcactgccattgaagtcccagcgacacttacccgtttgaagcttagggttatgtggcttcttcagatctgaaacagagcgtgagcgactgagtgagtgagttcgtgaaagagagagagagagagagaaagagagagtggggggggcctccgtgtcggccgccacggggccgtaccaatggggtcataagaataagattagatgatgagattattagaaagacacagagtacagtgttagtgtccccgc

SEQ ID NO: 2149 - DNA, 1523 bp, Glycine max
ttttttaaaaattaaattgaaaaactaatttaacctttaaaataattaatggtgaagaattgtttagtttgtacagcaaccaggtagaaagatcacattcgaggaagacataaagtgccttgtgtgtcaatgggtaacacccctatgaagacttaccaaaaaccaatggcaaaattgaaaattctatttccttctaaaccacattctgctcactttcattcaacagacttttcccacagtataccctttccatatatttaaacgcaggcaacacatgggatgttcaaattagctatatagagttgaagtcatccccctaacgatgcctacaaagtcactgaatcaatgcagcagcatggaataatattcagcatttctgctacccaagcattgtattcagatgtcaatacaacatcatgaaagtgttcttcgatcaacagaaacttcaatgagcttctcttcatctggcttaactgttaatggcatatctaagagcatatttggtggggcaaaatacatgtgtagagacatcatacaaataataatgcccaagaaaagctgcagtgtaggtttgaagttgaagagaaatagtgaaagtatcatcgtcagcagcatcgccattgatgtggaatagacctttacaatattatcagcatgtttcattaaccatgaaaccaaaagaccagtagaccctagattcaataccaccatccaggtagtgatagtgtatccattgaaaatacgttgccaccagggtccattttcaaatccacctctaaaatcatctgcaagtagtcgtgccatattgaaaagtgtaccaaacgtgtacaactgtatattctgccagtataagctgtcattgtttttcttcatcaagaactcagtataaatcccagctaaagctgagagacaagcagatagaactcctaacatgtagccctgaattggagctgagaaaagggagtcacaagaagcctctccacatcccctaacctgacttgtggttgtcccaacagccaacagcacaatagccatccactgcaagttagaaagcctcctccctaagaacaacctaaatagaattccagtggtgacaatcttcaaattgcccagtatctgataggtggatgtgtccacataagtgagtgtagcaaactgaacattgttgtggatcagatatataactgagggaatggggaacagagacaccgttttccactccgttgtcatctttggcaaaggtgactttttgcattccctccacagtaacaaacttgacaccgcaagcttgaaaacctcggcgagaaatgggaccgtggcgtaatcatacttgtactctccgttactttgcgagagggttgttagtattccctgagaactggtgaggacggtgaggagcgaagcgacgaagtaccactgcatcttcttcttctcttcttcttcaacttctgcagatccaagcagagaggctcaagaaacacgcgctcaaacgcaccggggaggtaccaacccccatgtgctat

SEQ ID NO: 2150 - DNA, 1631 bp, Glycine max
cgtcttttttttttttttttaaattttttttttttttttggggcagaagagaggaagtataaatttttaaaggaaagaaaagaacccttttcagttttcacacctttgtacactaaactaaaatcatcacaagacgacacttataaacatgattacatacaaaattggcttaaagcaaaaccatcaatcgtgatgcgtcatatatcactggatgactcaacccttatgccacgtatctcaaggttgtctagcttcctgggtctcctgtaatatttcaacaacagagaacagcaaacaacgctgacagaggaggcagccatagcagccccagcaatccagggtggcaatctgaaccttgtagaagggaaaagagctccagcagcaattgggatgccaagcaagttataacccaaagcccaaaagtaattcaggcgtatacgggaaaatgtttttctggaaaggtcaatggcagttatgacatcctccaagttgctcttcatgaggacaatatcagcagcctcaatagcgatgtctgtaccagctcctattgccattcccacatccgctgccacaagtgcaggtgaatcattgatgccatcccccaccatagccacagtgtacccagaagcctgcaagtctttcactttctctgctttttgatccggtttggcctcagcaataacattttcaattcctacttccctggcaatagaactagcagttccgaagttgtccccagtcaccatgatgctcttgattttcattgacttcagaatggaaatgacttcttgagcacctggtttcaatggatcggatactgctaaaaccccagctactttcccatttatagatactacaattcctgtttgagccatcttttcggcttcagcaagtatatattcagcatcatcaggaattgcaatgttatggtcagcggccgggcccttcgtacccgcaattatttccccgtattatgaacagaggcctttactccatgtcctgtgatggaaacaaaatctcgtgcttctgcccaagaagggttctcttcatctctaaatcttttagcatactcaacaacggccttggccagtggatgctcactattcacctcagctgcagccacaagttcatagaactcctggagcaccatttttgtcaatagttctgttctcactatcacaggtttcccaacagtgagagtacccgtcttatcaaaaacaatgcagtccaccttatgtgcactctctaatgcttggcctcctttgatgagcacaccctgagatgcaccaactccggtcccaaccataacagcagttggagtcgctaaacccaaagcacaagggcaggctatgaccatgaccgatattccaaactgcagagcaagctcaaaactgtccatagaagacggtatccaagacttggggtaagcatgatattttccagccaaaaaccaggctagccaagtagtgaacgagatgataatcaccagaggcacaaagtatttggaaatgcgatcagcaaacttctgaacaggcgctttagccatctgagcccacgcctccgcccgcgcgtcctgcgaaagagcactctccgatcccacccttgttgccttaacatgcaagactccattc

SEQ ID NO: 2151 - DNA, 1687 bp, Glycine max
ttttttttttttttttttctttttttttttttttttttttgagaggaagcttatggcaaacattttaagcaaaatcgttatcaatactacttgtttggatccacaagtaacacaggagaacccctactactccaagaggtatacagcccataaatttgaatgtaattctaaatccaaaataaacagccaaaaacaatttgatgcatccggatagataaaacaaatactctcattgatctacctacacaatcatcgtgttgtttgagcttgtgcatgttccagaagttgactaaccaacttgtaagtgcgtccgttaagggccttggtatggtctatcagttgctcatacacatttagatgattaggttccatgataactgctccagtttcggagtcaattttggcatcaagctttgagctccggatgagattaacaatccatctctcagcctcctcataattcaaatttaacttctcagcaagcactcccatgtcaatgcgttggtgtattctacagtatgtctcgaagataaatagcctagcattttcaaggaactcatcccttagcggtacagttgaaaagttgctttcttcaactcttttaccaaggaagggatcattaagtatgacttcttcacattccctcatcttcttttgtgccccatcaaagtcatagttaacataaacacaagccaaaaactcagtgatggggtccttataggaatgctgctcctgttgaataactttaataaaatctttgaattgaggcctcctcctcttgttaacaatgaatgctgtggccaagtatcgcaaaaggtgtggagcactagtttggatagcatttagatacttgtcctgattgaacagatcaattatttgtgttctcccattgtcatgattaaaaaagatgaacagactccaatgcatcagccatattctgctttgcacctggttcaaaggtgatgcaaaattctttgagtcaatgatttccttcaagcggttgagctcttcaagagcgatgtcccagttctgcatcaaaatttcagctgccagcttcccccacaatgcactcaaactcctttcactatttgtgcacaaagctctgtactgataaagatagtcagcagcaccagagtagtttccacactcaaactggaatttggcatattggtacaacgcttctatctgtgcaggaccaatctgatatcggtcgttgagcatctggagattgtactgcttgtccgctcggagctcctgcacagcagcctcgttctggaggaaggcgacgaggggggcggcggcctcctcgagcgacttaaggcgggcaacgacctcggcgcggcggtcgaccatatcgttcgggacgtcctcggtgtggtagaggctcttgtggatgtccatagcgtagtcaaccatgttggtgttgttgagaaggtcgatcttcgccttcaggatgtggtcgtcgtcgtagagctgccgctcctgcaggaactccaggagagggaacacaaggtgcctgtcgagattcggcgccatccgcggagttaggtcgtactcagccatcactcttcttcttcttctggtgctgcggcggtggcgtctggggataatagcggctccgagagaagatagatacagagacgcaacactactcggattcgagaatagggtttaaaaatgtgggcgc

SEQ ID NO: 2152 - DNA, 809 bp, Glycine max
  misc_feature (2)..(2): n is a, c, g, or t
  misc_feature (6)..(7): n is a, c, g, or t
  misc_feature (15)..(17): n is a, c, g, or t
  misc_feature (19)..(19): n is a, c, g, or t
  misc_feature (29)..(29): n is a, c, g, or t
  misc_feature (36)..(37): n is a, c, g, or t
  misc_feature (41)..(43): n is a, c, g, or t
  misc_feature (45)..(46): n is a, c, g, or t
  misc_feature (59)..(61): n is a, c, g, or t
  misc_feature (63)..(63): n is a, c, g, or t
  misc_feature (72)..(72): n is a, c, g, or t
  misc_feature (74)..(75): n is a, c, g, or t
  misc_feature (78)..(78): n is a, c, g, or t
  misc_feature (82)..(82): n is a, c, g, or t
  misc_feature (92)..(93): n is a, c, g, or t
  misc_feature (97)..(100): n is a, c, g, or t
  misc_feature (103)..(103): n is a, c, g, or t
  misc_feature (107)..(109): n is a, c, g, or t
  misc_feature (113)..(113): n is a, c, g, or t
  misc_feature (117)..(117): n is a, c, g, or t
  misc_feature (132)..(133): n is a, c, g, or t
  misc_feature (135)..(136): n is a, c, g, or t
  misc_feature (141)..(142): n is a, c, g, or t
  misc_feature (144)..(144): n is a, c, g, or t
  misc_feature (146)..(147): n is a, c, g, or t
  misc_feature (173)..(173): n is a, c, g, or t
  misc_feature (175)..(176): n is a, c, g, or t
  misc_feature (180)..(180): n is a, c, g, or t
  misc_feature (185)..(185): n is a, c, g, or t
  misc_feature (187)..(187): n is a, c, g, or t
  misc_feature (189)..(189): n is a, c, g, or t
  misc_feature (194)..(194): n is a, c, g, or t
  misc_feature (196)..(196): n is a, c, g, or t
  misc_feature (200)..(200): n is a, c, g, or t
  misc_feature (205)..(205): n is a, c, g, or t
  misc_feature (210)..(210): n is a, c, g, or t
  misc_feature (226)..(226): n is a, c, g, or t
  misc_feature (234)..(234): n is a, c, g, or t
  misc_feature (239)..(239): n is a, c, g, or t
  misc_feature (241)..(241): n is a, c, g, or t
  misc_feature (248)..(248): n is a, c, g, or t
  misc_feature (257)..(257): n is a, c, g, or t
  misc_feature (262)..(262): n is a, c, g, or t
cnaacnnaacacagnnncntacatagtanaacaaanntatnnnannggcatgataaaannngnaataacacntnnccnatanaacaatattnngcgnnnntangaannngcanacantaaaagaacaataannanngtagnnantnnataatccacataaagaaaaaagaggnanncacncgggngncncttananagtnatccncagantcaagaattttcatanttttattnatcanantataaanggtttgaancttantggaaacaccaagtaaaataaaacagacaataaattcatatatatagttccacagcactagaatactccattagacataaattcaagtttcattttccaaaacagataaaaacaaccatgtcttagcaataatctataataaaagaccaactgacaaaaatctcaagcttcaactacagagaatcaaacttcagaagaatcaatgaattgcttcttcttgatctctcgcccagtacctttacaggtcttgaacactcaaacctggaggaagagattgcttcaatttatcagctttctctgggtcaaacacacaaagtgtgtagaggtacttggagcatctgaccttgaacttaaccacatctctgctcctcttgatcttcactgacctcgcatccttccttctggcagtgagaaggaaatccttaatctcgtggatttgcttaggcatgattacgagagacgcagcggggacagagatcaaaggcgcaacgaaatgtgatgtaaattgccgaacgcatggcaagtgcacctcataaaccctaaccct

SEQ ID NO: 2153 - DNA, 691 bp, Glycine max
gcacgagggagagagagagagagaactagtctctgtttttttttttttttgtctctgtttttttttttttttttgataattgtaggcttgtagcctgactgaaaacaccaattaaaattaaaacatacaataaattcatgtatatagttccacagcgctagaataatccattagacataaattcaagtatcattttccaaaacagatgaaaacaaccatgtcctagcaatgatctaaaaataaaagaaactgaaaagaatctcaagtttcaactacagagaaacgaagttcagaagaatcaatgaattgcttcttcttggtctctcgccctgtacctttacaggtcttgaacactcaaacctggaggaagagattgcttcaatttatcagctttctctgggtcaaacacacaaagtgtgtagaggtacttcgagcatctgaccttgaacttaaccacatctctgctcctcttgatcttcaccgaccttgcgtccttccttctagcagtgagaaggaaatccttaatctcgtggatttgcttaggcatggttacgagagacgcagcagtgacagagaacagaggcgcaacgaaatgtgatgtaaattcccggcggccttgccagcgccccgcataaaccctaacccaagagacacaatcacagtcttccggaagcccaaaccgccctcgtgc

SEQ ID NO: 2154 - DNA, 715 bp, Glycine max
ttttttaatttttttttttttttttttttttgctttttttttttttttttttttgtccaagcacgagtatttgatcgtgcagagaaattgattattatcagatatatttggaaaatccatatagaaggttgaacataaagtccaaagcaataatgaacagcaaaatccataggctagtctaggatccccaaatccaccttattgttgcaaatggaagtaaaaagacgagcctagctagaagctgtcttcttttgctggaaaatgacagcatacactggaactgcaaccccaatgctgaaagcagtgaatacagcaagggacattttcaacccctggtgcttcatcctgtccaagttgtacatgtgctttgcatgaagataatagggctcatcatggccatgtccacctcccatcctcttcatgccagttgaatgaaaacctctgctcactgagttagagagggaggattcggaagaagcgacaagcttcgcggcagatctgagagcgttgctgaaggccattggtatggaagattggatttgaaagtcacgcgcttgaaaatgaaacggtttccctacacgcctattcctcgttcaactttgtgttgcgtctcttgcgaacgttcgccgttcgactgttgttgaaaagatgaaaacccttgccttgcgtggcttctttgtttcgatcccccttctgtcgtcttctcgcagccgta

SEQ ID NO: 2155 - DNA, 752 bp, Glycine max
ttttttttttttttttgggggactaattaaggaagatccattctaattaattttaagctaggtaattacatgaaagtaaagagtaaacaaaagataaaataaaaaggtttggcattaatatgtacttaaggagcccttcacaaattaattacaaagtaatcaatgttctcttctgtttccttatacaatactacgtatataaattaattcagaacactgcatcacttggtccttgtgccaaataatgattttctctatattgttgatccaagaatgctccataacacaattgaagatcatcaacaccatttccagcttcatattccatttctacatgttccatcatcccatatccataagggatccatgcattcatctcatcaaagggcaaggaagagatcaattccaagtcaacccaatgatcagggacaccgactgacgcggagcgatcttgatcatccacgtgtcccatctcatacatttgacccatttcagtgtcagtgatctctgcctccaatgattgaatcatgctcacaagtctatcatcgccatagtactcttcttcttgttcttcttccattagagacatgagaagaacattgttggcttctgagaactcaattccctgttcaaagacaccctctgaggaagacatgttacaatgaaaaaaaaaattattatttttctatggtttgtgaaaatagttaaagtgagagaactagaggcaattaagatagtggaagatgcaagat

SEQ ID NO: 2156 - DNA, 2008 bp, Glycine max
tcagctacgtaggcccccccccccaaaccatcctctcttagcatttggcaagatctgatttccctcttcacaaggagagaaatagaaaggcatatgatcttcttcaagttgcaatctttttagagagagagggttagaagaacaacatacttgagatctgtcactttgtttgagttcagatcttcaaagtttccttccttgttcttttggtgcaaaggatcaaattaaggaatgccaaatggggaggaaggggaattggttttccagtgtgatgaaagctctcagtcctgactcaaaggagaagaaagaacagaaatcaagtaaatctaagaagaaatggtttgggaagcaaaaattggagacttcagtctcatactcagaagctcataaagcaccaccaccaccgcgacctattcctccaccagaagcgattaaattaactgatattgaaaatgaaatcagtcatgatcacgactatgttgttgaagttgcaactgccatggatgccgaggaacctgttccttctgttcagatagaacctgttagggttgaagctgccccaattgctcattatgctggtaaaccaaaggatgaagtggcagctatcaaaattcaaacagcttttcgtggatacttggcaagaagagcattgcgggctttaagggggctggtcaggttgaaattattgatggaagggccagttgttaaacgccaagccacaagtaccctccactctatgcagacattatctcgcttgcagtctcagattcgttccaggaggatcagaatgttagaggagaatcaggctctgcagagacagctcttacagaagcatgcaagagagcttgagagcttgcggatgggagaggaatgggatgacagcctacaatcaaaagaacaaatcgaagccaagttacttagcaagtatgaggctactacgagaagagaaagagcgctggcttatgcattcactcatcagcaaaactggaagaactcgtctagatctgtaaatccaatgttcatggatccaaccaatccgagctggggttggagctggttggaacgatggatggcagcccgaccttgggagagccgtagccatatggataaagagttgaatgaccactcctccataagaagctcaagccgcagcattaccggtggagaaatcagcaagtcatttgctcgtttccagctcaattcggaaaagcactctccaacagcctgccagaatcctggctcccctagctttcagtccactccttccaagccagcttcatcatctgctaagaaaccaaagaaggtaagtccaagcccaaggggcagctgggttacagacgaggactccaaaagcttggtcagtgtacagtcagaccggttccggaggcactccattgccggttcattggtgagagatgatgagagccttgctagctctccagcagttccaagctacatggtgccaactcaatctgcaaaagccaagtccaggacacaaagtccattagccccagaaaatgcaaaagcagagaaaggttcctttgggagtgcgaagaagcggctttctttcccagcttcacctgccaggccaaggcgccattcaggtccaccaaaggtagaaagcagcagcttaaatgcagagttagctgtggacaagggtgtggacagttgatcatacaagtaaaaggatggaaaagcattaaagtaggattgaaaatatatcactgaagaaataaaacaaaaagagtttatttaaattgagtgttccatttatttatttttcatatttttacgtgtatcctaacgtttcttggaggcttttgatttggggtgaaaaaattgctttgcttactattttttatcaatttgtattttcgtttactttctcactagttgccccgaggggaagacatgcgattcatgaatcatgttggtcaaatgatagtacaaatgaactgtccgaatcctttctgtgcttccccaatcaaggacaagtatcattctggtc

SEQ ID NO: 2157 - DNA, 2820 bp, Glycine max
ggaaggacgcggttttaccatcacccgcttgtaaaagcaccccaccgagggcccggtaattatatctattattggggaaatggggggggggcccccccccaggagaaaaaggaggaacattagccatatacaaacacaagaagcgcgtgttaatgtggtttgtttggctttaggctttttttttttttcttccaaaatattaaacactgggtttttactcattgcattacctgcagatgctagaaatattatgttcgctggctaaatggaatttgccacgcttgatatcgtaaaagtatatactactacatcaaaatttctcctgtgaaagacagaatataaaaatctaaacttacgcttccccgcaaaagaataaaaaataacaaaacaaaaatgaaacatagaatatgttgttaggggacacattgaatccatcttgaactcgaatcctccgtgggccttaaccaacatcaactgtttcttcattcacgactgaagtattcatccccacgtggtcgtcacgcagttatgatcccacaccgagcagagtgaaaacactcaactcccaaagtcccttctcagcttcaccatctctttccaccccagttgccgccacgcccaccaccattggagaacctaccattcctgcctcctccacctcttccaccaaacctgtagttcccaccacgaccaccattatcaccaaatctgccacctcttgattgtggctctttctgttgcaactgtggcagtgttttcactacctctaaacatacattcgaggcattttcctgaccattaagatatatgtctaaatctttagctggtacatcaaaaacaacgccatttccatcagcagtgagtgaaagacctttcacagcctcaaccttctcttcaggcaaaaatctcctcaagattgaatagccataagattgggtatagattggtttcccagtctcaaggactaatgtaacatagttctccatggaagtgagaagtgatctttgctttacatcggtataaccaacagccttggcaagagcctttgccagtaattcaatgactggtaaaccagaactgttcaaaagctcttcagcagcagacttgaatgcaggaaccacactatcagacacttggataatcatttcagcagcttccccactaacagctttggcaatatcatcgggctgaggggcggatacgtgttcaaattttacaccggactctctttctattctaggtatgttagatctttttggatcataaagcatgacagcaaccccagtattacctgctcttcctgtgcgtccagaacgatggatataggcttctacatctcgtgggggttcacactggataattaactgaacatcattgatatcaagacctcgagctgccacatttgtggcaactaatgtcatgaatttcccagacctaaagccagacagagtaacctcacgtgttgattgctgtatgtcaccatggagagcttttgctccattcaagatccctgcaagctgagaagcacattcttttgtctcggtaaatacaattgtccggcctccactgctataacagcgaataatatctgggataagttgggccctggcagaactagtacaaggaagaacaatatgcctaacattggtgctggccttcatttttgtatttccaacaaggtcagcagttttcttatctggcttcaaaaattttaaagcaatttgcttaacccagtctggcaaagtagcactgaaaagaagtgtctgaactttattaacattttctaccttgcctagaatcatttcaacatcttcaacaaaacccatcctcagcatttcatcggcttcatcaaggacacgaaactttagttggctcaggtcaatatttcccttctcaatatgatccttcacacgacctggtgtgccaatgacaatatcaacacctctcctaagcttaatttcctgaccttgatacggagctccgccatataaacaacatgaactcaatcccattgccccaccataaacatcaaaatcagcatgcacctgacaggccaattccctagtaggtagaagcacaagaacacttggagtcctcccgaagccagtctttcttgaagcttttgttggaccatttattaaagactctaatatgggcaacacaaatgccagagttttaccctgaccggtgcgagcccgaccgaccaaatcagaaccatcgagaacggtgtcgaaggtcatggcctgaatgggaaacagtgattcgatacccttctccttcaatttttgcctcaagggttccgaaatcctgaagttggaaagcgcgttgggatcctccttcttttctccattagcctccgtgaccaaaggctgttccttttcttcggacttaacaacctttttcttctttttcttcttattcttgttgtcgtcttctctggaagcaggttcgggttggacgaggtcggagctggtctcgtcgtccccatcgttgttgtaagcggcggggggcatggcctcttgttctaaatctgaagccttgcgcttcttcgtcttcttccccgaaaccccatcgaggtcgggatcggtgagggactgggttttggttttcttcttggcaataggtttgggggtgtcagggtcagagagagagagcgaaggcatggttgtgtggtgatggcggcgtggagagaaagagaaaggagtgagagattttctcctgcttgaaagggggtatagcagtgaggtgcagaagcaggagaagaataaggagtccggtcgcccggcgcgacccgggaatccggaccggaaccgcgaggcg

SEQ ID NO: 2158 - DNA, 2952 bp, Glycine max
ttttttttttttttttctttttttttttttttttttttcaagcgaaattgcagttttattattgaagacaagcaaagtggtctgctaagtacaattcaaaagcaagacaagcctacaaaaacaaggacttgatttaaaagggaagaaaaaaaaatagcaacaaatggacgccctgccaccacaccaaagcccttgaatatgaggtacctagccttaaaattgcacaacataaccacactgacaagaccaaaggaagacaagctaaagcctcttccacactctaaggcatggtgaagatgcttgattagtataaactaaaaagacagaagacttcaaaagacatgaactaaagcttaagtctaagcaacatcatagcaaatgtgcaacagaagctaaaacatgctttttattgtcaacatccagctgtacaaaataagacctagcacaagcatgcactatctagcagtggataccatcaaccaagacttagtaactgtattctcaggggaccctagccatgaaagaagtagccccagtaagccaaggggccaaaagggttgtaagttggaacaagcatttcatgcttgcgaaaaaaatgggtcataaagtaacaagccaaagttccctggaaaacaaccaagtcaccaaactgccaccaatccacccttgatagacatatcaaccaaaatgtatgccgaatgtgacctgtacagttctatctccttccctgatttagccagttttatttgtttctagttttgtaacatgattaagccagaatatcacatctccacaacttctccactagcaactccattgtgctgctgccaattgaattgcagttttgaagattcaatcccagcaaggtctggcccaattttgtcaggaaaggcgcactcttgtttgatacatcagaacaaccagacaacgaaagcacttgcaagctaggcagactggcccttgagagaacagctacaccggcatcggtgattgcacactttgacacatctagatcattaagcactaggaagttgtttgcaattgcaaccaagcttgcatcagtaattttccagcatccatcaagatttagtacttcgagggttccaccatgtagcctggccaaggctgaaactatattatctgtcaagttccagcaaccagtgaggtttacattgacaagtccagcctcacaattctccaaaagggggagaaggccagcatcagttatgccatagagtccagtcagattaagatgctgaagttggggacacaattttccaatcgtggccaggctagcactaccaaaaccagggcacttttgaatggctaaagattgaagagactcgcaaggagaaagcatagacacttccatatcgatatctttgactcccatgcacttcacaagggcaagagatttcaacttcgttttgatgtctgcaagggcaacaataatcccagactgagtgaacctgttgcactcctccagctgcaaactttcaagagatattgcagctttggcaaatgctaccaatccattgtcagacacaaaacaacaccggcgaaggcacaagtgcttcaggttgatgcaacctttaccaatggcttcaatgcttgtatcagttacccccctgcaggcagtaacagtaagtgacagtagtttctgcagaccttgagcagcccccatgacccagaaccccctttcagttacattttttagaccagagaggaccagatttgttatcgcttttccataatggcaaataacagccaaagagaaatctgtgatgttcaaagtctgaagcttaacccttgataaatttgaagccgatgccaaaagactagacactccatgatccccaacaagagggcaatccttgattgagatggactgcagcttggggcatagccttgcagtagcttgcaaaccttcatttccaatatttgggcatgattcaatagttaaggtggtcaagttggggcaaccttcagctattgcaatcaaacccttgttgctgattgaggaacaatgacacaagtcaagcttctccaacatatgacatccttttgctatctgagacacaccctcatccccaatggtagacacattccataaagaaagtgatctgagagaagggcaaccatgagcaactgcagagaggccaaggtttgtgacaccacgctcagagttgcttcctctgatcaaaagcttccctagaccgccacggctactagtcccaactgcaattgcagcaagcctcacatcagtggctttcttcccatccagacaccttgtaaggtatccatcatcttcaatatcttgattctcatcagaagaaacagtttcatcaacagaggtagccctctcaatctcatctttgcagatagtgctcataagcataagccagcgtttagatacacaggcacatgagcttcgctctttgccactaggaaggcgtctgaatatctcaaagaggcattcatctggaagaacctcaataccaggctcttgataatattgctcacgctcaatggcttcaaagatggagcgtggtctcttagtaggagggtagtacatatccaaattggagccaatagtagtgtacaagcgacccaactccattggatttgggcaaaaagaacccccagggtacagttcatcatcaccactgtaattgacaagggcaggcatgagcacagatgataataagtccacaagcacaagcaagagaatctgagttgcagcagctgaatccctttaggatctgagagagggagaagaaaaaagcagatcagagagataagggtgaagagcatttgagttgagagtgtaaaccccacagagcagggcaaaaaaagagaagagaggaagcaagaagctttggaatggaatggatgaagtcaggtttggagttcgttcaggcggacgcgggtattatatgtctatgatatgtg

SEQ ID NO: 2159 - DNA, 1487 bp, Glycine max
  misc_feature (11)..(11): n is a, c, g, or t
ggggggcgggnagctacgtaggccccccccccccatctctttcatactctcacgtcattatattaagctagctttgctaatattggacccttcttcaaccccaaaaatataaaaaactaaaaaaacatcaaccgaaggggtcatttctcccaatccgtttctgtttctgtcttccaggaacactgtcagtgagtgaaggatacgatgaacatcatgtctacccaccagtgtagttggcctgtgagaattcaggatcatcctgacaaaggaagtattaatagggctccattttccagaggatcagacttccttaatgttggataccatactcaaaaatatggtcatagtgccagaaaatgtaggcccgttttttccagttcagtgagcaacagtacggatccttcagattcagataacactgataagaaaaaacctcagaatggtgaaatgggaggagtgaatagtgaaatgcttagagagagtctcgagaaaatagttggaaaagatgattccacgtttagtggatttgaccttgctacccttatcaggaacaaatatgggaggtcttatgatgttcagttgataaagaaggagttcatgggaagaaatctccttgcgatgaatgtcatgtggaagtacatggagcagagatccttcccattgaccgaagaagagtatattttgaggcttgatgatattgcaaacaacttaaaatgttggggagctgtgtctcatattcggaacagcctagaaaagtcgaaggaacgacctcggatagggaaggcagtaagcatttttatagatatggatgagtcgggtgctcgttccaacgagtggatctacaaatagaatgtgttactgatttgaaatcctaaagttagtcactggtttccagataacagtgaaggaaaagtccataggcagcaggtccaccacttttagtgaatttcgttagtttggaatttattacacttggatcttaacatctacagaagcttttctgacgtttctgttggcaacttggcatcaggcctaggcaactatatttttggttctgcccttctttttttcctttgttcatattgatgtaaaatgagttaatataagaaaaagcattcatattaaatttctaacaaactttctcttcaaattagaggagacactaatattaaaggtgttgtcctaagtgcatgcacattcctcgtgggaattacttgaaacatgagagaaatttgaatcctttgccagcaagtatgattatagccagctgatgctataactgcttggatagagaatacgatttttcagtgtagcttttatcaaagtagaaatttctttcgatgccaaaaaaaaaaaaaaaaaaagaaaaaaaaaaaaaaaaaaaaaaaaacttaaaagaattccggcagcccggaataaaaaaagttttcctgcggcccgggggaccccctatttttaaaggggccgcccccggggggggcccccgc

SEQ ID NO: 2160 - DNA, 1939 bp, Glycine max
  misc_feature (22)..(23): n is a, c, g, or t
cctttaccaatctactgtttgnngtaatgtttggaacaggggaaaacaaacacactggttgacttgcatataatggaaacgctagatgtacaagactattttgatagaagccttcactgtccaaattaagcccaaacgagggtataatcagaaaggacataaaaatatataacaatggaaggccattaaacgcctaaatgctacatttgaaacaaccgtctggcatgtggtgtatgttaattttctcacatgatctggaagtccgtcaaaatgatccagaccaattaatgatcaattaattattcagggcacaacacgccaaaacccattctctagaaggactttcaggaaggtcaagagttgcgagacaatagaagcaatgaagcatatgtattcatacaagctaaaattagacattgttcgtctcagaatgttccttgagcagcttacttacatcacatcgcaacatatctacatattccctggcaagactctcattgctgcacaactcatccagaagatcattagaagtgcttccactgccagatagctggacagcattttcagctacagcacggaaaatatcagtagaaggacccaggtgctcaatcctctcagccagtggttgaaggtcaagctgtaaactttgattatcagaatattcatctctgttaattgttccatcacagtagggtgcatggggttcagcttcttcagcagagaatagtgaggaaggatttcccccaccaagggctcgagatacaatgggcatcatctgttgaaacatccttgaaatgtcaataccaccaccctgccctctttccgttccagcaaacatattccccacatcctgactgccaacctgttggacaatttgattaaccgtgttcatcatctgcgggctctgggtgaactgatgcaacatattcctcaggccatcaggtgagtcaactccagtttgctgtgaaactccttccaacaaaccattcaaggcaggactatgtaaagcctgagacattaaaccagccacatcaattggacgatcactggagggcaagggccgctgggatggcccattagcatttcttgaattcaaaccggatccatgacttgcaagagtttgcaatatatgttgaccatctgttctggtttgctgattttgattgacagaagaactggatgatccatcatcagcacctttacttacaggaggttgaagtctagttcgcctcttgcgctctaaaccacccacacccaatcctagtggagcagctttggcaggttcagttacattttgtctttcacttacagccagaacatcttgttctatttctggttttactattgtttctccactagaacaactttgtaaatcttggttggaagaacttgaaacaaatttgtcaaccaaaacattacttgaggtttgacttgaggtttggactgcctcggtttggaccttctgtacttcactttcagaagtgcagccaactgaggaagcactgatagccccaaaaccattcacgtccacggtatcttgctgtttgtttactgtaggaggtcttgattcagatccagaagacaagtccctgctgtttgattccatttgacctgatggaactgtgttatctccttgcatattaccaacaacgtttctaaggcgagaattgatttcagctaaaacagatgacaatgaagctgaatcagaaggtggctgtgaggtagaaataccaaacccagtttgtgtgctactagagactccaacaccaggagggtgtgatgggatagtttgctgctatgacatttctaacaggttaataccccgtgtttgaacctgaatcaccagagcccaggctccattatggtgtttcacttcttgtcccctcgcccattattttcccctaaaaaccaatggcttgaaacaattggtgcaaaaagt

SEQ ID NO: 2161 - DNA, 1289 bp, Glycine max
  misc_feature (1)..(1): n is a, c, g, or t
  misc_feature (3)..(66): n is a, c, g, or t
  misc_feature (79)..(79): n is a, c, g, or t
  misc_feature (95)..(95): n is a, c, g, or t
  misc_feature (98)..(98): n is a, c, g, or t
  misc_feature (104)..(104): n is a, c, g, or t
  misc_feature (135)..(135): n is a, c, g, or t
  misc_feature (203)..(203): n is a, c, g, or t
ngnnnnnnnnnnnnnnnnnnnnnnnnnnnnnnnnnnnnnnnnnnnnnnnnnnnnnnnnnnnnnnnnccctcaagccgtnatatccagcaagcacncancctgantaatcttaaagcaggaagtcataaaacttgncattctattcttccatatttgacagcctcttcaagtgtccaacccgaactaattcgataaacttttgncaatgaagcagaaagcatgtagctgatatattgtcctcaacaatctgtggataccattcacgcaatttaccaaatgcaacatcaatgtccccattcctgattagctgtcgtaaagtcttctctgtgattcaaggcatatgttatttcctgctcatcaattccactttcttgagctatgtatataggaggaacagtacttttactagccacatcaaatgaattcaatgtatcttcatagccatagtgtagcaggtaggagcggacaattccgtaactgacatttggtggcacagaaatttcctctattttcagttgctgcttcattctttcttgtgtttcaaattcctttaggtcaaaagtaaatggtttctgcccaaagttgacatgcacctcttcgttttggctgtgaacagcaacggttggaaaaagggggcctttcatgtctttgtaaacagagccgacaacatggccattcttagtgaaaaaaaattcctgggcagcatagttaattccggcaccaactacgtctccggatgtataggttgggccaaacggctctccccccttgccatgtccacggtagagcagaccatcatcgccgtgatagccgcagctattggcctcccaccctggttgtcttcgcatcttgaaggtctcgcaggtgaatccaattgctatctggcccttaacgccggcatccttgacatgaatctcgaaataatacatgaggcgcttggtaggagcaggcttgttggcctgaatgacaccgacgtcgtggccgtgaaggttgacgctggtgtactttaccgacaacttgtccgtggacaccaccacgaaaccaccagagctgttaatggtgttgagctcccggggggccggggggggggcctccgtagctgcctcttcctctttcatctccctacccctgcacgcctccaagaagtacagtcccagatcttgatcttcaacatttcgcctcctgctgttcccgttactctcactcatcgctatatcacaaccctaccacctctcttccttcgaattcgattcttactccaccacacacctattctgttcttttcttct

SEQ ID NO: 2162 - DNA, 1349 bp, Glycine max
tcagctacgtaggcccccccccccccccgagcaaaacggtgcgaatagagaaagggaacaaaggctttgaatttgattgcagttgagttagctttcactttcagtgtgagatcttcgtctcttctcttgcttccttcttcaattcatctccgaaccgcgtttctatttttgactctctctctctactcagtaagaatgtatactaatattggtatgccaccgggggtacctcagcatcatcctcaacctccaacgagctcacaacctaatctgttcgggaatgcatttaattctgctggttcaggactcattcgaggtggattgggtgcgtatggagaaaaaatattaggatcaagctctgagtatgtccaaagcaatataagccggtatttctctgatccccaatactactttcaagtgaatgaccactatgttaagaacaaattaaaggttgtgttgttcccattcttgcaccggggtcattggactaggattactgaaccagtgggaggtaggctctcttataaaccaccaatttacgacataaatgctcctgacttgtacattccattaatggcatttggtacctatgttgttcttgctggcatctcattgggtcttcgtggaatgtttagtcctgaagctttgaactggttgtttattaagggattggttggttggtttatgcaaacagcactgcttaaagtcaccttactttcattgggcagtggggaagcacctctattggacattatagcgaacgccgggtacacttttgctggcttgtgtttggctgtttgtggaagaatgatatggagttactcctactactttctgatgctgtggacctgcatatgtatggcagtgttcttggttaaaacgatgaagagagttctttttgcggaagtcaggagttatgattcaagcaaacaccactatctcttgctcttcattgctttggctcagttcccattgttcacatggcttggaaacattactgtcaattggctaatatagagtgacagcatttacactgtacttaaaagcacttggtgattttttttggttgttaactttggaaagtagttatacatgggctttttctctctcacagattgcttttatgtgttggatattgagatgaataactataggccttctcgctctccagatatattattttttagtactttatttgcatgaacccaaagatgtagattaggaaaatatttcttttacagaatgattatccaattgtaatcgaactctaagattaagattatggatggtgtcactgatgatgaaggaatattgtgcaacagtgattgaaaaaaaagacagaaaaaaaa

SEQ ID NO: 2163 - DNA, 1813 bp, Glycine max
  misc_feature (33)..(34): n is a, c, g, or t
  misc_feature (36)..(37): n is a, c, g, or t
aatctttgatttttagggtccgggaagaaaggnnannaggtaccaaaaaaataaattaaatttcaagttgaaagaaaacaaagtttcaacattaaataccagaataaataattgtcaacaaacaaaatctaagattttgcaagaccaatttgacatgccatctcttcttagttctctgtctactttttctacaatgaaagaatcaaccataagacgacgacaaaaggaaatataagacagaaagtgacaacttatctcacaaggtaaagtaaccaaaaaagtgtttctttcttccctctatatcaaaaacatgaacacacgtttaaattcaatctgtggtagaattcacctaacggatatatcccaggatgaatcaacaatctctcaaaagcatgcttctcacaggtcacgatcaattagccaggtcaagaatgcttctccaagcaccccaaaggacagatttaatatacctccaatgcagaaagaaatggtcgtcacttgtgagacaaatagcagatctgacttgcttatttagccagggaagctatatattatgattgctgcacttgtcgagatatctgcagcatccattcagcatacccactgttaccacccatctggtcctcaacaaggtttgcaagaaggaggaatccctctttgggctgttcaccttgcctcacaaggtggcacaactggtaatatgcacgatctgtatttctcaacttctcaagtaccttcaccagcctccttgacatttcattatcatgctcactgagagtagtctttgataattctgcagcaaagtctgccccaagtaaattctttgctatatcaggtgaaatcaccctaccaaaccatataatgaaccggatgccatcatcataaatataaagacctctagagtctaagctctccccagtcaaaggtaaccttctctcaacactttttaagtcattagcctgtacagatgccttcagaagatattcatcaagtcgaatcaagctaggatagagaagtttcaacagtcttcttattgatacagtcatcattatgtgtcctgctgcacatcgttcatccagtggaacatcaccataccctccacgtaaagctgttgatctacaaagggctaatccatacaacattaagaactttaaagactcaggatatatcattctgtttgccaagcgatgttgcacagcataaagatttcgatattccctgagggcttttacaactcttagttgaacagcactccgtgcatcttccagtttttgggacaatgttttctcaattgctagcctacttaacagtgatacaattgcaccagtatcagccagccgatatatatctgctaactctgtaactactggaactgccattgtgtgtactcttattcgcctttcaccacaagatgcagtatatagcaatgctacttgtaaatacattgtctgagttgtcaacaatgtctcttcaagtgataactgcatggcaaaggctttggggcgatctccagccggaagtgctaaccaggggggggcccgggacccaaattcgccctaatagggagtcctaattacaattcactggcccgtccttttaccaactccttgactgggaaaaacccctgggcgttacccaaacttaatcgcctttgggaaaaaatcccccttttccccaaggtgggcgaaaaaaccaaaaaagggccccaaccgattcgcccttccccataagttggcgcaatcctgaaatggggaaatggcaaaattggaagccgttaataatttttgtttaaaatctcccgcaaaaatttttt

SEQ ID NO: 2164 - DNA, 2410 bp, Glycine max
  misc_feature (277)..(277): n is a, c, g, or t
gaaatttgcagatccataagcaacccctgttaccccctctggtctaacaaggtgaaaagaggaggattcttcttgggtgttcccttccttcacaggtgggccaccggtaatatgcacgatcggatatccaccttctcaggaccttcaccagcctcttgacatttcattatcatgctcactgagagtagtcttgataggttctgctgcaaagtctgccccaagtaaattctggctatatcagggtgaaatcacccgaccaacccatataatgaacggnaacccatcatcataaatataaaggcctctagagtctaagctctccccagtcaaaggtaaccttctctcaacactttttaagtcatcagcctgtacagatgccttcagaagatattcatcaagtcgaattaagctaggatagagaagtttcaacagtctttttattgatacagtcatcattatgtgtcctgcagcacaccggttcatccagtggaacatcgcccataccctccacgtaaagctgttgatctacaaagggctaatccatacaacattaagaactttaaagactcaggatatatcattctgtttgccaagcgatgttgcacagaataaagatttcgatattccctgagggctttcacaactcttagttgaacagcactccgtgcatcttccagtttttgggacaatgttttctcaattgctagcctacttaacagtgatacaattgcacccgtatcagccagccgatagatatctgctaactctgtaactactggaactgccattgtgtgtactcttattcgcctttcaccacaagatgcagtatataacaatgctacttgcaaatacattgtctgagttgtcaacaatgtctcttcaagtgataactgcatggcaaaggctttatcacaatctacagcaggaagtgctaacaaatcagtggacctcagcatgaagtttccatgataagttgtgaagcgaacaccttttgcacatctaatgcgcattacagcttcccatgcagtttctctggtaaggtctctcctcaattcatgtctcaatttctccccatgaatggctgattggaaagctgggtagtaatacacttgaccagcagtatactttgccagagttcctaaggaggctatgtcagtgtacttatcactgaatgcatacacatttgttgagatttggtacttggaaaactcagcagccatttgtttatagaatggatcatcaggcagtctcaatccatattctttgtctgtcccgtaaacacgagaatcatctccacgtaacttcaagcggccaacaccaagagatggaagtgtgttttgaaatattaacaatttccctccaagttgactcataaccataaatgcagccttaagagcaggaccaaaagctgattccaagtttacattgtcctggaacatggttggcaaactatctaggaaggtttctaccacatttcttgattcagacaagttaacgagaagatcatctggcagtggaataaatatatcatcgagatctgacactaccaacatctgtggttgagtcaaggaagacttcatgttataaaaatgtattgtgctgtcaaaagttgcaaaccctatttgcgtacgtggaaagccgggcagctcatctaagcatgactttattgtattggctacaacctcaatcatgccacttctaacagcagatatggaaacatcaatgaggaagaaatacactggtggcataggaggccgcaccatgtactcagcaggggcaacaaattctacggtcccctttgtaagctcaggtcgttgatttatgtcaactctttttccagttgcatctaattgtgcataatactcactaggcacatcattaagcaaggtacagacgttgcaacgaaactttcttccagcttccgtaaatgtcatataaggattcacatatgtgcgacatcttctgcagcggacaacactagctggagcaaaattaactataggcacctcttccccatcaggaggctcagcaagcggacatacaactgctccaagaggaagatgccaccttgaagccaaggactgagagctaggaactgcactggttgtgagtcgtagataccggggattgcagttcatgggatacatgtcaaccaaattctttggttcaatatccccttccaatggccgtggaagttccttggcatcaaataacggatccattgttccaggacgagtttgcaatgtgagtgcgttgaagtcttctgccaagccctgaacggcgcccacgcggggctcggatcctggctgctgcattggctggatacctagtgggggagccattgggggtgatggaacataaactcctgggtgagacaaaaaaggagaagaagccgcagcgaacgcgtgag

SEQ ID NO: 2165 - DNA, 1088 bp, Glycine max
ttttttttttttaaattaaatttcaatttgaaaaaaaacaaagtttcaacattaaaatatcagaataaataataattttcaacaaacaaaatttaagatttcgcaagaccaatttgacatgccatctcttctcagttctctgtctactttctttttctacaatgaaagaatcaaccataagatgacgacaaaaggaaatataaaacagaaagtgacaactaatctcacaaggtaaagtaaccaaaaaagtgtttctttcttccctctatatcaaaaacatgaaaacacgtttaaattcaatctctgtggtagagttcacctaacggatacatcccaggatgaatcaacaatctctcaaaagcatgcttctcacaagtcacgatcaattagccaggtcaagaatgcttctccaagcacccccaaaggacagatttaatatatctccaatgcagaaagaaatggtcgtcacttgtgagacaaatagcagacctgacttgcttatttagccagggaagctatatattatgattgctgcacttgtcgggatatctgcagcatccattcagcatacccactgttaccacccatctggtcctcaacaaggtttgaaagaaggaggaatccttctttgggttgttcaccttgcctcacaaggtggcacaactggtaatatgcacgatctgtatatctcaacttctcaagtaccttcaccagcctccttgacatttcattatcatgctcactgagagtagtctttgatagttctgctgcaaagtctgccccaagtaaattcttggctatatcaggtgaaatcacccgaccaaaccatataatgaaccggaaaccatcatcataaatataaaggcctctagagtctaagctctccccagtcaaaggtaaccttctctcaacactttttaagtcatcagcctgtacagatgcctggaacaccggaggaattaataattcatgcatctgacagtttaaccatattattggtatctttttaaggtaagcaacgtataccttcagaagatattcatcaagtcgaattaagctaggatagagaagtttcaacagtctttttc

SEQ ID NO: 2166 - DNA, 1505 bp, Glycine max
atgcctgttctacttctgggacttgttcttccacccaacgagtggagttaaattctaacccaacaaacaaacacaacaaattcaaattgtgcgaaaaataaaacagaaagtctcttgaacaaaaacttcgaactcaccaactcaaactcgctgctttcaaacttcaaagtaaaacccaactctatttccttctctcaggtctcagagtggcaaactgtaaagttttgatgcagaatggctgcaaccagggctcgagttagtagcttctctcgcaatgtatcaactgtgacttctcagaatcatggacttaagcatggccctaatgggacaatgttcatttcatctgggattccagatctggacaagattttaggtggtggtttttctctgggtagccttgtcatggttatggaagatcctgaagcacctcatcatatgcttctattgagaaattttatgtctcaaggacttgtgcaaaaacagccactcttgtatgctagtgcatctagagatcctaaaagttttctcggtactttgcctagtccggcgtcacccaaaggggataataaatcttcagatcttagccatgaaaaggatctaagaatcgcttggcaatacaaaaagtattttggtgagcctcagctaaatctgaacactaataatggtggtcagcatgattactgtaatgattttgacttgagaaagcccctggaccggcacttttttagtggcaataatgtagattgtgttagcatcaaagattctcctaaccttactgctcttcaagattgttgtgctggatttctagctaaattctcaagaaatgaaggcagcatttcctctgctggtcgtattgcaattcaatcattctgttctccacaatgcaagtattcaaatgaggagtggcatatgctttcttttattaggtccctaaagggcatggcccggtcttcaaacgctgttattgttgtaacctttccaccttcacttcttcctccatcttgttcaaaaagattgcagcatatggcagacaccttgctttctgtcaaagccattccagatgaggataaggaacttgcaaaactcctcactggttaccaggatatgattgggcttctaaatgtacacaaagttgcacggttaaatacacaggttcctgtgattctggaggccacaacattctccataaaattgcaaaaacgaaggtttttggttttagaatgtctaaatcaagccccagttgatggttcaagtggcagttcgtatggcacatctggcggttgttctgggtcaactaaagctggaccacttgatttttagactataccttatttataactgaaggcttttatcaaccaaaaatacgatatagccatagtgagtcaggctcaatgtttttcttagtgcttgaaatttagccttctaaattgtgttactccttttcttttttgttcttttgatgattaattggttgcaccaaaaaaaaaaaaaaaaagcttatcgat

SEQ ID NO: 2167 - DNA, 1710 bp, Glycine max
aaccttggatcctatacagcggagcggccgcggttttttgttttttttttttttttccacaacatgacacatcttatttttgagaaaatactccaaactccaaagccaaccaaatcagtgcccacacggcttattcaccacacccatttgaacaaggtccaaaaagcaaaacaacataggaaattaaacaagcaaacaaacaaatacaaacgtaccaattaagaagacaaacaaaaattacacacgttcaactagctagttacaaagctcacgcgctatgccaaccctattattaacggtatcaaacaaaactctaaggttctgttgctgatagttggcaatgacattgagcaccgagttcacgttattcggcgccgccgccatcgccaagcacgccatgccgccgtaggcggtgtgtatgagggtgttctcgtagggcaaagtcacatccaagcccgtgaagcgaagcttgatcaagggcgtcaaattctcgtaggttttcacaaagcacgtgtcgaaaccacctctgctgaagaacggtcccttcacttggtttctaaactcatcccttattgcactgtaaaccggtcctacgaaccgggttatgaccgtgccagaatctaggatggttccggagcccttattcgggtcgaacgccagatattctatgggtaatgggaccttaacccggcccacggtgacgccggtgaggttcacgtagtaaagagagggccgacgcgggttttggaggagcggggtggtccggattcgcctaggctggcccgtgggcccaagtttgagggacccagagaagtaggaggactggaaacttgggaggcagtaggagaaaatgccggagtagagtttggaggattgggaaggaagtgacaagggcccgcggcccaagcccaataggccttgggccgggagcgtccagccggaggcagagttgacgcacccgaaagcgtagcttggtagggtgtcgatgcccaatctgagagagtcttgcacgagagtggcggagaatgtggagcctgcataggattggttgaatgtgcaagctttagaaccagtgtaggggcaagggagggcaccacgagcctgggcacaacgcggggcgtagcaagctacggcgccgccataagtggtggaggcttgaggggaataataggtggaggaggaagagcaaccagtgcagccggtacacggtacccaagcctcatcggtgctggtatccagaaccataaaaaatagttggttcggcgaacccagtttcactcggaccacgtagctaccaatcccgaaggcttggcccgaagcgattggggctgcggaaatgggctttctcctcaatgaggcgtcgaggctagacaagtacacgactctttctgggtccttggaggccatgtcgatgatgatgttctcccacgaggttgagtagttcttgaaaggcgagcaattgccgtagatgggaatcatggtgatgtcggagtcgtcgtcgtcgtgttgagaagcgcatggatcgttggcaatggctatgatggagaggtgaagtagcattgaagtgaaaagaattgtggtggtggtggtggtggtgtgcttcacacccatggttgatggaggagggagaaaaaaggttgtagctaagacctaagaggctaatgtgtgcatgcatggacgagtcctttaatacatgcaaaagtggaaatt

SEQ ID NO: 2168 - DNA, 1514 bp, Glycine max
  misc_feature (1499)..(1500): n is a, c, g, or t
gacaaaatgcaaggaggttcagaaaattgtatgctgacaaggaagatatctttgttcctgatcagctacgtaggccccccccccccaaagtactaacaatggattgggttgatggggtcaaactaaatgagcaagaagcaattgagagacaaggattaaaagtcttggatctggtaaatgcaggcatacagtgcagtctcagacagttactcgagtacggatattttcatgcggatcctcatcctgggaatcttttggcaacacctgagggaaagcttgcttttcttgatttcggcatgatgagcgagactccagaagaagcaagatatgccataattggtcatgttgttcacttggttaaccgagactatgaggccatggctcgtgactactatgatcttaattttttatcaagggatgttgatgtatctccaattgtgccagcacttcgaaacttttttgatgatgcacttaattatactgtgagtgagctcaactttaagacactagtggatggtctgggaaatgttttgtatcagtatccatttaatgttccagcatactacgcattaatatttaggtctctcactgttttagaaggtttagcattgtatgctgatcccaattttaaggtacttgctgcatcatacccgtattttgctaaaaggctcctaacagatccaaatccatatctaagagatgctcttattgagttgcttttcaaggatgggaagttcagatggaatagacttgaaaacctgctagatcaggggaaaaaggatagagatttttctgctaaagaggctttacaacctgtcctaaaggtattattgagtccagatggtgaagagctgaggaatctagttataaaagaggctgctcgggtatctgaagcttttacccttggctcaatgtctgaaacataccggtatattcctgacttcgttaggacccttgtcttcaatggcaatgcaactggaccctttatgatgtccgaaactgaaatgcaaagcatgatagagcttagagatcaagtgattagaatatggggacttcttcgatcctccaacgattttgatccagctattttgctgccaatactacaggtccttgagcaacctgaggcacgccaacttggggggcgtgtcgtgggtgggatcactcaacgacttgcagcacgctttcttcagcaagtactccgagttccaacaacagcttctgaataatttcgtggcactgtaaatgctagataaggctattgtggacagggaagataggagtcacatagaattgagatattgattcttgcgaaaattatttgagtgtcttttatgtttcttattctccaattttgtcaaaagatttgtatatatgatgcgctcatcattattgatgctggatatcatgatcagcatcaacattcaagagatcccaatatgataaaaagcaattgttatattattgctcttacaataacatggggctgtttatcttttgcnnaaaaaaatgatcat

SEQ ID NO: 2169 - DNA, 598 bp, Glycine max
gcacgccgcttgcacaatattttagtcacccgtctctccttccacacttcgcaattcaatctctttctcttcctcttcctctctctctctgtctgtctttgtcgtacctttccttcatcctcagggcgttttgtctcattttgttattcaagaatcaattaaaaaaaatgactcgcggtaaccagagggaacgagatcgtgaaagggctcaggcaagagctggtggaaagacaaagcagcctaagaatgatgggttgacccctgaacagcgaagggaaagggatgcaaaagcattgcaggagaaaacggcaaagaaagcagctcaggctgcaggagggaataatgcaggtggtggaggcaaaaaataggcaaaaatcattgacttgaggaatgtaaatggagtgtagacatgggaaaaattatattgcttattatttgtgatatgggtttttggtttagagtcatctgcttatgtcatttcagaataactagtgttctgtgaggagggcattgttgttggcttatgaacctttgatttctatataatttggaatgcaatttgtctctagcttgttgtgacaaaaaaaaaaaaaaaagc

SEQ ID NO: 2170 - DNA, 1025 bp, Glycine max
  misc_feature (1006)..(1007): n is a, c, g, or t
ttttttttttttgtttacatttcactatttttttttgttctttttaggttcaagttatacttcagcacatatatgaaaaaaaatcataatacaattccgctcagtaaacaacactcaaatcagatagtcatcaataccacaatctcttctacgggactatggaaaattatcaaccaacaaaccaaaaatatagacaggccttcactttcattttaagaagggaagtaagattgctggactggagacaaacctgcgcccttccccaaagaaaaagtgaggaacaaggaatacacaagattaaatacaagaaatacattacacgtaacaggttccagatagcaagactgacaacccactccaccagaggcaacagtcggaaagtctgaaaatagaaagaaataatgcatcgggtggaattgctaaactaaaaggcactccaattatcagatcctcgtcttggagtttgattatccgatgaagtcctaaacgggccagagccaaagggatccgagtcatcaaaagctggaaacccatgagcatggtcaaaatccgcactgttgcgcactgaatcaaattgttctgtcgtctcccgagcaggcaaaggtacactatcatgtgttctgaaggaatcaaatcttgagaagtcaaaagcagtttccaaccactcttttggcctttgcggagagctacttgaactgaaaagtggcgtgcttggaacagaatcgtcaaaactgaatccactgctcctctggaagggatcaccagcctgtggcgaacctgttttgatggggtttaagcccagttccccagaatcaaagaaatagttgttcccagctctatcaagttctctctcctccttagtgaagctactagcattgaatccccaaactgaatcaatatcatcatttgtgtcgaaggttccccaatttggttcatcaaaatttttgtccccagaaaacacagactggacaccaccatgatcactttggtttcttggggggggggnnggcctacgtagctgactc

SEQ ID NO: 2171 - DNA, 1796 bp, Glycine max
cagaaaacctgagcaaaaaacaaaacaaaacagtaagctaagcttcactgccatgcctgcaacgccattctcgtgttcgttcctcactcttcaaccgcgcttcaactcctacgttaaccccatcttccgttcactcaccttccaactctcttcttcgccgctcccattcaatgccaacttctccagcgtcagactccactcttcgctctcgcgagcggcggagaccgattctccgaccggcggaaggtccggcgcgctaactcccggtcccgccgtcgccggtgaagttcaaaagatcgacgtgaatcctcccaaggggacgcgcgacttcccgcccgaggacatgcgcttgcgcaactggctcttcaatcatttcaaagaggtttcgcggttgtatggatttgaagaggttgattacccggtgcttgagtcggaggcattgttcactaggaaagcaggagaagaaattaaggatcagctttattgttttgaagatcgaggcaatcgccgtgttgcattgaggcctgaacttactccttctttggcaaggctggtgatccagaaagggaagtccgtgtcattaccaataaagtggttcactgttggacaatgttggcggtacgagagaatgacaagggggcgtcgtcgtgagcactaccaatggaacatggatattattggtgttcccggggttatggctgaagcagagcttatagcttctatcgtcactttgtttaagcgaataggaattacagaatcagatgtcggatttaaggtttccagtcgaaaggttctgcaagaagtattaaattgttattcagtaccagaaaatttatttggcaaggtctgcgtcattattgataaaattgagaaaattccagctgacgagataaagaaagagttgaaagctgttggtctatctcaagaggctgtccaggagctattgcaagtcctttctgtgaagtcattgaccgagttagaagagagacttgggagcagtggggaagcagttgctgatctgaaacagctattctcccttgctgaaaaaattggttactctaaatggcttcaatttgatgcatcagttgttcgaggtcttgcttactacactggcattgtatttgagggttttgaccgagaaggaaagctgcgagctatctgtggtggtggtcgatatgatcatttgttctcaacttttggtgctgatgacattgctgcatgtggttttggatttggtgatgcagtcatagtggaattgctcaaagagaagggtctgttaccggagcttaacttgcaaatagatgacattgtgtgtgccttggacgaagatcttcaaggatgtgctgctatggtcgctaacattctcagagaaaaagggcagattgttgagttggttttggaaagcaaaccacttaaatgggtttttaaacgtgcagcccgattaaatgctgagcggcttgtgttagtggggaattctgaatggcaaaggggtgtggttggtgtcaaaattctctctactgctgaacagtatgaggttaaactggatgatctgaagtaaatcagaatttgaattttttgtggttatgtattctgtctttactattggtattaatttcaccttgattttttttacatagtcctttgagactcaagtacttgttttgtatgtgtacatactcacctgtgtatgcatatgtgattatccatataccaaaacttccgcttctgtttacattatttatccatttaagttcttcaccccaaaaaaaaaaaaaaaaaaaaaaaaaaaaaaaaaa

SEQ ID NO: 2172 - DNA, 1893 bp, Glycine max
  misc_feature (115)..(115): n is a, c, g, or t
tgctaccaatacagttcctatcgctatatgttattcttattccataatttgtaggtcaaagtaaaaaggcatatgctttctagcaaagtagtatttcgggcgggggagcagtaanttgtcctgcctaagaaacttatatgggtaagcatggaagagaagagatatttcaatggaagctcatcatgatgttccactctgaaacccagttctagtcaatccgggagggggtcacattcatctgtaagcggaagtggattctttactagaactatgaatctggttaggtcactttttgggataaaagttggggaacgtcttcctggcgattacgtgcgtaccgatagtaaggaaaattgtgagccttttttctggaatatgatgatgaataataccttgagactatttccaagcaaagtagggatggtaatgagtatttttcttttcttaatataaacatatacttttctgggcgggtttgataggaattgttggcttttaacccatgatcattttttgcatgcgacaggaaaaaatcatcaacctggaatataaatatgcatcttctaagtgattattattttcggagataaattgctcagcgtgatcgcagcgcagtcagtgaacttaaatgaagttaacgatctgtttttttttttttttaggagctgcaacaatatacgttgcattaatataattgctattagactgatttggagcatctgttcaagtataagacgaaacgataagggggttccttcctagtcaaggcaaaatttgcattcttaatttgctatacaagtatttaccaactctgtctacctcccgacaaaagaagcacactaagagcagctggaatttgacgtctcacatttgataacccgggtattgtaagagccacaaaatccacatttgtggtacaaccagtggaagcgtgaagtgcccttccgatcacagtcatggcagagtatgtcctgacaccggtccttgtactcttcaggaagttcctcagcagccaatagggcatcaagcataccaaagtaaaccgccatatctcccaatgacttgctgcagattggacatgtgtagtgactacacgtgtatgcctggaagcaagcagaatgcatatagtggccacaaggtagagctctgactgtggcacttgaagtgaacaggtcatcacaacaaattgggcagttcatttctaaacctttctccaggcacttatgagatgatgatttaatccccaggcaacaattgcacttcatgcaatgaaaataatcaataccaagcccttgtccaacacggcataaattgcaaaatgggcaatgatatacattcctttcatcatcaaaaaatttgcatatattgcaatagtactttgccattgaaaacccattacatgaaggtgttatgcataggggccctattggctgtatattcaggcagcgcatacacatcatttctgatgttgcttttctatccatagagtgatcgcggacattgtcatgacaaaatctgcaagtaaataacttgccacaacatgcagcccgaagcttgcaatttctcttatagtgctcacacccaaatacatgtttccctgggtcccgaaatgatggtgagagtccttctatttctacactgttagatgatccttcagataaagctttaggtgatttctgctgggcagctatccatcgacttgtcagtagattctgcacaagatatgcttttctccttggatcaagagttgagtctcgatataccttgcggatctctgactcaagttcattctgattcatccgaaatatgtctttccaacctggcttgaacctcggatcattgtggtccaagctttcttgatatacagcacctctccgagaagtgcctcgagcc

SEQ ID NO: 2173 - DNA, 1839 bp, Glycine max
gctcaaaatgattttctgttgtttattaagtaaaccccataaaatcttttggtatatatcggcccatcataaaaagaaaaagaaaaagaatctaatgaaagctggcatagttcatttagtctcccttctcccaacgattgctgggtaaagcaacgctagtgcgcactttaaatgaactttcaactatttcttgctgctgctgttcaagaggaagaggtaaagtatccactgcaaaacgaagtttggaagaaagcttatctatacacgacaactatggacttggtttggggcttctatgtccggcttacgagaagacaggttaactcatgagaggtctcattggaagtgactcgcattgtgtataaaatgaaaggtaaccagtttcctggtttggggaaaattggattggctatacaaatatttacaagctctgtactttcattacaaaaaataagcatactaaaggcagctagaatttgctgcctcactcttgattacccgggtattgtatgagccacaagatccacatttgtgatataaccagtggaagcgtgaagtgccctttctatcacagtcatggcagagtatatcctgatagcggtccctgtactcttcaggaagctcctcagcagccaataaagcatcaagcataccaaagtaaaccgccatatctcccagtgatttgctgcagattggacatgtgtagtggctacaagtgtatgcctgaaagcaagatgaatgcatgtaatgcccacaaggtaaagctctcactgttgcacttgatgtgaacaagtcgtcgcagcaaattgggcagttcatttctaaacctttctccaggcacttgtgagatgctgattttatccccaggcaacaattgcatttcatacaatgaaaataatcaatcccaagcccttgtccaacacggcatatattgcaaaatgggcaatgataaacattcctttcatcatcaaaaaatttgcaaatgttgcaataatactttgccattgtaagtccattacatgaaggtgacatgcatataggcccaactggctgtatagttaggcactgcatacacatcatttccaatgttgcttttctatccattgagtgatcacttgcattgtcatgacaaaatctgcaagtaaataacttgccacaacaagcagctcgaagcttgcaatttcgcttatagtgctcacagccaaatatttctttctctgggtctcgaaatgatggtgagcatccttctatttgtttgctagactccccagatggagccttaggtaacttctgttgggcggctatccagcgacttgtcattagattctgcacaaggtatgcctttctccttggatcaagagttgagtcgcgataaaccttccggatttctgactcaagttcattctgattcatacggaatatgtctttccaacctggcttgaacatctgctcattcaggttcaagctttcttgataatcaccacctctttgagaagtgctacgctctgacgcttctgtctgtgatgtagatacaggactttctttcaagcattcatttagccattcattgaacatggtgtttttagttgcctgtttccatgtgtccatcattttgttttgggcggccgggcctacggcgctggttacccatggtaacattgattggagaacttcagcacctgtagttccaattatccggcccactatcttgtcttgttcttccacagtgaaatgttttccaaacaatggccagagctcgagctcttccctaaaaatatgttgatccagggtcactctaatagatttgcacatcccttgaagcttagttgcagctcattg

SEQ ID NO: 2174 - DNA, 1520 bp, Glycine max
  misc_feature (62)..(62): n is a, c, g, or t
ctagatagcggccgctctagcggtcgtccttttatattctgtgtttggtttttttttctgcnagatatcgtgacaagagttgttttattcttacattaataataataagcaaagcaaaagctggtggctggtaaacaagaattagaaaaggaaagggtggaaggagatgcatttatttaaatagaagaaaagaaggctaaatcatagaggttatacggaaccttgcaatcctaaagtaactgatatcatgggatttagtttccccatggacagcaaggtccgtcaatatcctgccaataaccggagccatcttgaagccgtgaccagaaaagccggctccaagaaccacatccttcccaaagtccccacccaagaaatcaatgaggaaatcctcatctggcgtcatggagtagatgcaagactgtttgatgacgggctcagtggattcaaccatccccttgaacgtaaactccacccattctttgagtttttccatcatcaccgctgctccccacggcctcttatccgggtcgcacggctcccccccgtgcacaccaaccttaatcagccccggaaactccaacgttggcgtgccgtagacgtaaatatctttctggaagctcgcgaatgtcgggaacccgctccctatcgcgaatttcccttcctgcccctccttcaccctccagtaacaaacgtgcgtctccagtggctcgatcggcagttccaccccgctaacggctttaactaatttcttcgcccacgcccctacagttaccacgcattttctaccgcggaatttttcaccccccgctgtgaaaacctcgaccccacctgtgccgccctctttcttgatgtcgatgaccttggtgttgtccttcaagacggcgccgtttttgtaggctagggtttggaacatggccactgcttttgtgggcttgatgacgcctccgtgctcgttggagaggcccacccaaccctccgggatgtcgatgcggccggagaatttgtcggcgagctcttggcggccgaggagtttgaaggggatttggaggttgcggcagtagtcgatgagggcgcgcatggcgggctcgttgtgatgggccatgtccatgtgatgggccttgaagtagatctggtagccgacttgggcctgcgcctcttgccagaggcggtaagagtccatgactaaagggtagtagtagtggtggggataggtgaggcggatggtgcgggattcgccgtgggaggagccacagtggtggaggaagtcgaactgttccaggagaagggttttaaggccgcgtttggtggcgtggtaggcggtggagctgcccatgacgccagctccgatgataatcacgtcgaactctgaattggactccataagtcacacacacactctcagacactttcactttctctgataacaaggtgtgatggcgcttccattgtttaatatataaatacagtcagtgttctccctgaatctcactgtgctttagcacgacatctttattggt

SEQ ID NO: 2175 - DNA, 1302 bp, Glycine max
gtagagaaatttgtttccccattatgtaaatcatacccatgttcttgttaaaatatcaaagcataaatatagacacacgcttttcatatgcaagggcagtatgaactacgtatcccgagctgattacttgctcacaccacaaataaaatggagatctctaaacgttaagaaaattcttgagagcaataatttaatctagatatataggttgtaataaaaatatttctgatacatgtaatgaaatttaattgcacttgaaatccggaccataccaaggagtggaagatgaaatccccttaaacatgtaaattaccatgagcagcagccactacttgatgcatcagacagggggggtttctgcttgaagatgttctttttcacaccagatgagccctcagccaagaggcttggtgtctccaaaatcttcatcacaagctcatcaaaacactgtgtaacattgactctggtttttgcactgcattcagtatacagacaaccatattccctagcaaagtctattccttcctttttgctgacaaccctttcactttccttatcaactttgtttccaacaagcatcttgatgcaatcttgatttgttgagtataagtcaatttctttagcccatatatcagatagatttgtaaaggtttcccgccttgttacatcatataccataattattccttgtgctcctctgtaatatgaactagtaagtgttctaaacctttcctgcccagctgtgtcccaaatagcaagttttaactttttccctccaattgtaacatatttaactttgaaatctacaccgatggtgggagaaagatcctcgaaggtatcggaggtgaagctcaaaagcagggtgcttttgccaaccccagaatccccaatcaagagaagcttgaacaagtaatcgaattcaggttgactcgacgaggaagatgaagcatccattgagaacccctaatgagctgatcaaaaataaaaaagagaaccccaaatgagaaattcgatcgaccacgcgttggacttgggtcttgactagatgtacaaatattaatttggattggatctaagaggggattttcctttgttcggttcgttggaaattctagacttgacttggattcggtggaaagtggaaaaagattgaagtgaaggaggattttagtagaaggttgcggacggtcaaagaaaacccgtttaaagtttgtcgcgtgcttgctgctgtgagtgtttgtttgggttgtcggtgttttcccacccaccttgtgcccccttctgtcgtcttctcgcagccgt

SEQ ID NO: 2176 - DNA, 1197 bp, Glycine max
cggtggtgccgcctccctgtgttggttaaacagcatcccgggaaaattataattaatataaccttcagaaggcaaaatccccacgctggcgtaaaaatatattgttacatttcacctctaaacgcacatcaatgcatgcaggtcatcgctgtttgattccaaaaaagagagaatattctaaaactataatttttatcttcagcagccatttaattttacaaattagtacataaatccaaccttagaagatggacacatctgggggtggtccatatacactcatccaagaaagtggaactcgccatttgccaccttcaattccagtagtagggtgactcagctggagaagtttacatactgcatcgcctaactgaaaagcatccgatatgttgtccccttctgagcaataacataacaagcaggtgaccttcaaacctttagccttgagaaaagaaaaaagtgcagcaaaaggcaagctagcataataattttcttcttctagctcatcttctaccgaagtaatatcttccacagttacatttccttcagctaaatcactaagatatttccaatgcatttgagaagggtcatactcttgaagtttcttccacccaagctgttcacaattttcatctgttccattgctgttggaactagaaaggtaataaatctgcaaaccacttgacatgtcaactttttgccattttccaaaatctaagctggagagaacaacaatatgcttctttccactaccagcaagaaaatcagccatattttttgcaaactcaatcatcatacccttaaccaccggtgatctctgttggatgatagtgagagcattagaaggggaatcataagcttcaagaggaagagccaggtctccttgaggaaagggtccataagcatcattgccaacacagggcaaaacgttaggatcatccaaatacccaactctctcagaacccattgatgaaatcaaaagatctgcaactagctgccccacattgccaatcgacagagcaggcaaaatcaaagtggagcaatcctcgtgaaggtgcttgccttcttcaggaacgaactccattttctaagctaatgctgaaatttgttactttgtcacacacgaagaagcttcagctctttctgcctttgctattcttttcagctgttttcgggggggggggcctacgtagctga

SEQ ID NO: 2177 - DNA, 1169 bp, Glycine max
ttttttttttttttttggaaggaaatgtagtttatttaggtttactatttttttacccatacaatattacaataagatttcatattaagtaataattgcaaatacaatagaatctactgaattggtctttaaacaattctagccaaactcaattcatcgttatgttcttcagctgtggtcacaaacacattctatcatagtatgtaagcgttcttcgatccttttcttgtgccaataatacatccagtaccatgacctttggtatttatgcatgcaaaagcctcaagctaattcaagccaagcaccatgacaaacctcgacacaattagagagtttattatgccctacgtttttttccactccatgatgaaccaggccacgatagtttgggtacttgttccttactcttgttaactagtctttgtttgacttgttttttaagaataaggttccgagcttgtttcttcttttcttctgccttcattttggagagactgggcctgtatatgatgagagttcgaccaatctgaccaacagccactgaaccagttgcttcttccaactgcttcaccacatcatctaactcgcctggacaggtcctatgtattttaatcttgagaagctcgttggcttcgagggtctcaatgaaagaggtggcaagattgggcgtaacaccagactttcccaccaactgggtcttgagcttatcccccaaactgtgagcataagacgcaagctccttcctttctttcacactcaaactcggaacctccaacttcacactctctttcctctttctctccaacggtgagcaagtgggacccaattgggtatcttcaaaatctcttcttggagtctccaattcatcatcatcgtctgcaatctctttttcttccaattcttcactatcttgagaaacggtaagggagggggaagaggaagtagagaagagaggttttcgaagcggtggaacttggatatgccgaaggggtgtagatacagcatagggggaagaaacaagaagaggtttgagaagagaaatgaaagagggtgatgatgataatggttgtgaacgaagaacaaacaatagatgagaagatgctgatactactgccgccatttcagtttggatgaatcgtgagcctagtgtagtgtattttgcctaggac

SEQ ID NO: 2178 - DNA, 1851 bp, Glycine max
gccgccgctctttgttttttttttttttcggttcttgtctcgagtttttttttttttttcttggaataaagtatcaacccaaatatatatcatgttatctgttaaattgagttattatacaggaatccctactaaaatggacatcgcactacctcttacgaaaaaagagtaaccttagtgcaagcaccccaacaaaatacacaattcaaaatacatggcagccaatcacgaccagctggcagtgatagcactaccttaaattatcattccctcatctatgcgtagaattattagacaagcaaaacaacactgcacaatgcggtccccgccgacaagatgcgatctccagcacatacaggcacattccacacgagcgatacatacaatacaccccctcaaaaaccaacaaacaatcaaataaactacaaaccggatatcaaactcaatccttgctggttgaagtaggtctctgggcacccgggggggcggttggcctagggaaattataatcaaattgcatgccagcaaagcgcggggcctccacataggggctctgagacgaaaaatcaggacttgaagatttgggtgatgtactaggagaagtatcattgccagtttcacttccattcaacttgtgtactgccttatttggtacactttcattctcgtttccattggctgatttaaccctctggaagattttaccaagagtttttaaccctttagctcgagcgcggagttcttctttcttggcaccgttgtcttgaagaaccatttgacaaacgcgggaaagagtggcttcaatgtctgccacattaagcttccacaatgagtcaatcattaatttcttgtgattttgcatgtattcttcaagctcttcttcagtatagtccccttctgaactgagttgctttttcatatcctcctgcaattggattaaagcaattgcccctgttgctgctgtaacttgagatttaatagagtgccctttgtttctaaaccactcagcaataaaaggcacacccaaataaattgctttcttccctagctcttttgctgcctgccttgcgtatatgtagccaatggtattcaacatatcaaccccataagctgcattagatagccgggctacttcagcttctgcatcattaacaaaaccctctttgtttccttgaacatattggttgagtctatttttcagtatctctgcaagcttttcttctctctccttctgaacaaccctcattttctcttgcaactttttactatcaaattgttctccttcagtaaagatgtccattgaagccattgatgccatggctaactgacctatatattcctcaaaaagctcactaccaaaaagcatggcaaagattgctgcaggatcaataattgcttcagttgaaattcctgattttccatgagcatcataagcttgtctttgagctgggtcactcagaacttggtaagcctcacctaaaacctgaaaattttgtgcagcaagagggtcatttgggtttttatctggatgcacttgccgtgccttaatgtaataagctttcttaatctcggcttcggatgccgtagggctgacacccagcacgtcatagtattcggtctccttcaccatttcaaagcccagttgattgatagtggatgacgtattccaagccaaaaccaaatggcgttatccttctcactaaggcctaaactctctctccgcctgttgtggttggtatggacgtgggaatcccgggcgttgactgctgcaaccgcgtaattctctgtgtgaagccctcctctccggtggttccgactttttgccctcacgcttctaatcaaaaaaaaaat

SEQ ID NO: 2179 - DNA, 1646 bp, Glycine max
gagagagagagaactagtcttgagtttttttttttttttttttttaaaaacattggccttcagacgtaattagcatattaggaaatatttcacgtgtcacatgaaaacagtctggaatcagaaactattgaagtttcattttataaaaacatactacagaagtggatattaaataaacatcctatcctagcgcgacgtccaaatataaacctggcctccacttgtagctcctgctagcatcccaacctcgtaagagtgtgtatcaaatctgcaaggaatggcagacatgtgctggctctctagagtcataactattttcctttcaactgatgagacaacatcaactcctcttttcatgtttccaacaaagagatatgagtcatcccaaccccattttgctctgaaagtagaaagccatctgccagtcagattgttatgattaataacagctgcatcctccaagttaactccactgtaaataccaattgtgttgtccaagcttgtagttgccaggctacatccagaaggagagaagtaagcagattgcacagatcttttgtgggtaaatgtcctcaaggctctgagcttatccccatcagtatatctcaaatcccaggtgcaggcagttccatcagtggaactagtagctacaatatgagggttttcacagttgaaatctatggtgttaatcctactttcatgcaaaacccagtgtgatgaacgttttccaatcctgttatcccaaatagtcaaacctccataaccctcagcaagatataggcagtttgtctcattcgttggtagagagagagcatatatactttcatcacactcaaataccagatcaaagatttccttctcaacatccattagccggagaattccatcatagcaacttgtgtatatcttggagaagcaatgtggttgaatcaggatcccagaaatgggagctcgatggggtcggtataaatgaacttcacttcctcccacattccagaacccgacattcccaaacttgttacccaccgcgaccattttgacactactggacggaaaaaatcgcaaactggttatccttccaggaacaacccgcgcaatattcttgggatccaaatacagagattccaacccaagggaagcctccactttctctttttcaaccctaacatcttgggcttccaattgggccatacccatgagtgattcaacgaaggagctatcagagtgagcgctttcacgagcatcagccatggaaataggacccaaattaacaacggaaggtttagttttagtgggagtggtggggcccacggaatctccgacaagacctttggaatctggcggaatacctcttgttcggagggagcgcctaatcacaattggggtttcggttttgggtttcttttccgatttcatgttgtaggatttggttccaaccctttgactacgcttgaagttggagagttgggtggctttggagtggagtttgagggcagccatcatttcatcgttgcggcgaatgttctcgagtcgcttccgttcgtaatcgttgagtttctgcggcgccattgaagagagagaaaattagggatttggttttcgaatgaatcactgtaagagatgcgggcgcgcgcctacgtagctga

SEQ ID NO: 2180 - DNA, 2070 bp, Glycine max
gcgtaaaattccaccatgattaactgtaaaattcaccaataatatgttccaaacatgaccattaccatatcgtatttatttatatccaaaatcttgtctctagctattccccacccttctaatggtgaggccccttcaccatatccacgatgtgtccccccaaataaagtgttccctttataatgccatcatattattgccgagtatggtatgagttgagtagctcatgcgaaaagcatttatttgtctgtcccagttaatgaaatgttaaactgagaaaaagaaattcatgcagacaaaacatttttcctgtagcaagtcaacaaatattgaggcattggattcaaatgctatataaatcgggaatttcattcatatacaatgataaatgagatagaagcgctaacaaataaaacaatttctgtaaacaatataaggaaacaaggaatggaaatgctgaactaaaaataggtgttggccatgttagcttgttcctccaatatcctttccttggtcaacccatcccactagttataatacatttgacggtcaactcttcccatggaataatgtttcctcataaaagcaatttcatataaggaaacaatgaacgaagccagactaaaatttctggactactgcaacaatggatcctcctccctttgtaactcatcaagccgtctcctagcataagctgtgaaaaagatggttgtcgccaccgttatacagaagcctgccacattgagaataatttgtggggcagatagagaatgcttttcatatgaagcatcagctaatgtccgaatcaatattccagtatagattgcaacaaatatttccggcaccattcctaccaaggacccaactatataaggcccatacttaacatttgttgccacagcacaatagttgaagattaagtatgggaatggggaaattctgataaaggcaacagcccggaactgatgaaaccagctccctccaccagcagatcttagaatagaagcttttttcggatacttctccagccacccttcaattttatggtggaagagtttgccgatgacaaaagggagtgatacaccaatagctgctgcagatataattagcaagaacccaaagccataaccaaatgtcattccagccacccacatggaaggtgtagatggcaaaagtagggttgggaatattgccacagatgcaaacaccaaaacagttaacactggagtactgaaagtctctgtctcccaatttataatcggaataatctccttgtctatgaaatagggtccgacccagacgagcacaaccacagccaaaaaccccaggaatagaaacaacaccaccaatttcacccaataccacacggcggctcttagcgtcggcggagaaagctccgccgccgcacccggaggagaaccgtcgtcggcgttggccctcagtttcacatagtccccattgccatcatcggattggattgtgagggtaacgtccggcacgacctcttctctccgaccaccaccatcagtctcgtaatacgtcatcgggaaatgcaaaaaacaaaacaatcccaaaaaaaaaaaaaaaacccaccacacaacaagaatttttttttctttttggattatgaatggttgatcatggtcggtggcagcgttttatagcccaatcaatcgatcaatcatctgcacccgcaacgtgagaaccgattagggcacgaagacgacgaagaggaggaggatgatgatgagaagggtcacgagaaacttgcggattgaggaatgaggttttaattcggagaatgagaacgtgaaattggcagctactttttatgtttctatttcggtttttctcttctgttcccacccagcatccaggtgagttgatctaatcgagttgaggcactgcaataaaatcacctggtcgaaacgctgccgtttcgctctagaacgacacgcggctttggagtgacgggtgttgcaacggcatcgatcgatgatggattgattactttcaaaggaggaggcgtggagtttggtttctttgccgcgacccctacgtggacctcac

SEQ ID NO: 2181 - DNA, 874 bp, Glycine max
gaaccccccgcccccccccttgtctcttttttaccaaaagaatttttttgtcttttttaaacagaaacaaacacacatttcatttccttgtaaatcaagagttccccccttgcaaaaagaaggctttatatccctatccatcactatgacagtataaccaaatatgttaaagcaaattcttatacaacaaatcggtatgtaacatatctgccagcagtttcacttggccggataatcttgacaacttgtccacgcttcaatccataatatctcgcaacaggatctgtgacctgaatcctaggtagctgagtttccttgacagtgtatctctcaagcaaggttttcttctcggcgtcagtgagaacctgatgttcggggacaagctcatgctctttaatgttaacgagaagttcggcctcctgaaagacctcgaggtggaatttggaggagatttcgctgatgcaggtgcgggcgaagggggtgaggttggtctgggtgacgaggatggctctatagacgttttcggagttcatgcggttggtgtaggtcttcatggtcttgacgccgaccttgggctcgtcggggaagaagacgtagatctggtcgccggagttgtccttcttggacttgttgatgaccaggtcctcgcgcttcatgtgctcgccgtacttggacttgaactcatgcttcgacatgttgatctcgaagtcacccaccagaaaacccctgtcccgaagcatttgcatcaccgtcttccttattcggtacagacgacccatttcctcctccgaaagcaccatcttcctccttagcctttcaccacagggaatgggaacacacacgctaccctttaagcttattagccctaaagtat

SEQ ID NO: 2182 - DNA, 1206 bp, Glycine max
  misc_feature (1106)..(1122): n is a, c, g, or t
atcataattctggtttttgctccttttttctatggttaaatagacaattatgaagcaggaacaagccaccaatttatacaagactcggaccagcatcatgcacagaaaaatgacaaaagaaatgaaacctccctcctatgctctccttgtcactaaattaccaaaagaacttaatagctattaataaacagaaacaaagttccatataacagattgacactaatcataacaacatatgtcaaccaatttatgatataatcatctaaatatatagttttgattccaaaagtttcaacaatcagacatttcacttcttgtaaatcaagagttcccccatgcaaaaaaagaaggctttatatccctatccatcactctggcaatattgccaatatgttaaagcaaattcctatacaacaaatcggtacgtaacatatctgccagcagtttcacttggccggataatcttgacaacttgtccacgcttcaatccataatatctcgcaacaggatctgtgacctgaatcctaggtaactgagtttccttgacggtgtatctctcaagcaaggttttcttctcggcgtcagtgagaacctgatgttcgggaacaagctcgtgctctttaatgttaaccagcagctccgcctcctggaagacttctaagtggaatttggaggagatttcgctgatgcaggttctggcgaagggggtgaggttggtctgggtgacgaggatggctctgtagacgttttcggagttcatgcggttggtgtaggtcttcatggtcttgacgccgaccttgggttcgtcggggaagaaaacgtagatctggtcgccggagttgtccttcttggatttgttgatgacgaggtcctcgcgcttcatgtgttcgccgtacttggacttgaactcgtgcttggacatgttgatctcgaagtcaccaaccagaaaatttctgtccctcagcatctgcatcaccgtcttccttattcggtatagacgaccgatttcctcctccgaaagcaccattcttctttcaccctaaagggatgagcacgcacgccttttcgccggcggggcccttcgttgccgactcggtctatacctnnnnnnnnnnnnnnnnnggttttaatctgtactaaaatatcttttactgcttttaatcaattaatccattcttatatttttttttaataaattggaccgtg

SEQ ID NO: 2183 - DNA, 1621 bp, Glycine max
ttttttttttttttttttaagtaacataaaaagaagttgaaactttgttaataatggtttttctgcatcctgtgaaatcagaagcagtccccttcaatatgaaaggtgtttagttttcaataactaatactattcttcccccttgctgaagcagcgaccctgctgttctatttaggaaaacacaagtgaaccaggcgtttacgagcatatgaaaaaacaactgttaatttaatggacaacacaaatatactgggcagggattacataaactggtattcggaagttgggctgcttctgcttagagaaactcgggtcatctcacatatgcataatgagacataaagtaattgtaatcaggatgattgactcgcaatagcctaagccagttttcagcagcccgcgacagagaattggctttctgacattcagaaaccccatcaggatcccagatagaaactttgaatttgtgagaggcaagcccaaagatcggtagtgatagcttggatatgtccctacctattgaataatgattatgtagcccatcagtatttgaactctgcaaagctgttgacagggaatgaaaggtcaggaagcaggcacttaagctttgtaatgttggaccagttggtattctgtatattgggtaccaagcaaatgaaacccaacttgcaggggaaagatcacagctccagtatgttttcaactctggaaattgccgtgcaagatcagaaatcttatttgccaatggctcacgattataaggtgtctcatgctcaaagtattcaaatataagctgaccaggagggctgcagctctcagtctcatcacttgatgaacccatgaaaggttttccttgggagaccctttccaaagtatgattgcttgcatccataacattaagatgattcctactaccatgaacactcttagctcctctttcatgacaatagccactgctactatcactgcttgtctctctagctgattcagagtcactttcttgactgggtttccttagccgcgtggagggctttgacggatcaatatacagctgaatggcagacaaggagacgttataatactgagtcactgattcactcccattcaacactataggaacacctgccccataagcactccactccttaaaagactcccacaagtctccaagcacaaagtaaggatgcaattccgcctcccttgatttccacctccttgagttcgtcttgggaaaatattgggcgggaacaaggggcgtgatgtgctccaacaatcgatccaaattggacatgtccgatgtggcgcgcgaagaaatcgaacaatcggaagaggaaccaggcctgttctccgaggaagttctcgacagcgacgaccgctgctgctcctgcttctctttgtgtttcctcagcggcggcgggctgtagaagcggttctcaccgagatgccgattgcggttgcggcttccgccggcgatggcggcgccaccactggccgacattgacgcggtggttcgcgagacgatgataattagggggacgaaacgacgacgttgggtttaggttaagtttataaactcggaaagagaagagagagcgagtgggggccgggcctacgtagctga

SEQ ID NO: 2184 - DNA, 758 bp, Glycine max
  misc_feature (543)..(543): n is a, c, g, or t
  misc_feature (558)..(558): n is a, c, g, or t
  misc_feature (560)..(560): n is a, c, g, or t
  misc_feature (563)..(564): n is a, c, g, or t
  misc_feature (566)..(566): n is a, c, g, or t
  misc_feature (568)..(568): n is a, c, g, or t
  misc_feature (571)..(572): n is a, c, g, or t
  misc_feature (582)..(582): n is a, c, g, or t
  misc_feature (586)..(586): n is a, c, g, or t
  misc_feature (588)..(588): n is a, c, g, or t
  misc_feature (591)..(591): n is a, c, g, or t
  misc_feature (593)..(594): n is a, c, g, or t
  misc_feature (596)..(596): n is a, c, g, or t
  misc_feature (601)..(601): n is a, c, g, or t
  misc_feature (604)..(605): n is a, c, g, or t
  misc_feature (613)..(613): n is a, c, g, or t
  misc_feature (620)..(621): n is a, c, g, or t
  misc_feature (628)..(628): n is a, c, g, or t
  misc_feature (630)..(630): n is a, c, g, or t
  misc_feature (633)..(633): n is a, c, g, or t
  misc_feature (635)..(635): n is a, c, g, or t
  misc_feature (637)..(637): n is a, c, g, or t
  misc_feature (653)..(653): n is a, c, g, or t
  misc_feature (656)..(656): n is a, c, g, or t
  misc_feature (667)..(667): n is a, c, g, or t
  misc_feature (671)..(671): n is a, c, g, or t
  misc_feature (673)..(673): n is a, c, g, or t
  misc_feature (678)..(678): n is a, c, g, or t
  misc_feature (683)..(683): n is a, c, g, or t
  misc_feature (686)..(686): n is a, c, g, or t
  misc_feature (690)..(690): n is a, c, g, or t
  misc_feature (694)..(694): n is a, c, g, or t
  misc_feature (696)..(696): n is a, c, g, or t
  misc_feature (698)..(698): n is a, c, g, or t
  misc_feature (702)..(702): n is a, c, g, or t
  misc_feature (707)..(707): n is a, c, g, or t
  misc_feature (711)..(711): n is a, c, g, or t
  misc_feature (718)..(719): n is a, c, g, or t
  misc_feature (722)..(724): n is a, c, g, or t
  misc_feature (731)..(731): n is a, c, g, or t
  misc_feature (738)..(739): n is a, c, g, or t
  misc_feature (748)..(749): n is a, c, g, or t
  misc_feature (753)..(753): n is a, c, g, or t
  misc_feature (755)..(755): n is a, c, g, or t
  misc_feature (757)..(757): n is a, c, g, or t
attcagcttcaagaagtgctactagtttacctgttcagatgccttctgctacttctcccattcctgccatcacttttccatctcgattgggatcaaaatctattgttgacttccatgctcgagctcctggatcccaacttcacaaccaaacagctgttcaagcacgagagacaggacttgcaaatgagtatacatatgatatttggggtgaccatttttctggacttcacttgttagttccaaaaaatgttgcttccatgaagtctagtcccgtggaaaataatttcgacagcttttttgtaagagggccacaaacccttgtgacaaattctcaagaaggctaataagttgaaaaacgtcattccaagttttcttgcctccactccgggcctatgttaataagaagaaaaaaaaggtcgggatactcacagctgcacacatgcacactcactatcatctagtagtgtaaacaattctgattttgtgactactttaacaaaattagtacatgaaaatcttagaaccctcccgctataaagggantgctggtgggtggtntnacnnantnggnntttagaggtntgcngntgngnngnggtgnatnnaaagttcncgttggnnatatgtngnctntnangttcttctaacttttntantttcctgtttnttgntnttttncgatngtngatntttncntngttngttgnacangcttggnngtnnngtttctntatattnntttttattnntatntnang

SEQ ID NO: 2185 - DNA, 1785 bp, Glycine max
gtctcgagttttttttttttttttttgttatgcagtccctgctttttaataagaaatccactccattgtattatattatatacttgcacatgttagaaattaacaaacaccagcacacacacaccttaaatcctgaattaaggtaaaaagagtgcactgtacaaaaaagggggaatggaaaagaaggtagcaaattctatttcccctaaatggaatctgaaagggtcttgcctgataagcctatcgtgatatacatttggaatattatcagggctgccagaaagttgagattgatagctagcaacttctcagtgacttgcacttaagttcagattctgaacaaccagaaatggttcaaatttacaactgacgggagatgaaagggcaactgaaataaacaagaaggcagtgctttcctgattgctgctaagagtgtgcttgagcatgctcaggtttgtgactgtactcataatcaagatgaacaaaagcacgctcaatctcgggcaaaagctcaagcttttcttgcaacgattccccaatatcatgagcctcttgcaagggcatatccgatggcaggacaatatcaacctcaacaaagtagtgagatccaaatgtgtatgcccgaactgtatcaatgtgcctcacagccttgtggtggttccagcataggtatgtaagtttctgaagatattctggtgctgctgatcttccaaccagggaattaacattttccaacactgtcattgaccatgtgcgaatggtgtacaaagccagaatgatagcaccgacagggtccatccaatcatcaacataatttgccaaaagtgcagcaataaggccaatgacattagtgatcacatcaaaaaagtgatcctgggcataggctttaataatctcattggtaaaagaacgacaataaatcatcagcaggaatttcaccaaagtcactgaaagcataatgctcacaacccagcgctcttgttccctggtcaagttgaatgcattttcagaagatattaatgtgcgggtagactccaagattatctgcagtccaagtgtcgccataacagaggcaaaaacaagaattcccaatggttgcatccgtttctttcctatagggtactgatatgggtttggtgtttgcatggaaaatgcagtgaaccagaggatgaatccagaaaggaggtcaagaagtgagtctaacgtggatgcaatgatggctagggaaccacttctgactgatgcataaactttggcaacaaaaagaaccatgtttgctgcgtttgacactctaatggcaaaagtctcacttcttgctaacttgtcttgctcctcctttgacattccaggaataaaaccacgctctgctaaagcatccatttcagtaaagccctcaagcacttctacctgctgctgatagtactccgcaatattatcttcttgaccaagaaccccataacagtcatggagtccgcgagggggtttcacttgcttctccgtgtgctccgaagatagctgaaacccgtcgaagttcaaccgccacgaccggtcaccattgctggaatctgacagcaacgagagctgctcctcgccgcgaagctccaccggctccaccatttcccggtcgccggggaaaattgggaaaacgacgtcgtttttcgtagcccgagaaaagcaaagaacggaaatgcgaagtagagaccaagaaaagtcgttgtggttggtgcttgttataacaacagccgtagcagattttctcgagccgatctcggactcgagctcgag

SEQ ID NO: 2186 - DNA, 1033 bp, Glycine max
tttttgtaaaatacattaacttgcaatttcatttacggagcgaaacatgtcccatggctatgacatttgagtttaaaatcaaatattcaactctacataatgacactcaaaaaaatatacaaaataaatctacatattaagtatctatctataatatagacaattaattgtaagaatatgtgtacatcacgagtctcgataaaaacttgtgtgatgattgctgaatgtaattttcttgattcagaatctctatctcttagaagaaaatgagttcaaagaagcttgaatttcttctagtgtacgccccttggtctctggtactagttttgctacgaatagcacagtgaagccacatatgctagagaacattaagaaagttcctgctgaactccaactcatgaggaagttaaaagaatatgatataatccaagaacacagccagctaaccaaagtcacaaggcttccagcagaacccttcacgttgatgggaaatatctctgacattataacccacggaattgctcccatacctatagagtaagatcccacgtataccagtacacccactagtgccaaaattggactaactcctttccacttatgcaagtcctgcaaaacgaatgacaaggctgccaggaagcatcctacgcatgttcccactgcagacaccagcaaaagtggtcgtcttccagatttatccattaaaagtactcctatagttgtcattggaatcttaacggcaacaattgctattgttccaatactttctgaaaacccagaagatataaatatagagtttgcataaaaaacaatgccattaatccctccaaactgttgcagtatcatcaagccaactcctacggtaagtgacttcaaatattgcatttgaaataagccaatgatgctagcttctgtttgcttttgaaaggcttctgtatgatctctgatttcagtggcctcttgataaacatcagcattcttccccctgaggcgctgtaaagcagaatcactctctttccttgagccgaattct

SEQ ID NO: 2187 - DNA, 1771 bp, Glycine max
  misc_feature (748)..(748): n is a, c, g, or t
aaaggaaaactttcaaaaaggatgtatttctgcacgtaagggtaaaggatgtgccaactagcgcattgcacacatgtattgctctcgtgacgaaattcatcgctcacaagcaatttctggcaattcagtttttaatcaatataaattgtccaaattcccccttccaatttaatttatttttagcaactacatcaaggaactgatattgaaatgctcttgaatgagggaccataatgatcaaatctaggagcacaggttcaactaaacacattctgcatcataaacgcgatcaatcttgttccgtaaaatctttaattcatcatccatcatctggcacttaggaatttgttaatggattaattattcatgcaattctgctacagggtcatgccaatttcatgtctttgttgaatatggattcagagatgcttgaacttcttctagagttcgccccttcgtctctggtactagttttgccacgaatagaatggtgaagccacatatgctagagaatatgaaaaaggttcccgcggaactccaactcatgaggaagttaaaagcatatgatacaatccaagaacacaaccagctaaccaaagtcacaagacttccagcagagcccttcacattaatgggaaatatctcagacattataacccaggggattccccccatgccaagagagaatgatcctgtatataccagtacaccagcaagcgcgagaatggggacttccttccttccattntatgtaggtcctgtaaggtgaatgatagggctgcaaggaagcatcctaagcatgttcccgatgcagagatcagcagaagtggtcgccccccccattcatccagcagatggacgcccatagcttgtctgtgggacctgaacagcaaccattgctatcattccaatacttcccgaaaacccagcagagatgaatatagaacttgcataaaaagcaatgccgttaacccctccaaactgttgtagtatcatcagaccaactcctacagtaagtgacttcaaatactgcaattgaaataagccaataatgctttctgtttccctctgaagggcttctgtaaaatctctaatttcagtggcctcttgagaaacatcagcattttttcctctaaggcgctgtaatacagattcactcctttcccagtgaccaaattttgccagccacctaggagactcaggaatgaagaatagacccaaaagttgcacaatacatggaataattcctaatagagccaaaatccgccaattcaagaatgctccaacaagataagttaatgataccccgcaacaaatcattaactgatgaaccgtggtgaatccccctcgaagattcttgggtgttatttcagctatataaataggtaccacataggatagaaggcccatcccacatcccacaaacaatcttccaacataaagccaccaaccaactgttcgtcgacctgcataatccgctattctaccacttataatggcacctatcattgctccaattgtcagtattgatccaaaaagtgaatactcggccacaccaacattgagatcatccatgattccagtctgagcaggagatgaatatcccaccaagtttctttctgcctcttttcctcatagtcatggttgccaccatacccttgtgctcctatgggaagcagaggacttgaaaattcacttggttctgtgcttttagtttcgtccatgattaccccgcaagtagaacaaggagccacacagttttttaagattg

SEQ ID NO: 2188 - DNA, 1686 bp, Glycine max
aatcaagaaacaaactagtttggttgtttttctttttccctttttgtataaaatgtcattgggatgtagctatttgtaattgataaaaaggaaaatcaaatcattcatacaaaaataaaagaaatgggaatataaaaattaagggctattctatagcaccccaaaggtttggtatccctgctaagttgaaggcatccttattggctgttggctgactcttggatgaattttgatacacagtccaaaatgcagaggcaccaaatttttggatacatgttcaggttatatgtcagccacactattaatgcttagtcccaaagctccaccactttttcttctttcttgactcacttgaaggtatatctccttgaggatagatggagttgtaatgcacctctgcccaaaaactaaggaaaatcactccttttggcttctcaaaatgaggaagtatctctatgcaacaggtgtccttgaaagaagttatcacaaatattctcacaccatacgaatctgcagctgcttgaagggtgacatgatccccccattcaccactcttagacatcttctccaaatattcgtcatattccatgggaacatatccctcataaatctctggatgagacttcagcttgttcacaacttgtcgtctcacatacttgtggtgatcaggtgtgttatacaattgatcagacaatgcacggaactgacaattaccatcaccttgtaccatatgctccacaaagtcatataactgcaatctatccagaagcctttgatgatctgaagtggcttcatctattgagggaatttctccattaatttttggaacatgaggaattggaaccatctggctcagtctcctccctatttcaccatcaagtggataattgtctgtaagctccaatgagctttcctctacttcacagggactacaacatgatgaactagaaggttctatgtcaccaactccattgtaggcataatcatgacctgaacagtagttcatcatcgatgtgttattccaatcacatgtaggctcagaagcatggaactgttcttcatctgtctgtgaatatcctgaacactcagcaatatctagccgggaaaattcttcttgaagagcccgtgcaatgatctcatcattttgtatttggttactttcagtatcataatggctatggtagtagtgtccattatagacatcaccagtatcatgttgaattatgtcactgtagtatccaggactataggcagggtcactgtcaaaaagattaataccccactgcacaacatctggatgctcgtataaccccatctttaagtattaaatttgactaaaaatctgaaagtcttcttccagataatgttgaaatgattccacaccagctaaaataaacctcggattcagcaccaactcaattgagacaatcctcgagagacacagcaatagcgaaaacaaagggaggtacgaatgcaataggcaatagatgaggatgaagcattgaattgaatatttatggtaagaaaatggacgaaaaaaggtgcagtttatatacagtttgccacggcgttaaaggtcgaacaccttctgaaaaatgctgcttcattgttttcgcattttgaagcactgggcggcattttttaacgccagttctttaatcccgaaaatttcgtcaaaatctaaat

SEQ ID NO: 2189 - DNA, 1383 bp, Glycine max
tttttttttttttgcccggaataaaggcaaatatcctttagcagcaggtcaaagtacttgttcctgaattgcaagttcagggcctaatgaagaatagacctgaactaaattcagacagagaatccatccactgcatttcacgtttcaattgacgcttttttttttttttttttgccaaaaacaagcattttttttttgtttatatgaccacaacaaactgcaatgaaaaattgttaaaaaccagcaagctatttaggtgatcataaataacacatgcttagaccttccagtgacgagtacagtatgttgaggcaccagcagtttcagttgatgcaaacttgctttgtgccaaaattctaacaacacaaactacctaatctatcaaacaagagaagcccttttgtcctttggtcgacctattaaaggtcatcagatcacactagtcctacctttaaagaaaaacctactatcaacagtcatatgtatctcatgaaaagcacataaaaaaatgtcactttgcctcttcaccatctccactgttatgagcagctgcagagctgccttggccatctccaccagctgttccagcctcagaagcatcttgcttgcttccaccacgtgcgtcgttcggaccggtagccgagggtggaccaccgctgttgccgccctcattgtgcattggatgcatgccattatttattcctccaggtctcagtcccatttgaccttggatggcttgctggtgtagctgctgctgttgttcctgcatttgatgtggattgccaaattgcaatggcattttctgggggaacattccttgctgctgctgctgagccattgctgctgctgcagcctgaggatgttgcatatagaatcctggttgcatggcagggtgtggtgccatctgtggaggcatggctggtgtttgaggctgggcatcagcaattgcagctaaatacatcaaattcttttgaagctgagcttggtactgggcacattctgcaagttttccaagattttgattgtccaatattgccagaatcagcttcttgttctcatcaaggtatttttgaatctgctcggtggttatgttcgtaggtgggaacgaaggcatcataggaatcataggcggtgtctgctgcatcttctcagcctagtcaatctgggtatggtctgaaagtaggtgagaggtaaagaaacacagttgagaacagaggtttgtcttcgtggagatccttgttcgatcttctggggtactgtgcacacgatgtttcaaagaaaacaaaactcaatagttgctagatttggcgtttgtgtttaaggttcggctttcggtagttccaattccggggggggggcctacgtagctgatagctgactcga

SEQ ID NO: 2190 - DNA, 1607 bp, Glycine max
actggaacaacttcattgcaggtccatcagctctaattgatcacaataaatcacaaccaacaccagcgaaggaaactccaatctcaaaataataactgtaataaaggcaaatatcctttagaagcatctcaaagtacttgttcctgaattgcaagttccgggcctaatgaagattagaccctaaactaaattcagaccgtgaatccatccacggcatttcatgtttcaattgacgcctagaatccagtagaattgcaccaaaagcaaacatttttgtttatatgaccacaacaaactgcaaagaaaaattgttaaaaaccagaagcaatttaggtgatcacaaataccacatgcttacaccttccagtgacaagtacagtatgttgtggcaccagccgtttcagttgatgcaaacttgcttcgtgccaaaattctaacaacacaactacctaagctatcaaacaagagaagcccttttgtcctttggtcgacctatcaaaggtcatcagatcacactagtcctacccttttaagaaaacctactatcaacagtcatatgtatctcatgaaaagcacataaaaacatgtcactttgcctcttcaccatctccactgttatgagcagccgcggagctgccttggccgtctccaccagctgttccagcctcagaggcatcttgcttgcttccaccacgtgcatcgtttggaccagtagccgaaggtggaccaccgctgtttccacctccaagagcagcctcactgtgcattggatgcatgccattatttatatctccaggtctaagtcccatttgaccttggatggcctgctggtgtagctgctgttgttgttcctgcatttgatgtggattgccaaattgcaatggcattttctgggggaacattccttgctgctgctgagccattgctgctgcagcagcctgaggatgttgcatatagaatcctggttgcatggcagggtgcggtgccatctgcggaggcatggccggggtttgaggctgggcatcagcaattgcagctaaatacatcaaattcttttgaagctgagcttggtactgggcacattctgcaagttttccaagattttgattgtccaatattgccagaatcagcttcttgttctcatcaaggtatttttgaatctgctcggtggttatgttcgtaggtgggaaagaaggcatcataggaatcattggcggtgtctgctgcatcttctcagcctcgttaatgtcactgaaactaatttaaaaagaaaaagcaaaaaccctgggtatggtctgaaagtaggtgagagagaggtaaaacacagttgagaactggggtttgtctttgtggagatccttgttcgatcttctggggtactgtgcacacgatgtttcaaagcaaacaaaactcaatggttgctaggtttggggtttttgtgcgacgttcggcttttggtagttccaaatccaaactaacaatcgacaaggctcaagtgttcgctatttataggtcttcgcattgccccctgtttgagtttgactgctgttgctgctgctgctgctgctgctgcgttttgagcccggttcggaccattgtattgtact

SEQ ID NO: 2191 - DNA, 763 bp, Glycine max
  misc_feature (2)..(2): n is a, c, g, or t
tntgatgtggattgccaaattgcaatggcattttctgggggaacattccttgctgctgctgctgagccattgctgctgctgcagcctgaggatgttgcatatagaatcctggttgcatggcagggtgtggtgccatctgtggaggcatggctggtgtttgaggctgggcatcagcaattgcagctaaatacatcaaattcttttgaagctgagcttggtactgggcacattctgcaagttttccaagattttgattgtccaatattgccagaatcagcttcttgttctcatcaaggtatttttgaatctgctcggtggttatgttcgtaggtgggaacgaaggcatcataggaatcataggcggtgtctgctgcatcttctcagcctgggtatggtctgaaagtaggtgagaggtaaagaaacacagttgagaacagaggtttgtcttcgtggagatccttgttcgatcttctggggtactgtgcacacgatgtttcaaagaaaacaaaactcaatagttgctagatttggcgtttgtgtttaaggttcggctttcggtagttccaattccaaactaacaaagacaaggctcaagtgttcgctatttataggtcttcgcattcccactgttttgagtttgactgttggtgctgctcgtgctgcgtttcgaacccggttcggaccattgtattgtattggactggtgtggtgcaccacaacatcccccttctgttgtcttcttgcaaccggacggaaggctggg

SEQ ID NO: 2192 - DNA, 1908 bp, Glycine max
ctcgcattttcctacttccacgacatagtttcacgcttcagccatggacttgacttgcctcccgaagaaaccgagaagggtttcctaggaaaaatcatgcccaggctcgtcaaatccatctctggcgacaggacacacgtgcttcgcttcgagaccccagagactatgagcagggacaggtttttctggtttagggatgaggagtttgctagacagactgttgctggtctcaacccgtatagtatacgattggtcacagaatggccattgaggagtaaacttgacccagaaatatatggtccaccagaatcagcaatcacctcagaaattatcaacaaagagattggaggcataatgtctgtagaaaaggcgattgaaaaaaagaagctgttcatgttagactaccatgacatacttttaccctacgtcaacaaagtacgcaaactcaaggggaaaacactgtatggttcacgaactttgttctttctaaactcagaggggacactgaggcctctagccattgagttgactcgaccgccgtcatcttcaaataatacgggccaatggaagcaagttttcacaccttcttggcactcaaccagtgtttggctctggaggtttgccaaggctcatgttcttgcacatgactctggctatcaccaacttgttagtcattggttaagaactcactgtgtgacagagccgtatgttattgcaaccaacaggcaacttagtgagttgcaccccatatacaaattgctacaccctcatttccgttatacaatggagattaacgctatcgcacgagaagcacttatcaacgcgggtggcactcagctacgtaggcccccccccccaaagtactccatagagattagctctgctgcttatgctctcgaatggcggtttgacaagcaggcactaccagcagatctagttagcaggggaatggctgtgaaagatccattttctccacatggcttaaagctcaccattcaagactatccttttgccaatgatggactccttctgtgggatgctataaagctatgggtcactgactatgtcaaccactactaccctgaaccaagtcttgtggagtcagacgaagagttgcaggcatggtggacagagattagaacacttggtcatgctgacaaaaaagacgagccatggtggccacgtcttaaaaccccaaaagacctcattggaatcctcaacacaatcatatgggtaacttctggtcaccatgcagctgtgaactttgggcaatatgtttatgggggatatttcccaaataggcctacaattgtcaggaccaaaatgccctcagaggaccctacagaggaagagtggaaaaagttcattgcaaaccctgaaagagcactcctcaagtgctttccttcacaacttcaagcaactagagtcatggctgtcttggacatactctcaactcattcacctgatgaggaatacataggagagaagatggaaccatcatggggtgaagatcctgtcataaaggctgcctttgaaagatttagagagagactgaagaaactagaaacactgattgatgagaggaatgaaaacacaaagttgaagaacagaaatggagctggcattgtaccgtacgagcttttgaaacctttctcaaagccaggtgtgactggaatgggggttccctgtagtatatctatttaagttgacaaagtcaaactgatattatgtgtgaagtgtgatcctaaactcatatgggttttcaattaaacatatgatagacacatagtcacataaactggtgcctcaaccagaatttccataaacacatgactagtgtttctttaggatgttcttgaaccaatgagattatttctttgagtaaaaaaaaaaaaaaaaaaaaaaaaa

SEQ ID NO: 2193 - DNA, 1221 bp, Glycine max
  misc_feature (1215)..(1215): n is a, c, g, or t
  misc_feature (1218)..(1218): n is a, c, g, or t
gagagaactagtcccgtgtttttctttttcttctttccatgttaagtgtcttctcacactaaatatggaaagatgttattgtcttttaaaggtgtaactatgattcacctcaaaagtaaaacgttgaggagttgaaaggatacaaatttctgttcatcaagtcaatatttacaaggtagcaaagaatatgtacatgaaagcatgaaacacccatacatagacaaatcaaacagaaggactagacctgagaaccttctcaagcttctcagctttaatgtaatcattgtcattaaggggtccagcaggaaaaggtgtgatttccacaatgatatggggtgttgggagctcatcaaaaagagctctcacattgttgcaacacacactttctccatgagcactttccctacggatttggcaacccttgtgagaggtggcatcaacaaagtgatcatcatctgataatagagatgcaatagctttaagaagacgtcgcccctcgagcttggatgggactctatagtttcttctaagtgtaccctttgttgtgggatgccatttactaacaagtttccttccgttagcagcttcttttgctggttttcctagtatggtctgggcccatttggagaatcccaagtcagtagcagcagcaggagcagattcatcattagtatccccaatttccaaatctgagacaagtgggttggcttgagatccagccaagccagccttgaggagggcatagaagatgcatagccttccagcccacaaaactggagcctcaaccaaagaggcattcacactgatactcccaactcccactcttcttcttccacacactgaactacttttactccaaaaaaccaaccctttcagtttcagggaaattccacaaggaaagagggatttgggcaaaagggtcaccggtgatgatgatgatgagggattattgtgaagaagagagacgcaactgagttgcataagggatacagaaagagccattgctttgccaagttgggccaacaaatcagaaatcacaaatcgcaaactcaaataaacacacactctctctctctctctctctttctgtgagagctaaaaaatgatattttttttcctcgatccacttcctgacgagtgacgacgtcgcattgtatactagttgtggggtcgaaccatgcttcggagttcggatttgtcgattaggatgttctnggnaat

SEQ ID NO: 2194 - DNA, 792 bp, Glycine max
gcggggtaaccaaatctaaattcatccagtgaagatttggagtaggaaactagatgttactgaaaagatgcgtggtaatcaaatcataatttaaagataacataatcaaagtgtaggataataatactcaaaaggccgtgcattgataattgggtgcagagaaattatattttgtgggagctatttacagaagttaacatgcattatgcctagtgggatccgaaggtgttctctccactgtaagtcatgtaaagaaagccatcttgatccttattttcttcataaatagcagacatcaatgcagcagttggaggcagagtgttattgatgaaaacaaaaatagccttctctgcactgagcttaatccttttgcggacaacatatacaaactggccaacagtcaaatcagcagggacaaggtattttttcttatcaatatcaggaatgtcacttctttcagctttctccacaatcacaggtattctatcaggatatttctctctaatgcgagaagcttcagcctgccttctttccaaaggatgctgaagcttgaaggaggttttggccatgatgaaattggaagagtaattcgtatctaacaggaaaggatcaatgattgaaacgaggggtttgtttctccaaacgaaagaaagaggctatgtctctgtctgggttcgaatcaaaatcaaatgaaacagatgaagttgatattagggtttggtttgatgttgttctgttctgttctcgcgggccggcgtcgccgccgcacggacgcgtggctggacgcgtggg

SEQ ID NO: 2195 - DNA, 773 bp, Glycine max
aattcggcacccggaagaacccgcggccgcggcggtctggttttcctttttttttttttttttttgagagcataaaatctaaattcatatattgaaatccataatttgaagagaatgcacataatcaaagcagcaaaatatctgctcaatagatacgtaaaccataagcaataaacaggataggcatcgactatcgacagcagaaagtttacatcttgcagcatctatttacagaggatctcatatattattaaatttgaccctagcgagaaccgaaagtgttctctccactgtaagtcatgtaaagaaaaccatcatcgtctttattttcctcataaatagaagacatcaaagcggcagttggaggtagagtgttattgacaaaaacaaaaatagccttctctgcactgaccttaatccttttacggacaacataaacaaattggccaacagtcaaatctgctgggacaaggtacttcttcttatcgatgtctgggatgtcacttctttcagctttctcaacaatcacaggtattctatcaggatacttgtctctaatgcgagcagactcagcctgccttctttccaagggatgttcaagcttgaaggggcttttggccatggtctcgaacaaacacgtaaagatgattgattggggaattaggttgagactcagagaagagatgaattgagacggagaagaaagctattattatcactttgccatgtcacctttcttttcttttgttttttattcaaattcggatggaatt

SEQ ID NO: 2196 - DNA, 553 bp, Glycine max
aattcggctcgagtaagatcatgtcagcacctacacttcatcatttctcttctctcttcacccttttcatagttttgcttcaccactccaacgctgacgttggcaccgcttctcgttactcccctccatatttaccatccgggtgctacggtaccgaagcgacgcagtttccgtcgagcaatctttttgcggcggcgggagatggaatatgggataacggagctgcgtgtgggaggcaatacctagtgaggtgtataagtgcggagcaacctaggacttgcattccagaccagagtattcagattaaaattgttgattacgctgccactgccgtgtcgccggcttccgccggcggcaccaccatggttctttccgataaggctttcgggactatagctaacatgtctgccaccttgatcaacatagagctccaacagtaaattccaaatctctccctatttaataattaatttctatttatgtatacatagtttgacaaaatggtgttatatgtttggttgcagagtgtgataaatctggtaattaattgctc

SEQ ID NO: 2197 - DNA, 1316 bp, Glycine max
  misc_feature (1)..(1): n is a, c, g, or t
  misc_feature (19)..(19): n is a, c, g, or t
nttttttttttttttttcnttttttttttttttttttttttttttttttttaaacaaatgtcataactaaactgctaattatataattagagcagaaactacatggtatgctacacaagtacacagtaattccgtgctttttcaacccagatctacaatgaaaaggaaacatttgatggccaggagaagaaccttaaaggaacatagctctgaagtgtgtacaaaaccaattaaatatacaaacacagccaccaaccataagtcattggaaatttgtactttcataatttcccgattaataacagctacagaagcaaagtttctaggcccaatataaataactcccttctagagatattaaaatatatatacgcacattcaatacaatcatttttaactttattcttattcttctgtcagcctcatttgcttctacgccgatttttggttgctgcacaattcgaacagtaccattttccttttggttgttctttcagaccaacacaaccaaaatgaaaccactctattttacaattggggttatcgcatgcaaccatcgctccatagctaacttgattacaaaagcagtatgtgggttcatttggatcaactggtaactctaaatccatgccagttgggtttgaagtggcttgtgcttctgtgaccattgttgtttgccgtgttttttttcgccctcctctaccagtaccactttcattaccccttccagattttgtattaccttcaggacctgaagcaggtactccagttattgcagcgttttctctttcacgccgaatctcctcatcaaactttttcagatactgatcaagttgttgtatgtttgtatctaccaaatcataagcctggacagccaaggctactttttcatcagcaaccctgatgctatgcttttgctcatcaagcgcttcatcagagaatctaattgccgaagtatcaggcgtgatgtttccagacctaacacctcgcttaatatcttcaatttcttgttcacaacgctgttcattttgccttttaatatcctgtaagctcttatctaggtcacgcaacagtgtatacttcttccgaagaataacgggtagtgaatccaaattggcatgaaattcttcaagaaacgacattagggtttgtgggaagaacgctcaactggagaactaaattttggtttacgatggaataaaaaaaaaacacgatcgtttctgtaacaattctcaatttctcgttatcaatcacaacgagagtaagaattgatttttgcctcttttggtaatgggggggggggcctacgtagctga

SEQ ID NO: 2198 - DNA, 1927 bp, Glycine max
ttttgtgtttttgtctctggtattttaaagatcaattaaaagccactacaagtttgaaatatctctcagtaaaatgtatccaaacatcttccgtgcagtatcttttattacaacagtgactgatgtatcaaactcaaactggaactaggaaaaaagcaagctacaacgtatcgtaagctacacaggctttagcattcaaaatcacctaacctatattaatctacaatgttaaagaaaatgggtcaacagtaaccaacggacaatgcctaatggaagaactcaacggattgaaacgaggcagaatcaaaatgtcgatatataccagtgccctcaatgcggcatctacattccgagacccatttaagaccatctaataaggaaaaaccatatttcaagcagaacattgcatatttgttcggcagcagaaaatgttccaatcaactttatgctttcagatcacatttattagcgtcgagcggttctagatttcacccgttgatttttcgttccaggtccaaagctagccccagatcctgttgcagcgcctgaaacaaatggacttgaaaagagtgaatttgtagctggagttgtactaaacaatggagtagtattaccaaacagagagggagttgatgcagaaccaggtacagatgtagaaccaaaaagtgaggtttgaggtcctggagcaggagttggtgttgtaaacaaagatgacaacatagaagacgatggagcagaagatggtgtgctaaaaagagagaatccacttcctgatgacaaagatgaagttgctgcagatgtctgtggggcagtcaatgctgcttgagtccctgaactggaaaacaacccagcaacttgagttgagggttgtgaatttgcaggtaaatgcaatgttggatgaactctttttgaggcggcttcttgtcttgcagtttctcgtcgatctgcctccaaaaatggatcattcacctccccccgtcgacgctgatcagctaggtatgctgatttcatagattcaatgtactgatgaatgctctccaccttcgcagccacgtgaacaaaaaagtcgtgcacatttgtcatgaccttgggaagagattgcaacaatgaggaaccattagcggatgcatttctctcagagtccaagagaagcagctgctccaactcttcaatccactgatggcactcaccaagatacttctcaaatcttaaaactgtttgctgtaaaaacggagatggtttctttggaagaccactgtagaaatcaaaaacaggcactatagatgcagttgtaggttggctactcgaactaggtgctatagttgcaccaggagtctgtgatggggcagtggcacttgatgtacccccactgggatgaaggaacctagggcgtagcatcataaaggaacgaacagcaacctctgtgttgcgtaatatatccttaacagtggacatcagttcctgtagcaatgttttctgaacaatatgacctgcatcaagctcaaatccatcgttggaaacggaagaatcataaagacgactacactgatctagtctctggctttcatccctatactctaatatccgctcctcgatctgaaggagaatcttctgggaatcaggatgtagatccgcccaattggtactataactagcgggagttctatcgttagtaaacaaaaacaactgttgttgcggctgctgctgttgttgctgttgttgaaattgttgctgttgttgttgctgctgctgctgctgcggaaggaacaaactagtttgctgtggctgaaaaggagactgctgctgctgttgctgcggcgtggcgaacaacgaaaatgacattgctgtgttgggagtgttattgtcagagtgaagaaaactccctgttaaaccctaggctgagagagagagagtgatttcactgatt

SEQ ID NO: 2199 - DNA, 610 bp, Glycine max
atccagcccctttgcatagttctgttgcagaggcctagaatcattgtgccaccaccaagtgaagtgaatctcttagatgatggatatcgatggcgcaaatatgggcagaaagttgtcaaaggcaacccatatccaaggagctattacaaatgcacgacccaaggttgcaaagttcggaagcatgttgagagggcttcaatggatcctaaagctgtcataacaacatacgaaggaaaacccaatcatgatgtgcctgcagctaagactaatagccacacacttgccaacaatagtgcatcccagctaaaagcacaaaagtttgccatacccgacgtgaaacatagttccagcagcaggggtgttactggcaatgagcagcgacctgtggcaagtttaagattgaaggaagagcagatcacatagctttcttagttcataactttaggcgtaaatagccaaattcgtctttgaaagtgtgatgggttgacaaattagtccttaaaagatgaaaattttaaatttaattcttgaatgtacaaaaaaaagtgtgataaattaatgcgccaatttaatgataaaaaaaaaaaaaaaaagcggccgctctagagga

SEQ ID NO: 2200 - DNA, 1043 bp, Glycine max
cattgtaaaactatcttctcattttgctttggtgaatagggagcagaactcttttattcattacatttgcttagggttgcttcgcattttgacaacatggactattagctattgctaatgtaagagcaaaatcttcatatgggggtcacacaaagagcacccaatatgattatacagatttcttattttgtagaaggtggtgattctccattgagaaaggaggagaagaacgcaagtgagttgcttggtttaaaacagggaactgcatgcccagctcctcgaaacgttgcaaatgtaagccctttatattcttcaaaccacccactaacctcattgtcatgataccatggcctccatgatttagtgataggcaacgcaagagagcttaagctgtaccttgtggacagcactggtactctaccatctgtatctccactataaacccaaatcctaagtcctgctgaaataagcttcttgtaaattgggataacagatggctttgaatcggcccagtcattgaatatcttgtcattgcaaatgctccatttctttagattgtgaccatcgctggcatgaagagccttctgaacatctggtttattataaaatgctttagcatagccatcaaggcacggatcatagccacccaacattcttggcatcattttagatgaacgcttcatggaagtttgcatggattgatcgtctgagcttgctgtactggcaaagcaaacagaggtgtagagactatagatatcaatttcattgtattgtttgagaacttcatccacagcttggctacaatctttatttcgccatggatcagtgctgttaaagtcacaacttgttttgattgtttgatgagtttcatcagatatcacagcatggctccaagcataatcaaccagacccatccagtcctcagcatcagatgtttcagggttacccaacagaatacccttgagatcaatatagagggaggggtccttgttccatcacggatgagttcagccagctctggaaaatactttcctgcatagctc

SEQ ID NO: 2201 - DNA, 910 bp, Glycine max
  misc_feature (36)..(36): n is a, c, g, or t
  misc_feature (90)..(90): n is a, c, g, or t
  misc_feature (98)..(98): n is a, c, g, or t
  misc_feature (890)..(890): n is a, c, g, or t
ccaatttaaggactggttggaaaggtcaaggtagcnaatctagcctcttgaactgtttcttaaagcaccatttggataaagcctgctgtnaagagcantcaagcctggtttcaaaatctgaacatgctctaaatatgcctccgtgaagtgtctctgtaagggcacacaccctagaaccggtaaaccaactactcccatccttctagctcctagtccataaggttcctgcaagaagtttgtggcttgtgaagccattaagtctgtgtatgcttgaatgtcatattctcctcctctaacaaagtaagtattggtaatgtcattacttcctgtgcacaagatgtatatgctttttgatattattgttgccgttctgttttctccaactatttccattatcttgtttttgtactcccggaacgtgtccagttgatctgacaatgacaatgctgatgctattttagaagttagaggatcatatccactagcaccagatgcaaagcttacacctgtgaggagatcttgaggttgcaattttggatcaagataaggtggcaaaagctccttgactccaaattttgcagctatgatgtctgatggggttaaaccattgctgaacctcccagttggttgatttcctccaccaaaatctctaccatatggtagaaaattgcattttgctatggtggtgatgtagttattgttacccgtatccactatagagtccccaaacacaatcactgctgggatactttcatagtttggtagactcacagaactaacatgaagagagattataactatggcaaaagaccaaggaatgacttgaggaaattgagaaagaagcttttcaaagagaattttcatgtttacatgatccctcgggggggggngccctccgggcctgactcga

SEQ ID NO: 2202 - DNA, 1458 bp, Glycine max
ctcttgaataccagcccttgcctcttttggatcacccaacatgcctacaatagaggcatctatagcatcttggttttccaatcgcgcagcccgagcggccatctgaacaacagtatctacgtcaactcctttagcaaaaatctcaataagattcttgtcaactgtcagtttattcaaagtcaaagttccagttttgtcgctacataatacatccattcctgccatctcttctagtgctgtcattcttttagtaatagcaccctgctgagctaagcgatgggatccaattgccattgtcactgacaaaacagtaggcatggcaataggaattcctccgataagaagcacgagcagattgtcaatcccaggacgatattcccggtgttgaattgggtacatgacaatgatctctactatcattcccacagcaatggaacatatgcagaagtttccaatagcagtcaggaccttctgaaaatggccaacttgatttgtggagtccacaagatgagcagccttgccaaagaaggtatgaactcctgtggcgataacaactgcattgatctctccctgcttgcatgtggagcctgaataaacactatcaccgtggcctttcgtgacaggaagagactcgcctgtaagtgcagactgatcaatcttcagtggatcgccttcaagtagacgagcatccgcagggataatatcccctagcttaacactaattatatcacccggaacaagaatgctagcatcctcctcaacccatttcccatctcgaaggaacttagctttaggtgctagacgagccatcagagctgcggcagcattaccagcattgttctcctcaatgaaacttattgttgaattgataataaggagtgtgataatcccaacaaagtcttgccaatcaggaggtttgcctcctccattggccaaagcaatggccatgattgctgcagcttccatgacccatgaaagaggattccacataaatcctaaaaacttcaaaaccttgctctccttcttctcctcaagtttgttgtggccaaagatgaccagcctctcctcagcagattctgttgtgagtccatttgaatcacacctcagagtctgaaaaacttcctcaagtggaacgttttccaaatccacagcttccttcaaaacagcatgcatggcttcttccttctcagccatctcaaccaaaacccaagttttaggtgatccacaacagaaaggtgcaagcttttggtgaataacacaatactcggaaccagaagagaaatcacacaaagaaaacagaggtttttttttgttttatcttccttcaccccaatatagaatgtgtgttgtgacgtttcttgtgcttttggtttctttgtgtgtgtgcggccggcctggactctcgaagtggctggcagctttttaaggacagcatggtaaacatttccggacgcgtgg

SEQ ID NO: 2203 - DNA, 615 bp, Glycine max
ttttttttttttttttttttttttttttttttttttttggaaaaccataaaagttttttatttatagtaatctgtagtacaaaagcaccattttctctcttataattttgatttacattcacaaagaaataagtatgatgctcatgatgacttggccacatcattaatgctacgaaggattgaagtgcatgcaagagtcaagaatatgcattgctacgaagttgtaagtcacaatgctagaaaacacaaagcagttcctcttatttattaagtagataatagacctcattgcttgctttaggcatgggtgttgtcctctactggagggtactttccataaggtggtttcttgtatggtggcttcttatatggtggcttgtaaaccggtggtttcggcttgtaaaccggtggttttggcttataaaccggtggtttgtacactggtggcttgtacactggaggcttgtacactggtggcttcttaattggtttgtagtaagtagcaagcccttgaggcatgaggataagggctgcaagaagcagcactaggaaggatacaaaggaagccatcttagtggggttgttttttcggcacgagggggcgcgcgtctcgag

SEQ ID NO: 2204 - DNA, 1999 bp, Glycine max
tttttttttttttttttcttttgttgtaactaatcgtatatttttttcaatgagaaccaacattgaggacggtttcaaaattagagagagaagttaaaactgaaaactacccagctcaagtattccgtataacaaatccaaagcttcctatttttctttacaaaaaattgaaacaaaatttacatatttacaatatctgtaagtaacactgaaaatggtatcactaactatctggactttccactgctctgatttccttgtgattttgattgatcctccatttcctttaagtaaatttctgatctggattcttcattttcaaatggtaaaattgacacggggacagcaggaaccgtatgccacctctctctgagaaaatttctgaacttcttcaccatttctctccgaaactcaagctcccttgtgaacatatcaaagagaagaaaggaaaaaatgtacttgaacgggacaatgaggagaatggttgcagaagatatcagcaccagtgcaacctcagtagttatctgtggatggccagaaagtaaaatagaacgtattttgaggagggagacattcacttgctgcataaaattctcgacatcacgcatggcatcttttacagcaataatcttttgtatcgtattagatggtggctggtcacgtattgtgacttcaccaaaagatcgaccaaggcggccttgctctttaagggccctgattgtcagcatgccaactgccaaaatcatcaacatcacgggaaacatatatgacagcaggtttcttgaaaagatcaatgttgctgggtatgccttgtagagttgcagcatcaatggtggcttgagtcttctccacaatgtggtacttatgtttgcttgtttttgctgctctttctatgaggtgataaatcagccacaacaagattcttacttaatattaaaccttttactgaaatgttcttccaaaaactagtggaaatactagacccccaagatggagatttcatccacttctgcaagtagacacttccatctatatcaaatacatggttgcggctatcagctatttcatcagaaggtcgagtttctggctgattccgggtatttacaaatcctgtaactagtggacctccccaataattaacagctaaagtttggaggacaatgtcaccatgtggtgcattctgtaaatatgagaactgaacaagcttggtgggatcatcaagcaacttccgcaaatattgaaggacttggagtctagcaataccatttattgcagtggttgttgctctatcctttcctttgcgagctccatatacattaaacaatgactcatcagaatcatcaggtccatactcgcgtatgaacctatgtaaagcgatgacttcatttataaatgcatgccaaacatccctcctcatctcgcctcctaagtcgatgaattccagcacccaccgattcaacctaagtatgaatattaatagaaacagaaacataaattatttttaaatgataatgttaaatgcagcaaagcactttacaaatgagctattttatccacacatcaaaatctcccacatctcctaatacacccttctcttatggggaaaaggagataaggggaaagcgagtctgatattctccataactttttatcacctgaatatctagaatatttaattggaattgatcttttttacctggagagattttggtaataaagatgagttccatgagctgaagaagggagctcaatttcaagggatcaacaaggttttaatgattgtgcaagtagaaactaggactttctaaatctagtagaattttagttggttaattctccttccatgagtcaatacaaggatgcacaaggtttaaaatgggcatgcaagtcaactagtattttatatagaagagaattaataaaatgaaaatatacattatcagttagttagaatttatgaagaattccatgtggggggggggggggcctacgtagctga

SEQ ID NO: 2205 - DNA, 1673 bp, Glycine max
gtttttttttttttttttttttttttaataaatgaggatcatgaactagatacatgaagccattttactttttttatagcacttacaaacatatatatatatatatatatatatatagtatgaaattattcggatccgacatcagcttcccaacccacatcattctctataaacgtggggggaaaaactaaaaaaatacaaaatcagtataaaaaatccatgttcgtttgttatgttcttccaatatactataattgatgctgctgttgttgaaggttgactaatttatagtatgctccatttttattctctataagacttgaatgagtcccttggtcaattatctttccatcttgcaaaactgagatttggtctgcatttcttatagtggatagcctatgtgccaccataactgtagttctgttctgcattaatctgtccaatgcttgttgcacaatacgctctgactcaacatcaagtgcactagtggcttcatccagaagcaagatttcagggttctttagaactgctcttgcaatggctaccctttgtctttggccaccagatagttgcactcctctttcacctactttggtggagtaaccctcaggaagaccgctgatgaagttatgagcattggcaagcttagctgcttcaatcacttctgaatcagacgcaccttccttgccataaagtatgttttcataaattgatgttgcaaaaagagctggttcttgctgcacaagaccaatgtgtctcctaagagatttcagattaagtcttgtgatgtcttttccatcaattaacacccttccggatgttggatcataaaatctgagtatgagggagatcactgagcttttaccagaaccactttgccccactaaggcaacactctttcctgcaggaactcttagattgaaatccttgaaaataattacatctggccttgaagggtagctgaaattgattcttttgagctcgattgttccatccactgtcttcaactcttctccaacctcacatgatattcctgactttctatccatcacttcaaaaactgatgcaaccatttgattccctttcaaaaggtctggggccagggccaatgtctcccccatggccagtgctgttactatcaaaacaaaaaatgccttcataattgatttaaagctagcaagctccttttccattaaaacagatccataccacaaggcaaggccataagatgagaaaataaagaactgggaaatgccatagaatatgccagcaatttggcctcgttgaagtgagcgtttggagggatcaacgagctcattagcataaaggtcaaggaccttttcttcagaacaaaatgcggcaacagtgcgtatattgctcacagcctccccagccagcatgttggcttttagatatgctttgctcaagttgccaccatagcctttcataaaaagtttctcactgatatgaccactaatgatcaaaggatatgtggctatgacaaccagtgttattctccagttcaagatgaaggcaacaataaatgaagcaacaaccaaaccaatattctgtaacagaattgttgaacgatcaacaactatagttcgtaataatgttgcatcagtctctaactgcgatgaaagcatggaacttgtgttgtttcggacgcgtgg

SEQ ID NO: 2206 - DNA, 1563 bp, Glycine max
tagctcactagtcgttggccgccctttttttttttttttaaagtgcaaaaattaaatgtttatatagcttacatttaataatttgaagttttctactgttttgttctagctgggttcttgcttgctaggcacaaaacgagacttcaattctcaacaacaaacttcacacatcatgaccacttaacatagaaaggaaaaaaatgggataagtggagtttaaaatgtctatatccaatatttatttctctcactcattaaatgatgcaattacaagaaattcttactctaagtactcttgagcaatgaacattaatttaaagctgaaataaaagttttaattaccccatatagctcccttgccttcaatgggtcactatcttgaaccccatgataatcccctggtgtgaaatgccccagaactctcactcccttcctttgcatcaacctcacaagttgcacctgacgatccacaagtgggtcaccgccacagccggtaaccagcacccaccatccacgccgtttgatcatttccaatctcttaggaccattccctgccgttggattgcaatactagtgatcacggtcaactccaacgggcaacgataactcccacaacgcgtcattaacacacagcgccaaatgaggttcgttctctagcctcagctcagaaccggttctttgggtcccactgaaaaatggttgaaccaaaataagccctttgatcttgggaatctgattataagtaccatcaaccgtggctgctcgtagacccgcgttgtaggctatgtttcctccggcactactccccatgagaaaaacgttggagtaatcgacgtagtttgtcagccaatcatctttgttggttttgatccactgcagtgcctccacggcatcctcgtatgccgcgggtagtctatgttctggtgcgagacggtattcgatggaagcaatgaccgcaacgacgtcgtttgccatgttgaagcaaaaattgtggaagattgttgaggccgcaccgaggaaaatgaaccctcccccatggtagaaaaccaataaggggagcttggagctgtgatccagtgccacgcggggtaggtagactctcgcccatgtgccttttgattggttgatggagatgtctttggagagtacgagggtgttgaggttgggatccggtgcgggcgggctctcggggggtttgttggggcgcgtgacggtgccgtttttgttaggcataaggttgagctccttgtaggggtccttgttgcatgggattggagtggattgggtttggagagtgagaaatgttaagaaaaatgcaaatgcaattgaagatctccaaaaggatttgtagtgtgggaaagagaagaggggcatggttgaattttttaaaactatgatagctagaattaatcaaaagatatggaagaagagggagaaagtagtgttcatggaaggggagaagaaacaaatgaaatgatgataggtgtgatatctttatatcctggatttggatttagtcatttagattctttgcagggaatcccaccataataattaatttgt

SEQ ID NO: 2207 - DNA, 2186 bp, Glycine max
aaaaaaaccaacattactagtatttaattatacttcgcatgctccccttatagtttttggaaattgatatataccaaagccctgagatttttcccatctttctcgtgatagttcttctggctcacaagccaataaaggcatccacaaccttcaacttcaacaccacttgaacaaattcactgtctagcgaatagtgatccaccttcatttcccgtttccaataatctaaacctcactctaatcagttctcaggattcccatttgcatcacactcacaagttagtttaattctgtttggaacttcgaagtacaagcttttgagaccaacacaatggtgtctgcctgtgtgaccttgaaagccaatacccatttagtaaaatcgagaaaagacaatacttttcgtcaagatggtggttttttgggtgagagaatcaaagggggtctgaattacagtccctggatcattaaccaattggcctcaacttcaagtttgagaacccaggagaaggtgaataaggccaaacctggtgttgtttctgctgttcttacatcaagtaacatcaaagaatcagtggcctttcaaatgccatcgtttctcagaagaaaggctgatccaaaaaatgttgtttccgtcatattgggagggggccctggaattcaactctttcctcttaccaaacgagctgccacacctgctgttcctgttggtggatgctacaggcttatagacatcccaatgagcaactgcatcaacagtggccttaacaaaatatttgtactgacacaattcaactctgcatccctcaaccgtcacatctcccgcacctattttggaaacggaatcaactttggggatggatgtgtggaggttctggcggctactcaaacacaaggagaagctggaaacaactggttccaaggaacagcagatgctgtgaggcaatttacatgggtatttgaggatgccaaacacgcaaacattgagaatgtattgatcttggccggagatcatctataccgaatgaattacatggaccttgtgcagagtcacgttgacagaaatgcagatattacagtatcatgtgctgctgtaggtgaaagccgtgcatcagattatggattggtcaaggcagatgccagaggtcgcatcatccaattttcagaaaaacccaacggagctgatctgaaagcaatgcaagtagatacctctgtgctcgggttgccactccatgaagcaaaaaggtcaccatatattgcatctatgggggtttatgtattcaagacagatgttttactcaggcttctgaaatggagatatcctacatccaatgactttggatctgaaatcattcctgcagctgtgagggaaaacaatgtccaagcgtattttttcattgactattgggaagacattggaacaataaaatcattttacgatgctaacttggctcttactgaagagaatccaatgttcaaattttatgaccccaagacacccatttacacatctccaagattcctaccaccaacaaagattgacaaatgccggattgtggatgcaataatctcccatggatgtttcctgagagaatgcactgtccaacattccattgtgggcgaacgttcacgtttggattatggtgttgaactccaggacactgtaatgatgggagctgactattaccaaactgaatccgaaattgcttctctgctggcagaggggaaggttcccattgggattggaaggaacacaaaaattaggaactgcataattgacaagaatgcaaagatcgggaaagatgtcatcatcatgaacaaagatggcgttcaagaagcagatagaccagaagatggattttacattcgatcaggaatcacagtcatattagagaaggcaacaatagaagatggcactgtcatataaataaatgggtggaagtacttatttcatggactggtgtagtggctagcagtactagctcgaagaagcattccaaggaactttggggacagaaggatccaattgaaaaatcagcactccccttttgctatatatgcaacacataaggctctcccactgcatgtaaaaataaaatgaataaacagtgtatgaaatcaagatgcataaacgtaaataaaatgaaaatgtgaatgtgattgtgaactgccgaaaaaaaaaaaaaaaa

SEQ ID NO: 2208 - DNA, 1111 bp, Glycine max
taccccacatctcacatcccacctttcacaataatctttggcacaaacacacacacacccatctcctccatccttgttctccacaattctagctacctagcacaaaaattgtagtcatgttggggaagaggccccagccactgatcggaaaaatctccgaattattggtctccggcggtcgtgccgccgtgcttttcgatgccctcggaagccctagaagcccgtttgacatgatgaacttaaagatgcaatcaccaaagggcctaaaaagctatgaccttggtggtgttggtctaggaattgtggtggcccttgataaatcatcatccgaggaacaaggccatgtttgcacatcaaattcaaaccgatccgtaccaatcccagttactaaccaacgtgggtttcaaaagggtgtgaatgaaattcccgctggaagctccgaggattacacgtttgtgacataccatgtacctaacaacaagaccatcactaaggtttattatgatggcggtgaaggtggaattctaacacatggctactataatattaataataataacaacaacaacgttggtgttggtggtgttagaagaatcccaccaacgcaaactttaattgaagaagatgaacagtcatatcccacctcggattttctcagctcgtgtcacttgtgccgaaagaatctcgatggcaaagacatatacatgtacagaggagagaaagcattttgtagcaacgagtgccgttcaaggcaaatatcgatggacgatgaacgcaaagaacggtgtagatcagaagcttcaaggtctgtggagttgtcaagttcaccatacacagcaagggatcaaatgttttcaactgggattgttgccctttagcgtttaatttctgtcactgtagtagagactcatatatacattgaagtttgaattcacatcatataaggctatactttgtgaatgaaattaagacaccttagtggtgtaaccatatgaaaattttggatcggaaaaagtggtagagattttgatgtagttgaatactaataagagctttcttcttctttgttttatcttacatagaagaattataaatttgcggtttcaattcc

SEQ ID NO: 2209 - DNA, 1121 bp, Glycine max
tttaagcaacgaatatcactagcatcattcacgtaatcaaccgtgtcaagaatcaaaatcctactataaatccttaactatttgcttcccattttcatcacaatcagaactttctacaaccttccagaaacatacatagcacaaaatgacttacatttaactgaatagttaaatgcatgtctattattaatcttgaatctcaacaaaaaaaaatgagatctcttttcatgtacaaacagcagagagactggtcccatctcaatgactaggtgaagaatactaagataaagaggaagatgaacagggccaacaaacccaatatcatcatgatctgaccctttgcactagccttcttcataaccattgccacttttttttggacaaaatcaagacgatttgttgtactgtccatctcagaaccaagctcatctagaatcttttcctgtgcagtgagttcatcatgtattgtgagtccaacacctccgattcttcgtacactttcactgagctcatccaattcctcatcctgtctctttataagaagcgtctgtctatctgattctgattgtatgaaatcatcattatctctggcagcatactggttggagctatcagtttgatgagaatttggtagcctcatcagttctcggcgcatcccatttacactagcatggcttgtggtacttgagcccttgccagattccattgctttcttcattgtgccaacctgagaacgagcactgcttgcccatctccttcggctttcaacctcagcttcatcaatcccataccaagaaggatctctagacgctacagcaattgctttatccaattcatctacctgccactctatgctttcgcatccagcaagaacctccttcgtaagatgtccttgttccgcagctccagacttgctttcccattggtgaaaagtagattgcagcttatcaatagaatcttgaatctcggccttgacaacgtaaaatggatcctgggcagagggcatgttatgagagaggaacgaatggttcagacttcagagagaagaacacacgcactgcgtttggttttgccttccaaaaaatttgcgtttggttttgcttcttccttttgcctttgat

SEQ ID NO: 2210 - DNA, 499 bp, Glycine max
gaaagtaaagtcataaaatttcctctgtcaaattacatctttatctgtccaaggagctcaacttttacaccattgtgatcattcttcttccccggcattggttatattgtaatcttcccaccaatgttttcttgtctttggaatagtgggaatgtgaccaccggaacctattgttactttcctcatcagacaaaaccctcctcccattcccattcctcctcaatctaccatcaccatccattccatccccgccataattcaaaggagaagactgttctccaccgctagaccgatcaacattattggacaaaaaccttctcccattcccattcttcctcattctgccatcaccatccgctccattcctcccataattcgttcgagaagattgcccttgccctcgccctcgattgctagacctaccaacatcatcagacaaaaacctccccccattctcattccttctcaatcccccttctgtcgtcttctcgcagccgta

SEQ ID NO: 2211 - DNA, 877 bp, Glycine max
tctaattagaacgagaacgaggtagtagaccactagatgcgtggataggtactgtttcgttcgtaatttgcaatttggtgagattcttcattcttatgctgtgcgggtttcctcttcagattcatggcggcaacccaaccaccgcagggtccggatcgtaccaccgaagagataccggccgaaccagataacttgaaggagcagggtacaacaactataggtcattcaagggagaccacaagtcaatcaggatctttaggttcaagtggagattgtcctctgtatcctcctaatgtgtatgctccccaagcccaggctttctactatagaggttttgacaacggcaatggtgaatgggatgaatattcttcatatgtcaattctgagggattagacattggatctcctggtgtttacaatgaaaacccatctcttattttccattctggttatggcttcaaccctcaaatgccttatggaccatattccccagttaccacacctttgccttctgtaggtggagacacacagttatactcccctcagcaatttccatacactgggccaccttattatcatcagctggttcctcctagcttaccatatcttaattcacctactccagtttcacagccagagctcaccagcctggtaggtattgaccaacaagttgataacatgttttttggaccaagagcgggctatccgtcagtgggatcttttggtagaggcaactttcctgtagcacctggttcctttggctttcatgaatcccaacaaggatttgaaggatcaagatctggtggaatctggtcagactgctcaaaaccatctgaaagacagagatctttgatgcctctatcgccatctgtttctc

SEQ ID NO: 2212 - DNA, 949 bp, Glycine max
aaaaaaaggttttgtgatgtgaacaatcatggaagaacatcttacactttcaaatccaaagaattgacgagacaacaaaatgtaaatccaactatttacattacatctacgatgtaggtattaaacatcacaaccaactccataagttacttcccagtatctcattgagcacatacttaacaaaagggaaaaaagaactacaaagagatctaaagcccaaattcaaatcattgatacagaataagactaccctctaacaatacagattttcatagtcagaggatatcatcataagcaacaatttctctgcccttgaaagacacttctaaaactgagctacctgagctagcctcgctaagtttggtattccctatgggtgaagcaagtctgttacctcttccatgcttgctcaaaggtacctcagcacgcacaagctttgacatagaacctttgttcctgctattaccaactccttccctccacatggctagagggtccgttgcccacaacacctgaaccattttagagttaacggtgattccgaaggtggggtcgaggccggcggcgatggcagcgtcggcggagtccttggtccggtaggtgatgtatccgacggcgtcgcggtcgatgcggatgcgggagatggcgccgtagatctcgaatcgggacttgagatcgaggacggagcagtcctgggggaggcccatcacgaccaccgcggacggcggcgccggtctcatcgtaggcgtctcctcctccgcgggctccggcaaggggaggcggcgcttggcggcgtcgtggcgggaaaagtaagctgacctgtctctcttgcgactcattgttgtgttgtgagggaatatgttactgtgcaaatttaattcgatttttctaaggtcttgtctgagtgttgctctaaaatagtaatatatcatatgcaacaaaaccgttt

SEQ ID NO: 2213 - DNA, 1591 bp, Glycine max
cacattacatttttctttttaaagttaaaaataacaaacttattttttgtttttcattatattgagataagtgtaaaaacaataatacatatacacccgcctttctaaccaataacattaaaaaagagagagaaaaaaaagccacagatataaaatacaaacttgataaaatgaaagaattggacctgcccactgtctagtgtcttcattgctacaatatgcaaacattgcaagaggcaacagcaaaatctaaaaggagaaactaaaaaacactctccatgcatgcggcgtcacattcaaacttggacactaaccacagctacgcccattatataggccgaaagcaaaacgctatgataagaacccaaactatggtatatacccaataaaaccacactatctcaacagataagagcattttaaagataactgaggaaaggtatagcagctaaagaagcagacgtcactctttcatttcaagtttagaacaattcgtatttctttttcagcatgtcttgcttccatcttggcaacttgtaaaatgcttcttttgccattccaaatacagtgttgaactcatcctctgacagataggcctctctccgtttaagatcaactccaggcacattatgaccagatttagtctttaattgctcataactgaacatcctttgaccatcatttccttcctccgcattctcttgttttggttccaaatccccattgctaccggtctcagggggaagttcctctgtttccttggcttctgcaacttcttcaacttcagaggagtcacttttagtttcagtagcgctaccttgagtgataggactcctgctagcaacaggagaaccatcaggtgattttttcttttcagccataagaacttgtgaaagagcagctactgctgcagctctttgtgatccttgacctcttccagatggcctaggagtaaaagtcttcgtcccagatgatgaattaaatgcagagtttaaagcggctaaagcttctgccctttgccttggtcccccttggcctaacccattcaatctatcttgtgccaaaccggatgctttctcagaagatgaaccaaatgcattagataaggcagccaaggcttctgctctttgtcttggtccccctagacttgacccattcgacttttcctccacagcatggccaaatccaaagagtagtgacacttttttctgaaatgagttccccagaaccatagcttttgcatgatcccatgaaaagtatgttgtgaaaaagcaaggttcattcccttctgttactttatatagtggtacatgtggagatagcccctccagagatgcagccaaatctatgtatttctggccgatatcaaaagcattttgcttttcctttgggtccacagaatgaccaatccaaataaacacttctgcatgtgtgtcaagtataaggatatcctccggcaacaggtcgtcctgagagaagttgtaaacctcctctaccttgcagactttccggacgcgtatgataaaaatacagttagaacacattcagaaccttctgtggttactatttcctaaaattaagggggaatttt

SEQ ID NO: 2214 - DNA, 2005 bp, Glycine max
tttttttttttttttttgttaacaaacaaacaaattttcattctttatattgagattcagtataacatgcaatacatatacacccacctccctaaccaatagcaacaagggataaaaacaaaaaagccacatttttaaaatacaaacttgacaaaatgaaagaattgaacctgtccactgtgtttattgctacaataatatgtgaacattacatgaggaagaagaggcatgctcaatttaaaaagaagaaaactaaaactcactctccaaggcagcgtcacattcaaacttggacactaaccatatatagctaagtccattatgggccaaaagcaaagtgctatgcataggaatccaagtagggtatatatagcaaaaaaagccacactacccaacagataagtgcatctcaagatatattaggatgcaaaagcaacatatatgttgcttgttgtgtctgagtctagaacaaatccacttttcttttcagcatgtcttgcttccatcttggcaacttggagaatgcatctttggccattccaaatacagcttggaactctttgtctgacagataggcctctctccgtttaagatcaattccagacacaacactaccagatttagtctttaattgctcataactgaagaaattttgattattattttcactgtcatttcctccatcctccacattttcttgttttggttgttctgaatccccattggtaccagtttcaagggcaacaacttctgccgcctccttgacttctgtaacttcttcaacaatttccttttcagaaggggccctttcacttttagtatcaaagttgctattctccactacaggactagtgctagccacagggagaagtttcaggtgaagttttcttcttttcagcagtaagaactgaagagagagcagctactgctgctgctctttgtgatccttgacctcttccagatggccttggagtataaactttggttccagatgatgaattaaatgcagagtttaaggctgctaaggcttctgccctttgtctcggtccacctcgacttagcccattcgacttatccgcactggacgttgcctcaggagatgaattgaatgcattatttaaggcagccaaagcttctgctctttgtcttggtccccctccttgacttgacccattagacttttcctctacaggatggccaattccaaagagtaatgtcacctttttctggaatgagttccctggcaccatagcttttgcatgatcccaagaaaagtatgttgtgaaaaagcaaggttcattcccttctgttactttgtatagtggtacatgaggagatagtccttccagagatgcagccttatctatgtatttctgggcaatttcaaaagctttttgcttttcttttgggtccacacactgaccaatccaaacaaacacttctgtgtgcgtgtcaaggatcaggatatcttctgttaacaaatcatcttgggaaaagttgtaaacctcctctacctgtaactttcctctattaaaagataaagtgaacaaatgtgggtctctgacaatgtcattagtgacatttttgctggtgtaactttgttttcctccaagtgcaaaccagaaagttgaggtttctgttccttctttagcaagctttaaagaaactcctggccttaaaaactcagcaacttttgctgcaagctgctgctgctcaagggaacattgattcccatgcctatgtaaaaacagctgagccagattgcaggacaaaacactcggtagagttcggggggggggctacgtagctgactcgcaccactttattattatgagtggatgttccagaaattcgaataaatgcaacactctctgctgtgtatgtctcatctggcaaacctttatctgctatcaattttttgtaaccagagctcaagcctcccttgaggaccaccattggatggaaaagaacaataaactgtggtggctctttaccatcaaatatg

SEQ ID NO: 2215 - DNA, 1422 bp, Glycine max
tattgaatcaacaaaataacataaagtaagaggggtgttagatgaataataaagcacgaatttacattaaataataataaataataaatagatattacatagagaagtaaatgtgtcactctttaatactagtaatacaaccatagaagtaaaagaagacgtattctgccaaaacaaaggagtgtgccagccttgttgagatggtgaagctgaagtctcctaatcatgcaatggctgatgcaactgtttcaacctttgttggacgccagaatgtcttctgaatgcaaaggaatccctccccatttttggaatatgtcaactgaatatcccagtgtagagatttagccatgctctctatctcgccaatagtttcaacattgtctcttatgaccaaatatccttctggtctcaggatcctatcaacttctgcaatcactgccagtatgttgcacttttccttaagtgttgagaatatagagtcggcatgcagaagatcatatgatctagggtaagtattcaatgattcacaccaatcatgataaataccgaataatccacgctcatatattattggcagtgtgtctggagaatcaattggaaccacattcattacccaaacattcactttcagggctctgagtgctgcagcaaagcctccatagacagctttcatgtccatgacatttcttactgaagaccaattgatacccattccattcaaatacgagtgggaaataacatttttccaatgcttgtaatcagcagtgaattccactgatgcagctcttccataaacaccagcctgagagtctatccagtaaggtggtttctccaacctcagtggccattgctcaggccagattgatccacgctctgatgcatctacgggcactttgtgcatacaagcctgtagtgatacattccaggctgtatttggatcatcagattcgctgcacattggtggctcatgttttattctgttgttatagcactcattgtcagttggttttctatatattgctgctgccactccattcaatttgtcctttgcaattaccaccagatcccagcacattgactttgtaatttcacccattgctttccaaatctcaacatcctctggatccttttggtacactggagtagcagaccatacaaagtgacctccagggcgtaagacacgattaggcgccgggcccagcgtgcctccctcgacgtgccaagggactctacaacgagcacagtggagaagatcaaagacagaaccggggtagggtaatcttacagtgcccatgacacctaatgtggcaggaattccccgttccagtgcaaattgcacttgtgcctcgtgtacatcttttggagcaaatgacatggtcagaacgtctttttcaaacagatagcctccaaagctggctaccc

SEQ ID NO: 2216 - DNA, 2149 bp, Glycine max
atcatctcagggttgggttttcaaccctcaaaccctgccttgccttgccttgccttgccgcacaggttggggttgcattgtgatcatcgcacgtgacgtggcagtcccctattggcacatgtcacgtgacaaaccaccttcccggttgccccaaaacccaatcctcatgacccaacctacacacaccatacatcaacaacactcccaccttaagttccctgaactaacgttgttcttcttccaattccaacaccaacaacattagtaagtaacaaattaacaacaacaacaaagagagatagaaagacaacgacaacaatgaataacggcgttagtcaagaatcgagcgtgctcctcgatttggcgtcccacgtcaaccgcttcgctttcgattccttccgttccgacaacaacaaaacccttctctccaatttcttgcacttcaacggcaacacaagaaccggagcagcagcagcgaaacgcggcgtttctctgggggggaaggttgggggagcgagtgttaggttcgggaacattctcaacgacttcaacagagccgttaggtttcattgcgagaagatcccgattgggttcgcctcgcttcgcgtcggtgacggtggtgacggtgctgatggtaacgggaacggcgaggggaatggggttagagtggatgagtgtggcggtgtggagaatgaagggtttagagggaatggtgtggagggtgagaaacctaaaaaagttttgattttgatgagtgacactggtggggggcatcgagcttccgctgaagctatcaaagctgctttctatcaagaatttggagatgattatcaggttttcgttactgatttgtgggctgatcacacgccttggccattcaaccaacttcccaggagctatagttttctggtgaaacatgggccgttgtggaagatgacctactatggaactgccccgcgtgtagtgcatcagtctaattttgctgcaactggaactttcatagctcgcgaggttgccaaaggcctaatgaaatatcagccagatataataatcagtgtgcatccactgatgcagcacgttccacttcgaattttgaggtctaagggtcttttaaagaagattgtttttactactgttatcacagatttaagcacatgccatccaacatggtttcataagcttgtaactagatgctattgtcctacaacagatgttgcgcaaagggcattgaaagccggactgcagcaatcccaaataaagatttttggtctacctgtccgaccttcctttgttaagcctgtccggccaaaggatgaactaaggagagaattagggatggatgaggatcttcctgctgtattattgatggggggaggtgaaggtatggggcccattgaggctactgctcgggcacttggagattcattatacgacgagaatattggggctcctgtaggtcagatccttgtgatctgtggtcgtaataagaaacttgctaataaactgagttctattaattggaaggttcctgtgcaggtcaaaggatttgttaccaaaatggaggaatgcatgggagcttgtgattgcataattacgaaggcgggcccagggacaatagcagaggcccagatccgaggcctccctattattctgaatgattacattgctgggcaggaagctggcaatgtcccctatgtagttgaaaatggatgtgggaagttctcaaaatcccccaaggatatagcaaaaattgttgccgagtggtttggtccaaaagcttacgagctacaacaaatgtcacaaaatgcattgaggctagcaaggccagatgctgtgttcaagattgttcatgaccttcacgagcttgttaggcaaagaagctacctaccagagtattcatgtacagcttaactgacacagactgagggtattttttgcaacactatttctgagaaaaatgtacaaggaagcgatgatgtatcactagcaaaaattcttgtattttcatccatcattatttttcagatgctcatttgaaaattttaaatagatatagttttgaatgtttcttgattatcacttgtgttcatgttagagaaacatctttattttagtaacattactatgaaatactgaacagaaacttgca

SEQ ID NO: 2217 - DNA, 1895 bp, Glycine max
atcaaatacgtaaagaatcaacttctcatcacaatttttttttttttttttagctaccaatacatttcacctttactttattcattcatattagtaaaaagtaaaaacccatcatcccttacaataaaaatcagaaggggatagagctattacagaactaaactacttatacagccttttttgaatcctcactctagaaaatttaaactttatataaaaaaaaaacaaaaagccaaaaaaagaaacaaacgaaaaaaaatcaaaattttgggttttctaggaacacagctgccaaaccggactgagaacttttgggtttcatctccggtggcttctgattctgaaccacgagttttgactttgacttttcatcatcttcacggaaacttccacacgaagttgataacaccaccaactctttcgcaaggtgctctttctcttctgtttcctctttcaccccgcgcgagcacgtgtaaggggagagccatttcgcggtgacgtattcgacttttctccacggcggaacgtgcatgccccttttcttcagactcagtttcgccgcctctgaagcgatggccacgatactctgcaaccgctcgcacgtgccaacgaatacgtaaggcagcgtttggaggatcgctttgtaggtcttggtgggtcgagctatctcgaattctgatctgaagtcaacgtcaaccaccacccgctcctttcccattatcacatcaatgtattcatattccccagctggacagaaagttgatttttcccagcgagatttgcatacggaagcgtcgtatccgagagctaacaacgcttcagtaacgatctttctgcaacaatcgtctttgcgtttgcacgttgttttattcttctcaatgatctttgtagtgtccgctagcaaattcctttcactgacactcgcacatgtcaccaaatccttgaggatttcttgtgtttcgccggagaaagaataattggactcgccgaaaagcgagtgcgtttcggcgtcggaggcgtcgtcgaagctattgtagcggctgcgcgcgcacttcacggaaacagagtgcttctcgtgattctcttccatgaaattctgcaccattttcgccagacacaccgagctcggctcgaaatcagcggagccgtctttggcggaatgcggcggctcctcggcggggtaggcgatcttctccgccgccgatgagttcctgaggacgccggagaactggcgctcgaagaggcgcttcaggcgcgacctcaccgccggcttcaccggctcaagccgagtagcctcctccggcacgggcgaatcgatcggctgaatcttcattgtgaaaggcatgacgataacgattccagaacagaattagagtctctcaattctcaagtatcacctctcggtcttgttcatctccgaagcacgagcttaattttaaattgcgagtcagaacagggaaaaatactagtatttctaagcgaatttaatctctgaaactgaaactctgcagaagctgcacgcgaaactttgcagtagttgactagaaaccgctaattttagctaaatgaaaaagatacaagaacgataaataatactactatatagtaataaataaatgcttttctggtctttttttggggggggggcctacgtagctgacagcgataagcatagaataacttgtaaactctgctaagtaaaatcgcttttgcttaggctttggtttctaccagataagaagattggtgctcttaaacaagcgatggttgttgcttgggaaatcaagatcagcagcgattgccggagcgtccataacctccggcggtggtttgaattttccgatgagtggcgcggcggagaagggagattggagatagagtaatgtttgttttgt

SEQ ID NO: 2218 - DNA, 698 bp, Glycine max
ttttttttttttttttggccatgaactaagctcataacagaagaaaagagttctgtaagggtatacaaatagtaatttgtcatttgaaaactatcaacatgcaacaataaagttaaattttgttatttcagcttatgggcacataaagcttgaaagtcgtatcgatgtttacatattacaccagttcaacactagatacaaaccgtaacatataaaaggcatatacacacattggatctctaacaatcagccacagcaggaaccacatgcaggcagtgaactatgatcacgtccccttatactatctagcccacgaacattgtcgagacccccacgaggagggcctcgtggaccgctaccaccgccaccaccgccgccaggacctcctccaggagcaccgccatcccatttcttacccacagaacgttttctgtacgcatctgacttttccatcgagaacatagttgcgaaaaacacgcctatgaagttaacaatggcccagaaaaaatcagtgattgttttaagtcgccatattgatcgctttgatttgacaacacctcgctcaacgtaagccatggatcagagacgaagattgctgcaatttaattgaaaggggaatttgggaataagggcttcaatttgttcttattaaataggcacattcaattcaacgttgttctagactccgagtaaatgct

SEQ ID NO: 2219 - DNA, 1429 bp, Glycine max
  misc_feature (1429)..(1429): n is a, c, g, or t
cccagtaccatggaacccagagagtttaatagcaggtggtccttcagatatatccttagaaatggccctccaaggattccggccgttttttttttttttttttgaaatgcacctcttcatctacttaccattcatgtttgagtttgtacagcaccgcattcacaaccgacgaaaaaaataaaggaagggttaacaataacccaaattaccaaaaaagaaaaaaagtaattaaaaaacaacaaaacggttctgatctcttgtaataagtatcaaacacagaaagccgatgatggagtcaaaactgagccgagccacgagttcctcaagccgaacattcaagccccagctccatcttgcacgagccactctcagccgagccactaaaatttttcaactcaatccttcttttcttcaccggaaccacgggccgcgcacgtgaaaccggttcgaacccaagcgtaagctctaaaccaacatcatcgctcacacgcttcgggttcgtttccggttcttctcggaagagaatcgaagtctccggcgtctccgccgacagcatgctctcgctctccaccgcattcgccgcctccgactggtggctcagcgtcgaatcgtgacttccagaccggttcatcacctcttcggtccactcgcatgccaccaaactcggttcagctgaacccaattcggttcccttattgttgttgttttcgttggtggtggatttgggcttggcgttgttgttggcgaggggtcgcttcactcgagaccgagtcttgactcgttggtgctgagtttcgttggacgcggcggcggagttctcgtctttggacacgtggcgtatgtcgtaagccttgagcggtgggccccgcccgctagccgcggcttcggacgtgatcggcgtaatcggtgcgcctttcaagacgttttccacggcggcttgacatagctgccagctcccggaccataacaacccgacagacccgtaaatcgggttcaatatccgaccgcatgcctcgtacaacaacgaacgaaagatcgctggacgaagatgttcggggcctgcgttaaccaggttcattagaccagcacggccgtagaacttggcaagaaacacagtagcattggcttgagattctgggcttttgatccattgtaaacagggtctgatgctgcaattttcactgcaaccttttctgagaactcgacatccattgcagctcatccgcatttttgaagacccgatggagagaatctaagggagttgagaaagaaagaggcgaaattgacaacgattttgaaggagagaaagagaaagagaaaattgtgatccgaatccggaccgctttgtgggaaagaagggtatatatttgttggagggttaaggacagagagagagagagagagtggatttttcaggtactggatttcn

SEQ ID NO: 2220 - DNA, 1552 bp, Glycine max
gccgccctaataaaaggacagatttagttctgttatgttttttttttttttagtaaaagcacataatataccactttacaatgactactgcaattacaacattgattgagggctcccagaacacaagctcagtgtaatggttgccttttcttattttgctagctttgtaacttataaaccttattttcatattcaataaccagttaaccaataagtctggtttataggaatgatatatatttgatcaaacaagtctatattccagggtggtcttttagatcaaaaacacggttctggcaagaagggttgcaaggataattgcaatccacgtgacggaaagaacttcgaccataaaaccagtctcccactgccttggcaatagtcgtattggcaagctgtggagagtcactcttataccatgtctcctgtgattctgtttggcagtgagcatagcaagagtctatgaacattcctttagatgaagagtcgcctaccacactcacagccttttcgaattccgacttgaagtcttgcattttacttagttgatcaggtgagcagttgcttatatcaagcttgcagctatgccaactgtcactgggatcagcagagccaggtacaaagatgttctgaatctgccatgagtcataggctgcatttacaacgaagattggagtactgatatgtgatgccacatattgtgggaaaaagcatagttctgggctgaattttgaagtgcaggatgagggcaaattctttgctgagccatgagttgaaacaacttcactgtagaacttttcgatgaaatgtgttcctgagatatcctctacattgacaaaataaccagcatctggaacacatttcacattagcttcagaaggcaacagatttttaaagcgatcacagtgtaatattgtagtcagtcctccagctgaacagccagagagaatagcattttcagccttttccaatccttttgctagtaattcttccattacagctgaaaaaatccttgctcctctgaagtgcaaattggttgtttgatcaacttcttccacatcaccagtaaacgatgacccatcacagtacctaaccttgactctattccaattgtagaaatctggattatactcttgttcgttgcttaaaattgcagaaaagtaaagatcctccatttgcttagatgaacctaagcgactatccttacggtaaaggcaactctctacattgttgcaccatcctcctccctcaatgtgaacaatccagttcttaatcccttcttcaaatccgttgtcaaagtggtatgctggggggcttccatccaaacaaacagctccttttgattctgcattcttcaccaaagtcaatggaacaagagatccttctgccttaagcaatagcagtacacaaactagaagatttaaccatttgctgattcttgcactctccattcagcaaaattgaaccaaaagaaaaggaataaacctgatgaaaaggaagaaggggtggtgtggtttgaattagaatgtgcgtggggggcctacgtagctga

SEQ ID NO: 2221 - DNA, 797 bp, Glycine max
tttaggaaatagcagatgcacactaactagaagttgatgcatgcttaactttttttttttctgcacacaactaataaggattatcattcatgtaataaacataacaatctaagaattaaaataacttacaaaaatccctccaaattcaacattttgagaagtatagaaaatcatccatgaagcaggcagtacacatccttcctcacatctcaccaagtcctgaattttctatttgctcaaatgcaccagaaaaccctgccactttaagttaatttcactaacggaaagtttacactacattcatagacatgatttgcctagcaagaccaggatcttgttgtagcagttctctcaaattggtttccacctctgccatctgtttttccaagtattcttttgagctctgtaatgcagtaattgaagcttcaccatccttaaacttggtctcctgttcattcattaatgttgccttggtctccaatacaaacattcttccaatggatttgtaaacattcgtatcatcaggaacttgcttcagctcctccatggtcagaaaagcacgctttttttctgcttctttggaacgcatctgggtttgcacctgttttatttttccagtagtatcgatcatgcgactttgaatttcaaggaaagcagttctgttagcttcgtctgccatctcaatcgatcaatgctaggagatgatcctacaaagtgcaaactgcaactctcaaaaaccctaacgcgattggatccgggcttctgtcgtcttctcgcagccgtaaaaataagcactt

SEQ ID NO: 2222 - DNA, 792 bp, Glycine max
ctctaactagaagttgttgcatgaataaccatactgcacacaactaataaggattctcattcatgtaataaacatagcaatctaagaattaaaataacttacaaaaatccctccaaattcaacattttgagaaggatagaaaatcacccatgaagcaggcagtacacatcctcacatctcaccaagtcctgaattttctattttgctcaaatgcaccagaaaacccaccaatggaagttaatttcactaatggaaagtttacactacattcattgacattatttgcctagcaagaccaggatcttgttgtaacagttctctcaaattggtttccacctctgccatctgtttttccaagtattcttttgagctctgtaaagctgtaattgaagcttcaccatccttaaacttgttctcctgctcattcattaatgttgccttggtctccaatacaaacattctcccaatggatttgtaaacattagtatcatcaggaacttgcttcagctcctccatggtcagaaaagcacgcttcttttctgcttctttggaacgcatctgggtttgcacctgttttatttttccagtagtatcgatcatgcgactttgaatttcaaggaaagcagttctgttagcttcgtctgccatctcaatcgatcactgctaagagatgatcctaagaagtctgcacactgcagctctcaaaaaccctaacgcgattggatcccggaacctggagccgtctcgcagccggaaaaataagcacttgaatcaaacgcacgtttcgtgtag

SEQ ID NO: 2223 - DNA, 1162 bp, Glycine max
cccacgcgtccgcccacgcgtccgtacggctgcgagaagacgacagaagggggtccaaaatcctcactccagccacacgcctcagtagaccatggcctcattgggtgggttacaaaatctaagcggcatcaattttcttatcaaaaaagagggtccaaaagtcaatgcgaagttcgagctgaagccgccaccatatccactgaatggtttggagccggtgatgagccagcagacacttgagtttcattgggggaaacaccacaagacatatgtggaaaatctgaaaaaacaaattgttgggacagagcttgatgggaaatcactagaagagattatagtgacatcatataataagggtgacattcttccagctttcaacaatgcagcacaggtatggaaccatgacttcttctgggagtgcatgaaaccaggtggaggtggaaagccatccggggagcttctagaactgattgaaagagactttggctcatttgaaaaattccttgatgagtttaaggctgctgctgcaacacaatttggttcaggatgggcttggcttgcatatagagcaagcaaatttgatggggaaaatgcagcaaatcctccttcaccagatgaggacaacaagctagtggtgctcaagagtcccaatgctgtgaacccccttgtttggggaggctattatccacttcttaccattgatgtttgggagcatgcttactaccttgattttcagaaccggcgccctgattatatatcagtgttcatggataagcttgtttcctgggatgcagtgagttctagacttgaacaagcaaggctttaattaaccagtgcatgatgctgaattaaatgcagaataagtgatttatcctgatagtgatgatgaattggatggcgtcatgaggaatagtggattatttttatctagaaagtgtacgatggcacatcttttgtactttaaataggtgttgtggtatcaggctaaatcacttcagcctgcagattatgttctataattagaaatcttagttatggttctctttgtgtgactgtgtgaacaataaaattgcttatgcatgaacattcagcaaaataatactatgttgtagaaccttttcacgtaaaaaaaaaaaaaaaaaaaaaaaaaaaaaaaaaaaaa

SEQ ID NO: 2224 - DNA, 1168 bp, Glycine max
  misc_feature (1159)..(1166): n is a, c, g, or t
cccacgcgtccgcccacgcgtccgcccacgcgtccgcccacgcgtccgtacggctgcgagaagacgacagaagggggtcctaaatcctcattccagccacacgcttcagaagacatggcctcattgggtgggttacaaaatgtgagcggcatcaattttcttatcaaagagggtccaaaagtcaatgcaaagttcgagctgaagccgccaccatatccactgaatggtttggagccggtgatgagccagcagacacttgagtttcactgggggaagcaccacaagacttatgtggaaaatctgaaaaaacaagttgttgggacagagcttgatgggaagtcactagaagagattattgtcacatcatacaataagggtgacattcttccagctttcaacaatgcagcacaggtatggaaccatgacttcttctgggagtgcatgaaaccaggtggaggtggaaagccatccggggagcttctagaactgattgaaagagactttggttcatttgtaaaattccttgatgagttcaaggctgctgctgcaacacaatttggttcagggtgggcttggctagcatatagagcaagaaaatttgatggggaaaatgtagcaaatcctccttcacccgatgaggacaacaagctagtggtgctcaagagtcccaatgctgtgaacccccttgtttggggaggttactacccacttcttaccattgatgtttgggagcatgcttactaccttgattttcagaaccggcgtcctgattatatatcagtgttcatggataagcttgtttcctgggatgcagtgagctctagacttgaacaagctaaggctttaattaccagtgcatgatgctgaattaaatgcagaataagtgatttatcctgatagtgatgatgaattggatggcgtcatgcggaatagtgaattatttttatctagaaagtgtaagcaggcacatcttttgtactttaaataggtgttgtggtatcagggctaaatctcagattattatgttctatggttagaaatcttagttatggttctctttgtgtgacaatgtgaacaataagattgcttatgcatgaataatcaacaaaataatactatggtgtagagccttttcatataaaaaaaaaaaaaaaaaaannnnnnnnaa

SEQ ID NO: 2225 - DNA, 1806 bp, Glycine max
tttttattaaacactgctgaaaaaaataatataattggggaaattacccatattgttaaaacatataagattccctagacaaaattagaggctacctacatttcattacaacacattaaactgaattactcttatatcagctcaaaatggagcttgaaacacaggctcctcctaaacagaaccaattcgtatgaataaatttgggaagaatgcttgtaccgaaaattataccaaatgaggacaccgaatgatttggcaaaagcagaagccgatgaaaagtataaggtgatatctatctagagctctttgccacgtccggtaaattgttttgctaagaagcattggtgataagttagtgatgaaaccatcaaaatcaggtcccaaatccaaatggcgcttttgttctactacctccttctccgtacatttcgttccacttcctcaactcattcatgcttgttgcatcatacgcaactgatggacccaccttggattttgcctgaataaaatcatccaaattaagaggccttagtaccgaagttgtatcattactggctcccttcttttcttcctctaagagttcttgaacaggtctatatgccgcagcaatacagaggttcttcaaatcactgccagagtatccatcagtcaagtttgcaagtttgtcaaactgaaaatcagaattcaaattttcttgtgcaagaaagattcttaaaatcttcattcgattttcagcatctggtaaatcaacatatatccttcttggcaaacgacgaataacagcatcatcaaggtcaaatggccggttagttgcacccagaataaggattctttggttttcttttgacctcaatccatcccaagctgccatgaactcgttcctcattcttctagtggcctcatgctcaaaagcaccacctcgagctccaagcagactgtcaacttcatcgacaaatacaatgacaggagcaagcttgctggcaaatgagaaaagcgctttggttagtttttcagcatctccaaaccactttgaagtaagggtcgaaccagttatgctgataaaatttgcaccagcttcggttgcaagtgccttggccagaagggttttcccagtgccaggaggaccaaaaagtaatattcctttacagggccgtaacagatttccacgagagaaaagctctggccttctcattggaagaataacaagttcattaagtgcctttttcacatcttcaagagcacctatgtcatcaaatttcaccccaatttcaccaggaggtactacagctgaaatgaaattgctctcaaactcatcctttgcaaggttcttgaggctttgagaaggcttccgtgacatagtttcctggcccttcaatcttgagactgcaatttccagactttcacgaggtaggtacaatctttctcctttaatagaaggaagcaagcatgatgacaagtaatgattttttgcccagcctaccactttttcagctttatgctttgtcaaaaagatgccatcagtatttacatgcaaaaggtccatgcatgatagctgatgttcttcgagaaccttccgtaatacattcaaattactacgtgaagtcacaattttcttatcttcctcaagttgtttcttgaatgttgccagcagattctcatccttaggtggatgcatactcaaaacattggagcggacccgggggtcgtccccggcttccggtcccttgtcccctttaattccctcagtcaaacgcttcagagaaagaggcagcttagcaacacgtccaaagtttggaagaatcattg

SEQ ID NO: 2226 - DNA, 757 bp, Glycine max
ccaattattgcgcgggagccactttaaccaaatatacaggtgcatagcagatcatttttggtaaaacaatacatgagatgacatttaattattaaacactgctgaaaaaaaaattggggaaattacccctattgcttaagcgtaaataagattggctagacaaaattagaggctacctacatttcattacaacacattaaactgaattactcttatatcagctcaaaatggagcttgaaacacagcctcataaacagaacaaattcgtatgaataaatttggattgtaccgaaaattataccaaatgaggacgaaaaaattagcaaatgcagaagccgttgaaaagtataaggtgaaatctatctagagctctttgccacgtccggtaaattgctttgctaagaagcattggtgataagttagtgatggaaccatcaaaatcaggtcccaaatccaaacggcgcttttgttctactaccgccttctccgtacatttcgttccacttcctcaactcattcatgcttgttgcatcatatgcaactgatggacccaccttggattttgcctgaataaaatcatccaaattaagaggccttagtatcgaagttgtatcattactggctcccttcttttcttcctctaagagttcttgaacaggtctatatgccgcagcaatacagaggttcttccggtcgcggccagaggctccgtcccccgcgtcagcaaccttgtcaaactgaaaatcagaattcaaat

SEQ ID NO: 2227 - DNA, 630 bp, Glycine max
  misc_feature (4)..(10): n is a, c, g, or t
cccnnnnnnntttttttttttttttttttttttttttttttttttttgatgctaaatcactctttatttaaaatagataagagaggataaaatatccagctacaacttgatttttggatctgaaacatcgtacatttaagttttccattgatagcaagcaaaccttaaattacccgtatacctacatgcagcgtctagtttaatatgccatgagcaattgttgcaatcaccatccctaacaagtacgtagagatcaaatgagtgatgggcaccttcccattgaaaggaacaattactgaataatggttccgttccaaattcgtcattatattcaggagaaaacttccactcatagtaatcagtggggccgagaaggtgtggatgattatcaatcttgcaggaaacagttaagtttcgacttcccaaattatttgtaaccccaataagtgccttctctgccatagtattgttcaacgttggtaataacaatataagcaccagtagtgtggaaacacttctagcaaataaagacattgttatcttcgatctgctactgctttttctttttcttcaaatgtccccttctgtcgtcttctcgcagccgtacggacgcgtgggcggacgcgtggg

SEQ ID NO: 2228 - DNA, 1511 bp, Glycine max
ttttttttttttttttttctaaaataacaaattctcgtaaataatcaaattaccaactacatgtttaagcatggatcagtacgaataatgaatgcttaagtggaaataaaataaacacactactcaatcaaactaagattcattgtgttataacattattcaaccccaaatctaccgtcagttcttcgtaatatgagcaactggccacatgatgtgaaatcaatctgtattttatgataaaggaacaaaaattgtttacttggtgttcatattgaaacattttagcccagcttctaccttagccaccatctttgaattgtagatataggagtctttaagaatggcgcatggcgttggatgagtggattaaccgtcctcccaatttgcgcccaaacactctgatggtaaggggcagtaacaggaacatgatacatgagcttcaaaagctgccagtacatgaatgtttgtattatgttccgctgccacgagaacaatgagatgatcagcaagaatccaagtccaatctcggcatgcgatgtcagtatattgagggtagaattgtttgactccacccaaacacaaggctcttccaagtacttcctgtacaaggtagagcgactgaaattacgtctaaggaacttggcaacatgttcaaaagaccaacacaagatggggatcaaagcaaatttaaggcaaagatgagatgtaacaaatgtaaggcagtagatgaagtatataaaatcctttgaagcaactattgactgaaagtaaacttgcaaggcctgcaaattccatgctcttggcttcccatattgcgagtacaatgagtacaaagaagagcaaagagtgcccaggaaacaaaggcgataagccctatgagaaagatgctttggtaccagcggaatggctgcaaggaaagccacaacaaacacccaagcatagacagaaaatagaactgtctgccgatcccaacgcaaaggtgttggactaggacctggaccagcagttgtggatgtccctgaagttctattagttgatccagaacttcttgcacgaggttgattatttgttgggggcgatgatgacgatgacgtagttgatgaacgtgtcggttgggatgaactgccaccaacagacattggctccaccacaaggtcaggatcaacgtagcgctggtagaacttgcgcttgaagtgtgaaacgacgtcgtcgcgagaagccatgtggggaggaatgagaacattgttccagtaaccaggccatcgagagtcgttgtcgtagtcgtaggaatccgccgctagtcgcttcagcttctgtggatcttctcccattaaccctcttctgctactctgcttcaacactcgttcctctggttagtgggaacttcctttggatactttgtgtcgtcttgggcgattttcttaggttaaacgcaaaaaccatcaagtgtcggctgcataggcggacgcgtgggcgaacgcgtgggttcattaaagacaaaggtgttgtat

SEQ ID NO: 2229 - DNA, 1569 bp, Glycine max
ttcaaccccaaatctaccgtcagttcttcgtaatatgagcaactggccacatgatgtgaaatcaatctgtattttatgataaaggaacaaaaattgtttacttggtgttcatattgaaacattttagcccagcttctaccttagccaccatctttgaattgtagatataggagtctttaagaatggcgcatggcgttggatgagtggattaaccgtcctcccaatttgcgcccaaacactctgatggtaaggggcagtaacaggaacatgatacatgagcttcaaaagctgccagtacatgaatgtttgtattatgttccgctgccacctgcatgtgtgggtaaaaaataaaggtggaatgagtcaacaatactacagaaaagggatatgtagcataaaacccagtgtaaccaatggcagaaaggccaaaattctgccatataaacacaccattgttgcctatggtgccaccatagcgggcctcccttcacaaattgcctatagcggttggcagaaaatccgccaagccattccgccaccgtttaacaatgacagaaacattactggcaggggggggggggggggagagaaaatgcttgagaaacttacgagaacaatgagatgatcagcaagaatccaagtccaatctcggcatgcgaggtcactatattgagggtagaactgtttgactccacccaaacacaaggctcttccaagtacttcctgtacaaggtagagcgactgaaattacgtctaaggaacttggcaacatgttcaaaggaccaacataagatagggatcaaagcaaatttaaggcaaagatgagatgtaacaaatgtaaggcagtagatgaagtataaaaaatccttcgaagcaattattgactgaaagtaaacttgcaaggcctgccaattccatgctcttggtttcccatattgtgagtacaatgagtacaaagaagagcaaagagtgcccagaaaacaaaggcgataagccctatgagaaagatgctttggtaccagtggaatggctgcaagaaaagccacaacaaaaacccaagcattgacagaaaatagaactgtctgccgatcccaacgcaaaggtgttggactaggacctggacctgcagttgtggatgtccctgaagttctattagttgatccagaacttcttgcacgaggttgattatttgtcaggggcgacgatgaggaggtagttgatgaacgcactggctgggatgaactgccaccaacagacattggctccaccacaaaatcaggatcaacgtagcgctggtagaacttgcgcttgaagtgggaaacgacgtcgtcacgagaggccatgtggggagggatgagaacgttgttccagtaatcgggccatcgagagtcgttgtcgtagtcgtatgaatctgccgctaatcgctttagcttctgtggatcttctctctcttctcccatttttgattttccaccctcttcttcttctactacttgcttcaacacacgctcggggggggggcctacgtacctgcgagacggggggtcgtttgggagatttacttaggtt

SEQ ID NO: 2230 - DNA, 2437 bp, Glycine max
ccacgcgtccgaaaatatctagtatttgaataaagtgaccgctgtggtcgttatggctgataagccaacagctgacagaccctgaaacagtgcttgtttccaaaagtgttgatcgatgaaggctttgagtttgagtgccataaacacctcaaatccatgtcttccccaaacccatttcctcaaagtccctatctttcaccccttcttcagattcaagccattctcaaattcaagccatggtgcaaagagagctcacactcttccactcaccatcagctgcaagctgaaaaactctcaagaaatgaaaaacaaagggaagagtgtgtcacagaagattgtgttatcagaggcttcccctccaccactcacagaggatgataagaacaatggtgatagcaaggatgttccagagagctcaaagaagaagggagggctttctggggtggccaatatgttgagaaggaagactttgcagattctctctaatttgccattcgccagcgcggaattcggcgcgggtgcttctttaatggctttaggcacatttattgatcaaggtgaagcccctgacttttatttccagaaataccctgaagatcatcccgtgtttggattttttacttggagatgggttctcacccttggttttgatcacatgtttacatcccctatatttcttggagtgttggctctccttggtgcatccctcatggcctgcacttacacaactcaactccccctcatcaaggtttcaagaagatggtcatttttgcactctgctgaggccatacgtaagcaagaattttcagaatcattgccaagagcatcaatccaagatgttggtactatattgatgggagctggatacgaggtattcttgaaaggaccatctttatatgcttttcaagggcttgcgggtcggctggcccctgttggagtccatatagcattgctactgataatggctggaggaactcttagtgctactgggagcttcagaggttcagtcactgtgcccccggcgctggccccccccccaggtgatgttctggctccttttggctttctctcctctccaaccgatgcttttaatacagagattcatgtcaacaaattctccatggattattatgagagtggagaggtttcacagttccacaccgatctttcccttcgtaacatggatgggaaagaagtaatgaggaagacaatcagtgtaaatgatcctttaagatacggtggtatcaccatatatcagacagattggagtatttccgctctgcaaattcttaaggataatgaaggaccttataacttagctatggcacctctacagataaatggagataagaaactttttggtacttttctaccggttggagatattaactctcctgacgttaagggaatatctatgcttgctcgtgatctgcagtcaattgtcctttatgacaaggaaggaaaatttgcaggagttagacggcctaattcaaagctcccaatcaatattgatggctcagaaattgtcattgttgatgcaataggaagtagtggcttggaattgaagactgatccaggtgtgccagttgtatatgctggatttggtgctctaatgatcactacttgcatcagctatttgtctcattcacagatatgggctttacaagatgggacaacagtcttcgttggagggaagactaacagggcaaagatggaatttccagaggagatgagccgcttacttgataaggtccctgaaatagttgaatcaaatctacctaagcatgctgatagcattagtggttagcttatggcttttgacaaatcaagataggtaaagaagacacttcaattggatgatagcaacttatatggattatgattcaatttggatacacttatccattagcacctatagaagagataaaaaaaaaattaaatgaatcaaacttctcaaataaattaaaatcaccttatgcatctcaaattctttggaagttttttcatttaacttttgcaaaagctgagatgtataacttggttttaacttaaaggataaatttgaatttttatctccttatttcttctttataagtgcttattgaaaagtttattcaacttatgtgataaagtactttggcatacaaatacaaattgaacttcatcattgaagtgtccagcagttgtcttgctggttgatcatcagggaatttacaaatgctcgaaggatgcctacaagaagtatatcaagaaaacttttgcagctcatattatttgacattatctagatacactgagttcaacatacatgtatatttcctgtatttttttagtaatggggccaaattaatcaaaactcgtatgccttgtgttattttggcccctcgtttaaataattggaaagtgtatcaggtcgaatatgaatttgatgcgtcca

SEQ ID NO: 2231 - DNA, 3041 bp, Glycine max
tcagctacgtaggcccccccccccccattcctgtattaaaattaaaatatctagtatttggataaagtaaccgctatggtcgttatggctgataagccaacccctgaaacagtgcttgtttccaaagtgttgatcgatgaaggctttgagtttgagtgccataaactcttcaaatccatgtcttcccaaaacccatttgctcaaagtccctatctttcaccccttcttcaaattcaagccattctcatactcacacagcgcccttcatggccatggtgcaaagagagctcacacttttcctttcaccatcagctgcaagctggaaagctctcaagataagaaaaacaaagggaagagtgtttcacagaagattgtgttatcaggagcttcccctccaccactcacagagaatgataagagcaatggtgaagggagggctttctggggtggccaatatgctgagaaggaagactttgcagattctctctaatttgctattggctattggggaaatgtttgctgttgcttctttgatggctttgggtattcttgaaaggaccatctttatatgcttttcaaggacttgctggtcgtctggcccctgttggagtccatatagcattgctactgataatggctggaggaactcttagtgcttgtgggagcttcagaggttcagtcactgtgccccaggggctgaattttgttgtatatgatgttctggctccttctggctttctatcctctccaaccgatgcttttaatacagagattcatgtcaacaaattctacatggattattatgagagtggagaggtttcacagttccacactgatctttcccttcgtaacatggatgggaaagaagtaatgaggaagacaatcagtgaatgatcctttaagatatggtggtatcaccatatatcagacagattggagtattttcgctctgcaaattcttaaggacaatgaaggaccttataacttagctatggcacctctacagatcaatggagataagcaactttttggtacttatctaccggctggagatattaactctcctgacgttaagggaatatctatgcttgctcgtgacctgcagtcaattgtcctttatgataaggaaggaaaatttgcaggagttacatggccaaattcaaagctcccaatcaatattgatggttcagaaattgtcattgttgatgcaataggaagtagtggcttggacttgaaggtgccaccttaaacttaaacattctgcagttagttcttttatttatacagactgacccaggtgtgccagttgtatatgctggatttggtgctctaatgatcactacttgcatcagttatttgtctcattcacaggtgaattttctgtcattgtttgagtttgaccattttttctccatgttgttgttgcttatatgttcctcttttttcacaagtgataattacttctttgtttgaccaagaaaacaagtgtaatgactttgtttggctaaataataatgttatatcatctgaaaatttccctttgaaagaattgttaatgtggcacatacattttgaacgaatagcatgatttatatgactaaagaaatcaaatccttgacatttaatgcatgattggactaggaatgaaaattggcaaataacggtgctatcttgcagcttgaaagttctattattcttattcaattgtatatttttgacctgctagtaatctatttcttggtcaactgacagatttgggctttacaagacggcacagcagtcttcattggagtgaagactaacagagcaaagatggaatttccagaggagatgaaccgtttacttgataaggtccctgaaatagttgagtcaagtctacctaagcaagctgatagcattagtggttagcttatgacttttgagaaatcaagatgggtaaagaagacacttcaattggatgatagcaacatatatggattatgattcaagttggatacacttatcaattagcacctatagaagagataaaaaaaaagaagtaaatgaatcaaacttctcaaataaaataaaatcaccttacgtatctcaaattctttagaagttttttcgtttaacttttgcaaaagctgagatgtataacttggttttaacataaaggataaatttgaataaaaaaaaaaaaaaaaaacttctttataagtgcttattgaaaagtttattcaacttatgtgataaagtactttggcatacaaatacaaattgaacttcatcattgaagtgtccagcagttgtcttgctggttgatcatcagggaatttacaaatgctcgaaggatgcctacaagaagtatatcaagaaaacttttgcagctcatattatttgacattatctagatacactgagttcaacatacatgtatatttcctggtatttttttagtaatggggccaaattaatcaaaactcgtatgcctttgtgttattttggcccctcgtttaaataattggaaagtgtatcaggtcgaatatgaatttgatgcgtccataatgtacaggttgctattgcaactgcattaagatgaaaaaaaaaaaaaaaaaaactcgagactagttctctctctctccctcgtgccgaattcggcacgaggcttgctgacactgactctaaggcagagccagcaggaattaaaatcaacaaccaactagatcatgcaacggctggggaagttgcacaaaagtcagcttgttgtgggtgaggaggcaacattattatccaagaacaagaaggaggaaaatacatgcatgatgataaattgatgatgattcgtgctttggattttacgcggtcattctttaatagtttctttcctagattaagttatatattaattcaaagttagatatgattgtgtcattgccccttgtgttgtttgtttgggcaacaaatctattgatcgttgatattttgaatgctcaattgcattgatattctttaaaacgtaataaaattatattgaccctattcttagttaaaaaaaaaaa

SEQ ID NO: 2232 - DNA, 1721 bp, Glycine max
tatgacgttgtgtgcacgcatgcgcgcgctcgtttcctcgtttgctgtcttgcttttttttttttttttttatgatactgcaactggcaacatttataagagctcttgaacttttgttattgatacattccacaatacatggggctgtaagcctgtaatagattctatggattaagttcctcgtttcatttatacattgccaatgtatgcatgcagaccgactctatgcaagttgcatcgcctcttcccgtttcaagtcaaaaaccctgatgagtgcatcttcaacaaccttgtctggtgtggatgcaccagatgttacaccaattgttattggaccctctggaagccagttttctttctccaccagctctccatggttcaacttgtatgctattttgtttcctggaccaattctttgctcactgtcaatccaataagaaggaattccacgttcctccgctatctcttgcaggtgtgatgtattgctagagttccatccaccaactactaacattagatccagatcttcctccaccaatttgtacatagcatcttgtctctcctgagtagcatcacaaattgtattgaagctcatgaagtgctcattgatgttctccacaccatatttgcgcatcatagtcctctccagtagtttcccaatctcttctgtctctcccttgagcatcgttgtctgatttgcgatgccagctttaatcagatctctgtctggatcaaagccctcagaaactgcaaatttaaatttctctaaaaatgcttccttggttgaactggatccatttaattcaccaccaagaatatagtcgcaaacatattcagcctccgccatattcttcacaattatatattttccagcaaaagaagcagttgctacagtttcctcatgggcatatttaccatgaattacagaggtataatctcgttgcttgtgtttttcaacagaattccatacctttgcaacccatgggcaagttgtatcaacgatctgaacatttttctcgctcaaagtcaacatctcttccactgccgctccaaaagctggcaatatgactacatcacccttgttgacaacatcaaattgttttccaccttcttcgagaggaatattttgaacattcatctcctctagccgcttattgacagtggggttgtggatgatttcattggtaagccaaattgtctcagtaggaaactgttttctggcctcataagcaatttgaacagccctctcaactccccaacagaatccataggcttcagcaagcttcaccgtgacagtaccccatgtatactcatacccattttccttcaaagtcttaatgatatcactggtgtactcgcgattcatgagttggagggtctcttccttgtacccaaatcctttgcggttataattcttactccgagtaaggttcttccgaaacaccttcggatcgaactccgaacccacagagccggaagtggaatcgccggagcatcggacggagagaggtttccggcaccggattctggtgagactctccggcaaagaagtgtcagcgcgtgtggcggggaaacggcaaatatgcgcagagagagccatcggagatagcattacacaacacaacaatgtctgaatgtgtggggtttttttatggctgcaaactcgtgttctctgttgttgttttttcaattttttttttgggggggggggcctacgtagc

SEQ ID NO: 2233 - DNA, 853 bp, Glycine max
aagaattcgaggccgcaggaattttttttttttttttttattccaagaagttactaattacttatgtctcacttcacaagataaagtgcaaaagctagtttcaacttaggattacacattcaacactagtatcacaggttacatcacaaaacattattaatgtaccacattgcattaacctggagttggcatctaagctttcaatgcttcatataacataagggtggaagcacacttaaagttctacctgtgataagcccctgcaaccaacaacatcaacccactcaatttccacaagtatctccccactctcaacatttctcaatctcaaaaacatttcttggacaatctttccattttgccaaatgcagctgctctcttcagcaaggtaattagttctatctggctggatcctcttgagtgaacaaccatttgggagcttacccaatcccatctgcttacactgaacatatggttttaagtctatctctgcctcacccattttgtcatccacagagaaagtgtctttgtcataaaccgtcagatgtattggggttttaatgtcctttacagagagggtcaattcttcattccagtcaggattgcagtttttttttatgacacgagtcttcagcttctgatcgcccatgttgacaacgacataaggatcgctggcacgagcatcgcgaatggcaagattaatgcctcttttaattcgaagcttgagaagacccagaatattattattgtccattgaaacacaactttgtcatcgccgagagaagagattgtctataaactcttgctccaaacgaatctaaagatagtcttttattcccggatagctacatac

SEQ ID NO: 2234 - DNA, 1452 bp, Glycine max
  misc_feature (1407)..(1407): n is a, c, g, or t
  misc_feature (1414)..(1414): n is a, c, g, or t
ttttttttttttggttggaaacaaatttgcctttttgaaggctatataatataaccttggttgcttgtttgttcacatgaaggaaaaaagaacctgtttgtccacatctccataaagtgaacagtagaaaaaccattatgcctgcttttcgaagcatcgaatgatttctgtgtttacaaggtttttttttttaagaaaaaggcaaccagcgttatgtcaagtaagccatcaatcctgcatacttgataacttttcgtatggtaccattacaaagacggcacatttaggttgccccatatcttcttttaaacaagaaatgtctcttcgctggatctttcggcttgctcttgatctgtccttgttggcctttacgcacagtactgtactccatataaaccatcccttttgcacctgacattgcactcatggatccttgagagcgacgggcactctgaagggcaatttcatctgcatcttcatctagttgctctaatccaacttgatcatcaccagcactcaacacctttccaagaagtgccaattgatcctcaagacgatgatagctcaaattaggcccttcatcaggaggaggcaagctagtaattaccttaaagctgtaaccctgatcaattaaaaattgctgcctcttagtggagtaatacatctcctgggtatcaattgaaacaagggaataaaaaaatgcattatactcctccttgccccctgccatcctatcctcaagctttccctttgccctaagaatacgacccagacgctgggcttcttgtcgccttgaaccagcatgtgaagagatctgaattattacgtttgcttcaggaatatcaattgagttgtcgcccaccttggaaagaaatatagtatttatatctttgctagttttgaatgcttgcaaaatttttgtcctctcaacatgacttgtagcaccatatatcattggtttacggagtttcatagcatactcagtgagagcaaacagattatcagcaaagactataattttatcaccacgtgtcctttcatggaaatttatgagaaactcacatgctctgaacttattaggattcatcacgtaaagtgcctgcctcttcttggagttctctttcttcaaatactcggcaaaaaactcttttgtcatcggacaccatacttcagcacactgtacatttgcaataaatccaccttttactagatctaaccaatttgcctcatacagcttgggaccaatcaggaagttcagatctgtaatcctttcgtcctctctgacaagtgtagctgtgagcccaagtttacaatgagatttaggggggcggggccctttacgaaacatatgggccggaaccacatgcacctcatccatgaggagcatccccattctctgtttcttanttcttcnatgattttttcagattcttcagaccgtttaccaccaaa

SEQ ID NO: 2235 - DNA, 685 bp, Glycine max
  misc_feature (8)..(8): n is a, c, g, or t
  misc_feature (43)..(44): n is a, c, g, or t
cggctcgnagggatggaagaataagagcaccatcacattcacnntgccatcttcactagaaaacaatgtcaagtgtttcttttcttttggccttgttcatggtagtagctttgtctatctttccttccatagtgggtgcaataggtgagcaccggctaaggtgggtgcctgagacaacaacaccatgccaaagctccatagaagagtgcatggcagaaggtgagtttggaatggattcagagtcccaccggcgcattctagcgacctcacaatatataagctacaaggcacttcaacgtaacaccgtgccatgctctaggaggggtgcttcctactacaactgcaagccaggtgcagatgctaatccttacactcgtggctgccccaccatcacccgttgccgtaattcttagaataacaacttagtgcgtgtttgagttaccgttttcaaggctcaaaattacgtttacaaaaggatctcactcgttacttatgcgttagaagtgcattggaatgactgtcacagcaatttgaactgcaacccaaacatgtgctttctttctactctttcatttccttactcctctgccttctagtttgttatgttttactttgaatgttgtttacctttttgtttttgtaattttctgtaaattaatcttaactggtgtggctattgtaaaaa

SEQ ID NO: 2236 - DNA, 880 bp, Glycine max
gggggttttatagggactaatgatagtataacacgttaaatccaaataatgctaccggttggtagcaatttatgtcctgtataagtactaactactaactaactagcactatcactttccttacctagtcaataattttctatacaaccatcttcagtggttggaaacatgcacattatggaactgtgaaaattgaaatgtgtatgatatgatatgatacgtcacctctccaatgaaactattaggccaaaagctcatgtcaatggtctctctatgtatcaacaaccaccaccatcagctggctcaattgaacttagaaggccgtttcctcttaactgcatgcagtggtcttcagcatccacttgagcacatactatcaccactgctagtccattataatgtgcctcctgcatgatgttaaccgcattatcaattgtcattccaggtatcaccttcatcaacacttgcacaacatattctcgcttgttgaagttgtcattgtgcagcaaaactcggtaaggtggggatgttttccgcgatttccttaagtcaaattcagattcccgaccaggtgatgttgtctctatggttggcctctccaacaacccaccacctttccctaatattccagtggctgccactgtcattacaacactccgatctttgctatatttcaaaggaacatttttatctccaggatttgctgcattgaatacttgattgggtgaaagagcaagtgcactgcataatgcagcttccattgctgttctttcagtctctttgtggttgttggagcagttaattagctcctataacaacagaactatagaagggtagtatgtagttctagtggaagagaaaaaatccaacattgtctttg

SEQ ID NO: 2237 - DNA, 777 bp, Glycine max
accaatattaacccaagtttgcatacccttttatgggttatttgatgctttttttttttttttttatcagctgaaaatgattatcttgcagtaataaatgtcaatcgcttactacaatctgaagtgcaaacgtcagtaatacactgttgcatttactttggaaaataataaggtagaaaaatagtcagcatacactaattaaaaatcactgcaactccacaaggttgagctatacggcagttctgcaaactttgatatttcatcagcaatttctcaccacatgctattgtccatcacagcagaaacaatgcctttcaatgtttccacagaatggtctttaagaccaagtgagagcaccaatggcctggaggagccagataaactcatgtgctcaatcagctggcgtgcacatgctactaacattggctcatcccgtttgccaaatataacagaaacgttgaatgttggattaattgacaccccttcttcctttctggcatacattattgtccccatggttcctatttgagtggcaataaccataaaatgatcttcgtatctcgaaatgataatctctgtttcatttcccttgatttggcgagagaaattgagttgcgacacagggaattgtgaagtgctgctctctgtattcattgatttgaaaaaagcgcttctttggcgggaatcggtttcttgctgtggagaagggtttcgaaggagaaggcgcgtgttcagagggagagaagaacaccaagaaatggggtctttgggttgctt

SEQ ID NO: 2238 - DNA, 1085 bp, Glycine max
agataaaaaaaattaaatttattttctttcagtactgttgatgtaagaaacatctatcacgctatctgtaaataacatgttctttacaaatacatttttttgcttataaagctcttttcctcctcatctgctttacaaaaaaagtcattactcattaccttctctatactctaaggacagtttgttatgtaaattgtttcatatatatatatatatatatacacactctcttcttgtttgtgtcttgtgttttttcatatagacgaacaattattatatgatgatgtaacctgtacatatacatctcaggaaaacggtggccccctttgtccccgtcccataatcatctacaacaatctcaaaaagactatggctcacatcactctttgcctaggaaatcaacaaacatttctcacggctcacaagaaacatagggggagcacccaagttgaagaaggaggtaacagattcatttaattctagcattcccccttggcttgaagatcaaggtatgccacacaactatgaacttccaatggtatccaccctatcaatgacatccaaggccttcatccggtcgatatcaaagtcgatgacaggaacagaaggtaccctccttgtagagaatatatcatttttactttcactgattggggaatgactactactcttgcttagcctatggtgtttactcaacctggtcttggcagagtcaaattcttggctcttgctaatgccaggtgttagtttcctcttgctgacatcacgaagcatttgctgatcttcaaccgttaacatgggggaagagcaggctttctgtgtaaataactgccctgtcttttgggtaggagaacatatgggcgatttgactggggaccttattcctccattaccaactcttacttggctcactagatgatgaagccagatgaccagttcaagtatataagcttctgttttgtctttatcagcatggtgtagtgtttcaattctcaacaagtcggtctggccggcaggttttcggttgacctcagacctatacaaacccctcgctcccgcccgtccgcccccatgatgagcctcgt

SEQ ID NO: 2239 - DNA, 1095 bp, Glycine max
attattattactcactcgtctaaactattagacgtgcaacgaagcgtatacttaattggatatatcataattcgttggatcaatttaaatacaataatagagcagtaggagaagagtcctactcaaagttgatgtgcatgtacagaaagtgaaactcatacagagaaagaaaatgaaggctgtgataactgtttctgtaatctaaataggtattatagcatttaccaattagaaatgccaccacgcccaatattagctgttgcattgcattcagttgcagttgaccattcactcagcaatttgattaagaggattgtcaggagatttcttccataacttccatatcatgtccttgtactgagtgtgagtaagacccggtttctcttccttcaacttgggcagctcagcttcttcaaacgccttgaatgaggccttgaggcgcctctctggatggcgatctgggggcaagttatccacgacggtcatctgagcgatggcatcatccaatgttcttgcttcgatgatcgaatcgtcgcgattagtgttcgaaataagcaccattctctcgtactcttcctctgccgccgtccgactctgctgcttcttagcctcctccgccttcctctcagcctccgcctgctcctcctccctccgcctcctcagctccacctccgtcaccttcggcaccgggatcgacacccgtgtcgccttcttgtccaccttcttcatcgacttctccagctccttctcctcctgctccgccaaccgtcgcgcctccgctttccgcgcggctgcctccgccctcttttcggcctcttcctccttcttcttcgcggcgcgtgactttgaaccctccgcctctcgccagtactggtcctccttctctcgactctccttctccttccgctccgtatccgccgcgctcttacgagccctcgccgcctccgccttcgtgttcacccccatcttcttcggcatcttcttcttcttcttcttcttcttcttagggtatcgctcaaatttcacactatgctatgaatgatcgatcatgtaatgagagagatatccttcaactcccttccttcccaatgcttt

SEQ ID NO: 2240 - DNA, 3325 bp, Glycine max
gaaggctgaggaggagtcgttgcagcaggttcagagtgggagtgggagtggtagtgagatggaggtaggggagcttgagcctgaaccccaagcggaaacggttcctcccgtgagcgaagacttgccctctgttgctatggagactgatgagaagcaagctcagaagaatgaatgccaccctaatgatgacagcactgatgctgctgtggatgagagacgggagttgtccagtaaggaagaagtgaaacctaatgaggaggttggttgttgtgaggtaaaggatggagaggagatagaagctgatgagatggcagatgttcgggatgatttgtctgagaaaatgcttgttactgagactgaagttgagtctgtgggtaatggtgatgatgataaaaaggaggaggctttggatgctggagctgagtgcgaggaggaaacaaagaagggtgcggatgtggataagcaggacaaggacaagaacaaggttgtagatctaggaaccggcgcggatgttgtcaaacctgagttaaatgatggagtatcaacaggaaatgaagttccaaaggaagtggatagagaaatgatgatggagagtgcggtcaatattgcaaaggataaaggcaaaggtgtctctgttgcacttgtaccacctactaatgttgttcatgctttagatgatagcttgtggttggacagagggtcgagagacctcccgacgtgttctgttgatgttatagaaggtccaagcacaaggggattcgagttgttttccagatctcctgttaggaaagtggagaaagtagaccactcagttctcaacaagcacaaggatgacatggagcagcttgatcttactcttagcttgccgaatgttctgttacctattggtgctcatgagacaacatcgcaagcccctggatcccccagtcaagcacggagtgtgcagtctttaagtaatacattttgtactaactcagatggttttactgcatcaatgtccttttcaggttcccaatcattctatcataatccaagctgttctctgacaaaaacttcagtggactatgagcaatctgttggcagtcgccccttattcgggggaatagatcaagtttcccagggatgttggcaaggtcagtctcagagcgatcccaaacagaaagaagttccttttggtcaaagaacctcggcaaacggaaatggctcccttttccagcctcaggcatcatggggtgttttagacagtcaagctgtaaagggtcaacattccagggttctagaaggaagttcaaaaatgggcagtggacttgacaggcaattgagttttcataaacagttttcaggccagtcaagacgccatgacgatgttagatctccgtcacagagtgttgggtctcatgatattggatcaaattatagctttgagaaaaagagagaggtaagagagaggggtagtggtagtctgtatcgaactacaagccagaaggaacaagaacaacttctggtgggtggagttgattttgttgagacaatcattgcaagaattgtttctgaacctgttcatgcaatgtccagaaagtttcatgaaatgaccggacagtccatagtatgtctgaaagagggtattcgtgaaatcatgcttaatgcagataagcacgggcagatacttgcttttcaaaaagttctgctgaacagatctgatataatcttggatgtcctattgaagtgtcacagagtgcaactggaaattttggttgctttaaaaactggtttgactcattttcttcacctagagagcagcatttcatcttctgagttggctcaaatttttctgaacttaaggtgtaagaatctttcatgtcgaagtcagttgcctgtggacgaatgtgattgcaaggtttgtgcaaagaagaatggtttttgcagggagtgtatgtgccttgtgtgttcaaagtttgataatgcctcaaatacatgtagttgggttggatgtgatgtttgccttcactggtgccatactgactgtggattacgggaatcttatattagaaatgggcatgggacaaaagggatgaccgagatgcagtttcactgtattgcttgtgatcatccttctgagatgtttggctttgtcaaggaggtgtttcaaaattttgcaaaagaatggtcagttgaaacactttgcaaagagcttgaatatgtaaaaagaattttttctgccagcaaggatatgagagggagacggttgcatcagctacgtaggccccccccccagagcaaatgctgccaaggttggcaaataagtctaatctccctgaggttttgaggcacatcatgtcttttctttcggatggtgattcttccaaattacccatgacaacaaacttttctgggaaggaacaaattaaagaaaacaatggagtagctgggcccagcccggaagcagcttggatgaaatctatttattcagaaaagccacctctgttagaaaggcctgcaaatatccttcctacctttgaccagaatgataaaagaactcttgtgcaagaattgcagatgagtagtatccagaaggacttctgttttgatgaattggagagtatagtaaaaattaaacaggcagaggctaaaatgtttcaatcacgtgctgatgatgctagaagagaagctgaagggttgaagcgcattgcccttgcaaagaatgagaaaattgaggaagaatataccaatcgaattgccaagttacgattgactgagactgatgaaattcgtaaacaaaaatttgaagaagcccaagcattagaaagagcacatctggagtatttgaacatgaaaatgagaatggagacagacattaaagatctgttatccaaaatggaagctaccaaaatgagccttgccatgtgatcagatcaaaaaaatctagaatagtactttcaggtaaatgtattatgtcccatcctgaaatttgtaggttctgatgtcaccaccttattgttgtgagctactttagtcctgatccgtagttgtatctattgttgtagtccgttttgctttttagctgctaaccaaaacctgtagagtgcatcagttattagtcttatgaaacaatatcagttatgaaagcaatttaaaatagattatcatccaaacgcacttacaacaattcccagcttgtgaatgggtttgctgtacaggctcttttgtactgactgtcagcagatggagattataaaattataactataacttggtggctattgtactttgatcgttgccatcaagtcatgatttcaaaaaaaaaaaaaaaaaaaaaaaaagaaaa

SEQ ID NO: 2241 - DNA, 1499 bp, Glycine max
  misc_feature (1)..(1): n is a, c, g, or t
naggtttacagacaaaagcattaatgtgttattttcctcatactcaagattcagcaacatataaagggtttttgggcctaggcctccttagtaacaaaaaacaaaccacaaagggtcaaaggataacaaaatgcagccactaaggcaggcattgggaaagattgcacaaaatctctcttgatatcattttaatcagtaggaaaatctgttacggctagtcctgagggacctacgttcttgctgatggaagcacattttttcctgccccagaagcaacattgatctcaatactgtcaaaaatgtctgatcctgattttgtaccgtccttaattggcaattcatggccctcactgtttccttctttggttttgttcaatttgtctttgctttttccccataccacggtgtaaagtccactcacaatgataatagctccaatcacacttcccaaataaacttgctcagccaaaacaatggatcccaatgcagcagtgataatcatacatagagggctgaaagaagtcacaaacacaggtccacgttccctggtcacaactccttgtacatagtatgccattccagagcataccacaccagaataaacacaagcaaggagccttgagtccatgcctattgaccacacgctcatgtcacgttcaaatataagggtcgcaattgcaccctcaaaaatgcccaaaaagcaaatccaagctgtgaccgagagctctgccgggtacatcttcaaagtgaaagattgcaagataaagaagctagcccaaccaccacaacttgcaatgagctctactgtgccaagcacccagttttgttcagagggttgtgtgctgttgccactttcatggtgggttgctgcttgtccctttatgaactgaagagccgggcctttgtacaaagtcataaccatagctcctgagactgttactgctgttccaactaccttggctacgctgggtatttttctcaagttcactgtctctaacctgcaaatcagtgccattataaaagtaatggctggcatgacattaacggtggccgatgcaaacgttgttgaggtgttcttcattcccatgttgtacaagttttgatcaagcactggctcaaggaaaccgagagccgcaagcctcaggaacaccgggagagtcatctttggccgtatttttctttcaaggacaaatgcaaaaggggccatgatgagagtggcaactatatgacggtacacggagagtacccaatggctcatgccatgcttgaaagaaaccatggtgatgatgtacattccggagtagccaaactgaagggacatcatagcaaggtagggcttaaccttgtggaacaccttgcccaatccattagatgatgcattttgatcctccatcttgtaaccttgcaacacacaaagaaaggacacacgaactcaaaaactcactaatgagctatttggttctgccttgtgtgtgtttttggattattccgagcttacg

SEQ ID NO: 2242 - DNA, 763 bp, Glycine max
  misc_feature (33)..(34): n is a, c, g, or t
  misc_feature (722)..(728): n is a, c, g, or t
  misc_feature (741)..(745): n is a, c, g, or t
  misc_feature (754)..(755): n is a, c, g, or t
  misc_feature (757)..(762): n is a, c, g, or t
ttttttttttttttttttttttttttttttttnntagagacaagcattaatggcgttattttactcatactcaagtttcggcaacatataaaggatttttgggcctaggcctccttagtaacaaaaagaaaaaaaaaacataaaaggtcaaaggaaaacaagaaaggtacataacaaaacgtagccaccatggcagatatgtggaaagattgcacaaaatctctctttatatcattttaattagtaggaaaatcggttatgcatatgctagtcttgagggactatgttcttgctgatggaagaagcacattttttcctgccccagaaggaacattgatctcaatactgtcaaaaatgtctgatcctgattttgtaccgtccttaattggcaattcgtggccctcactgtttccttcgttggttttgttgttcagtttgtctttgctttttccccataccacggtgtaaagtccactcacaatgataatagctccaattacacttcccatataaacttgctcagccaagacaatggatcccaatgcagcagtgataatcatacagagagggctgaaagatgtaacaaacacgggtccacgttcccttgtcacaactccttgtacatagtatgccattccagagcataccacaccagaataaacacaagcaaggagccttgagtccatgcctattgaccacacgctcatgtcacgttcaaatannnnnnncgcaattgcaccnnnnnaaatgcccnnannnnnna

SEQ ID NO: 2243 - DNA, 724 bp, Glycine max
tgcacatgcgccttctagatcacgagctcgccgcgaacgtgttcgaggaattgcttcacagagatccgttccacgtggaggcctatcgcggcctcttaatgctgacttcagagacgaacaagccaacggaggaactattgaagagaatcgaagaggccgccgcgaaggtttgcgaggaacaagagagggattccgatgtgagggaccttaagttgttgattgcgcagataaaggttatcaatggggatttatccgaagcactgaaggtgtatgaggagcttgttaaggaagagcctaaggattttagaccttacttgtgtcagggtattgtgtattccatgctgagaaagaaggatgaagctgagaaacagtttgagaagtatcgtgctcttgtcccagaggatcatccttataagcatcattttgaggaaaatactcagtttttggagaggagaggagtaggtggtgcaaagagctgagattgagagtaaggttctttgtttaggaaaatgaagaatatgttttttttttttatgctgatagcttagttttgttaaataattcggatggtgatccgggtatccgggtgaatggtgttattttatttttaggtgattaggtttgctgagtgggattgtttcgcaaataaaaatatatccaattgtttcccggaaaatttttgaaatgaaaaagaagtgttcgacaaaaaaaaaaaaaaaaaagc

SEQ ID NO: 2244 - DNA, 1813 bp, Glycine max
ttccgaaccaacgcaatgatggaatggaagggtcttgcgttcttctgcagttctgatagctagccatgttggcatgaagatttaagcgggaaaataataagacaacgtatataacgttttcacaaagtggctttttttttattatcacaaggagtatgtgttgaatgattattgagttgcagcactgatcagttcttagaacatgaattcagcatccccgcagtttgtttccccgagaagtatgagtgtgtacgatccgatccaccagattagtatgtggggagaaggcttcaaaagtaatggaaatttaagtgcagccatgcctttaattgatgaggcagacatgaagtttgatagtcagtcagaggatgcttctcatggtatactgggagaacctaataagtatgaccaagaagctagcaaacctactgataagatacaaagacgtcttgcacaaaatcgagaggctgctcgtaagagccgattgaggaaaaaggcctatgtgcagcagttagaatcaagtcgtttgaagttgatgcagttggagcaagaacttgaacgtgcaagacagcagggaatgtatataggtggtgggttggattctaatcatctgggttttgctggatcagtaaattcaggaattacaacctttgagatggagtatggacactgggtgaatgagcaaaatagacaaatcacagaactgagaaatgctttaaatgctcatattggtgacgtagagctcaggattttagtagatggtatgatgagccactatgccgaaatgtttcgcatgaaatctgctgctgcaaaagcagatgttttctatgttatgtccggtatgtggaaaacaacagctgaaagatttttcctgtggattggaggctttcacccctcggagcttctaaaggttcttggtcccctgattgaacccctgacggagcaacagcgtttgaatatctataaccttggacaatcatgtcagcaagcagaagatgccctttcacaaggtatggacaaactccgccaaacacttgctgatagtgtagcagctgggcagttcatggaaggaacgtatattccacagatgacttctgcaatggagaagttggaagatctggtgagctttgtgaaacaggctgaccatcttcggcaagaaaccttggagcaaatgtctcgaatacttacaatccgtcaggcggctcgatgcttgcttgctttgggggaatatttccaacgcctgagggctttgagctcactgtggtctaatagaccccgggaacctgcttagtctcacaacaagattacaagagcgcaaactcataacatgaacgtgatgtgatgatgaatatgggtcagtttctttggcaaagagcatcaaaaccatgtgtcatgagaggtccaggttgctcacatttttcctgcagttttgcgttatggagaagttgtaaatatgactgctagctcattttatgcatacgggcttgtaaataaattgattttggacgcatggtgtatatcggattgttgcaaaaatgaaatatttagaatctgccatgagtctgtgtggaagttggtcatgtaaaattcatataatgttatgttgggtgttttggaaaatgaatcaactctagactctcttagtggacgtaatttattttttgtgattgctaagagtagtttattaaaaatatcagttgttattagtttgttagaaagttgttaactctaataggctctatatttagagcattcatacagtcttattgtatctttattcaatcaactacaaaatgattttctatgataaaaa

SEQ ID NO: 2245 - DNA, 1838 bp, Glycine max
acaatcaggaacattactcatgagtagcacaccttgcagtgctttctcatttcataacatgttgaaatgatcctatacttttttttttttttttttcttttttttttttttaaaacaaaataacacttatcaactgtaattcctctggactctggtatacgcctgggggtccaagcaattgtaactatctttttacatgaattaacaaactcaagaatacctagaacaaacaaaagaaccaaatatatgaatggatgtgaatatctagagtttaaaaccataagagagatacgttattgtgtgacattcgtatcccttttcaggttttgttctcccattcccgtctctctcttattttttagtagtttttcaactacatcatcccagtttgaccttccaccactagattttgattggttacttgagacgttatttcttccattaccggatgcatcatcaccttcattgttctcagacggttcgttctctgcagtgtccactgcatgaggtacatttaagctaacagctctttccaaagcatctctatgttctttctctatggtcttcaacctctgaaacttttgtacagttggagggtctgtcacagtttcagagctctgagccttcattaattgtaaagctttctcagcttccctttcaatccaaataattccatgatctgatgttgcattacaggacaagactatatgctcaaatcttccatcaacgggaatagcagtcctcacttcaggaggaaatctcccacatctgcaaaattttctctccacaatatggtacattcttccaggtgcataaagcctccttggatctctaagctttctaccctcaggtatgaaggtgtctctcaggcaaaccaagaacaataagcagggcaagcagaatattgatttgaatatatcttccaatggagtggccgttcttggcaagaaatcatcctgcaaaacaatagaatgaatgacattggcatacttgacagccaaattcagggacatacacctagctggagcaagcgcatagcaacgaatcttctccttgggaatcccacccaaacggtccctatgattcacaaccaaaatcgtcaacagcgacaccaccccagaacccaacgaatgccccgcgaaaaccatctcatactccaaaccattctccacccacaaccgcttcagcgtctccgattcacggttgagcagccacaccgccgatttcaacaacccacgatgaacgtatccaccatcaaacatctgctgccccaaccggttatcgaggagaactttatagtcactttctttggcgaggttgaggcctcgcacggcgagcacgatctctttgtggtcgtggtcgaggtagattacgtagggcggcgcgtggccgagcgtgtcctcgtaggtcacgcgcttgatgatgcagtcggggttgaggcggtggttgggggtacggagatcgggctcgtagttggcgaggatgaggcggcagacgcgtgggaccgggtcgaactcgtcggcggtggcggagggccacgtggcgctgtcgtagctgcccacgtaggtgcagcgcttccacagccaccgcgcgcagcccagcacgaacacacactccaccaccccgcatgacgcagacatggaaatggaatgtgactatgtgtgtctgttcattcaggcagaacagaatggaagattcgcgtctgaggttgctacaagctttagctggagagagacagagacactaaggttaagatattttgtttcacagcttccatgtgctctctagattctcactttactcttttcgggggggggggggcctacgtagctgatcga

SEQ ID NO: 2246 - DNA, 1618 bp, Glycine max
ttttttttttttttttgtcatctctaccatatgccatatattcattatttttttatttcaaattacagatttgatcataaaaatgatgatccagttactacacttttttctacccatccaaattaattgaaaacaacattcatagttattaagctaacactcagggtgtctattgtctaagcctttctacgcccaaggaatctggcaggactaaagtgcttaagatcaacaatgctagaatgtccatcaataacaagctcagcaacagcagcaccagtggcaggaccattgagaataccccaacagttatgccccgttgccacataacaccccttcacccctggaacctctcctatgacaggtaccccatcatccgtgcacggcaagaaacacgcttgctctgccttcatacgtgccactccttccccaagatagctcgacaccgtcttcgccactttcttaagcatcgcaatcgattcagggtttcctcttatctcctctggatcatccggcacctcttcctccttcgacatcccacatatatacacctcccctgtgggacgagggtacacttcagggtcaagagattttccacgtttggaagaatagtaactgagaaagagagcatggggggttatggaacttggctctctgggctctaatacaatactatgggccttaagcccataaactctaaacagcgaagacaacaaaaccaacttactggaccaagggcccaatgctaacacaacagaatccgcttccaaaactcgtcctccttcaagcaccaccgatccaactcgtccttctgccacaaccaaccgttccaatttcgcaatctccaccttcactccatgcttctccaccgctctatcaatcagcgtgcgagtgaagagcctcggatgcacctgagccgtcgtttcggtggttccaatcgttttagcaccacgagctggtccgtcaacccaagacggcaacgttgaggtagcagaagaggagccttcggattccgttacggtgaggctgagagtggtgagggctctgtaaccgtacgatcgcggaccctcgagttcttcggagagcgaacggtggagattgaagctggcgcgagctagctcttccaacggtcctccgtcacaccaatcgagggcgaggaatccgccggcttttccggacgcggcgcacgccacgtcggatttctcgatgagcgtgacagcggcgcccttctccgccagaaagtaggcggtgcagactccgattactccgccgccgcagacaaccactcgcttcggctgatccatgggcgatgatgatgacgactcaattgaattcactctcgagattatggagattttgtttcgccgaaatgcaataagcggtggccgcagaacccccaccactagattcatactcatccgattattttctatttattttataaaaaagaaatcagacacgtgtctgttactgctggtatgtgtatgtttgttcacattccagttccggcattagccaaaattctattgtttgatatttgggccccttctgaattccgataaaacaagttcatgtccattagcatgttcagcccttactgggttttagttttagttctcga

SEQ ID NO: 2247 - DNA, 1223 bp, Glycine max
ttttttttttttttttttttttttgaatcgaacaaacctcaaacctttctacttcttggaagttaaaatcatataggtgattgaaaactggtgcattatttatacagacataatcaactcttgacttgacctaaatataggaacattgatacatttggcagtgggtgtcattcaatgtgacaactatctatcccaacctgatggtctccgcctttctttaggtttagaactgttcgtgctcttctgaccaggatttactccataaccttgactggtggaaattaccgctgatgtagcaggattgggtgaagcagtactctgataagtatttatgtcaccaccaattgatccaccggatacaaaaccagggagtgctgttctcttattagcagtcatgcttgtattgttaccaaagccttgattctgagagtttgatgaagcagcaacaaagttactcttgaattgtgacatcattcctgttcgcagagaatttacagcggcagatcgactgggagctgtggtagatggtgcattatttgactcaggattatatccaatgcccaggccaaaatccactcctcgcacacctcggccacccccaccacctcctcctctacctttgccttttttcccacctccttttcttgcatcacgttttgacctgaatctcccatccttcatagcaagatccatcaactccacagacacattctgaccagcagcaactaagctattgaccaattcaccagcaaatcgtgcttctttcagagttataagagtgtatgcaaccccgtccttgtcaccagcacggcctgttcttccaatgcgatggacatgcatgtccatatcttttgcaatatcaaagtttaccactgacttaattgacttgatgtcaagaccacgggcagcaacatcagttgcaattagcacatggtagaggccagatttaaacttctgtaaaatatccatacgagaagcttgatctttatcaccatgcaatgcagcaactttaaagcctctttgagccaattgtgattcaatttcatccacagtagcctttttcgaagcaaaaactagggtatcaccttgatcaatcatttcaggcagcttttccaaaagccagggcaatatctcagaatcggaaggagttacgtgaacaacttgaggaaggctataatttgccatccccacctctccacggacgcgtgttcgacccggaggtc

SEQ ID NO: 2248 - DNA, 1645 bp, Glycine max
  misc_feature (1592)..(1592): n is a, c, g, or t
gggaagatgaaggaagatttggttagagagtacttttagtaacttgtcatggccgtggagttctgccacagtcgctacgacaccaaccgcgatcttaagccggagaatatgttcatcgacgagaactatgaccttggagtctgcgactatggcctgtcggcgctaccggaccagcgcagatccgacgggatgctcctcacgccgtgcggcacgccggcctacgtggcgccggaggttctcaagaagaagggctacgatgggtcgaaggctgatatatggtcctgcggggtcatcctctttgctcttctttctggctatttgccctttcaaggtgaaaatgtgatgagaatttacagcaagtctttcaaagccgattatgcattccccgaatggatttcccctgcggccaaaaacttgatctccaatttactcgttgtggacccgcaaaagaggtattccattccagacatcatgaaggacccttggtttcaaattggcttcttgaggcccattgcgttttccatgaaggagtctgcgcttgaagataacattgatttcagcggggatgatgttcctagtcctggtagtgatgatggtaatagcagcagcaacaacgaggatggggagttgacgggggctaagcctgctcgtccgtcttacaacgcttttgagataatctcgtccttgtcgcatgggttcgatctgaggaatttgtttgagacgaggaagcggtcgccgtcaatgttcatttccaagttttcggcttcggcggtgatggcgaagctggagggggtggccaagaagctgaactttagggtgacggggaagaaggagttcatggtgaggatgcagggggcgacggaagggaggaaggggaagctggccatgacggtggaggtattcgaggtggcgccggaggtcgcggtggtcgagttctccaagtccgccggagacacgcttgaataccttaatttctgtgaggaccaagtcagaccttcgctcagggatattgtgtggagttggcaaggggacgctaattgccaccagtaactattcaattcaatttagattattgcagcatgtaataaatatctggagtttgggatgttgattgaacataataagaattaagaatcatcttgattgacccttcttagttcttattatttcctcctcttaagcttatgactttctgttgtatttctttttaagattaagagttaagacagaggacatcccgttaatctgtatgatgtcagaatttgttctatgctagactactcgatctggtatttcagattgttcctgcaaaacggcaaaagagattgctaaattggtattacaagtccaagccaattactattcaaaagagattggtaatttggtgggattataagtccaagcctctctggttattcaaaaatatttatctgtacagcaatatattgattgccttaggtttctagtataaaatagctctctaggtattcaaaaacatttatgttgctatattttttatgttcttttgctcatttgctatgttgctgtattttttacaattattaccatttctatttttcttcaccttacanaaaacatgccaaagaactcaacagacatctaaaggaagatggaataaaaattg

SEQ ID NO: 2249 - DNA, 1264 bp, Glycine max
gcaggttttttttttttttgataaacacccaggtgtatttagcatgaactctcaaaagtccactatcgtggtaattattcaaactacctaaaaaattggcattctaatatcctcaaaatacaacaacttgaccctaatgagcggtccactttcccaaactcaattgaacatttaatctactctaaagttacaaaaggtcaaagaatgaattaactcaggaagcaatagccgaaagctgaccatgaaaccggtgtgcacccgatcgcactttaatctggtgctaactactgaacacccatttcaatcatatcttcaactgcatatggaccaaccctggatgtctctagcactgcacccgggttccatcaggggaagcaactaatcctctaaacaaacaattgccatcctcgtttctgcaagcataccctgcaataggagtgcggcaagacccatccaaagtctgaagaaaggccctctcacagacaactgctagccttgtttcttcatgattaagtgaatcaatgtattctgccattttatcgtcatcacttctacaggcaattccaatagcaccttgggcaacagctggaagcatatcatcaattgataggattgaagtcacattttctgtcatacttaagcgtttgagtccagctaatgctaatagtgtagcttggacaaccccctcattgagttttcttaaccttgtttggacattgccacggaaattttcctgcacattaagagatggatatctgtggaggatctgtgactttcgccttaacgaagcagtaccaataacacttgcagggggaagatcagctaatgaagctgcagtcagggatataaatgcatctctgacatcctctcgcggaaggttacatggcagaattgttttatcaggcaagtaagtaggaacatctgtggttgtgtgaggattttgtctcctgttgtctttataatcacaatctcaatagcaccctcttcggctaagtcagggtgtgatgccctgagtttgtctctggtctcgtgtgcttgtgctagagctagtggacttcctctggtaccaattctgatgagagcgaccttagtctgttgctcaacggcaacagaagctttggagagagatgcagttttcgttttcggagctgagcagggatggggaagccacccgctatcaagatacagttcctacggattaatcattttcttttcttttctcaaattacacgcattcgcctggggggggggcctacgtagctga

SEQ ID NO: 2250 - DNA, 1100 bp, Glycine max
tttagcgtgaactctcaaaagtccactatcgtggtaattatacaaactacctaaaaaatggcattctaatatcctcaaaatacaacaattgaccctaatgagaggtccactttcccaaactcaattgaacatttaatctactctaaagttacaacaggtcaaagaatgaattaacttaggaagcaatagccgaaagctgaccatgaaacctgtgtgtacctgatcacactttaatcatctgctgctaactactgaagaagttaggtccagcccgagacagaagctccttgccagcatccttacccatctcaatcatatcttcaacagcatatggaccaaccctggatgtctctagcactctggttccatcaggggaagcaaccctcgtgccgaattcggcacgagggagagagagaactagtcttcgtgtttttgaagaaacaaaatgccaaatgtgcataaaatcacaaagaaaaggtctattcacatataatcatagtcaacctattacatccactagcagtaatacaagaccgatcatcatcctctacataatattctcattgccttacatagatgacaaactgactttatttaacacaccagcagaataactctggaaaccacacctcaggctataaacttgatagtcagtcccttgtgctctctttaatccactctaaatatttaagattgcccccggtgatgggtaaggagatcacctctggcacatcatattcatgattagccttgacatgctctgtcagtgcctccagaagggattgcctagtcttgattataagaagttcctcagaatcagtttggatctttccctcccactggtacaccgattcaatacccggtaccctgttgacacaagcagcaagcttctctttgacgatgctttcagccaacttcttacctgcatctttgttgggaacagtgacatagacaacaatgctgggcacggtggtgttactcccttccattctgatgcaggactgggttcgaatacccaacttggatcgtaagagagattgaacgcaccccgttttgagcagagagagaaatcaagagaaagtgggttatgtcatgagtac

SEQ ID NO: 2251 - DNA, 1150 bp, Glycine max
tttttttttttttttttctttttttttttttttttttaaagccacctaaaaaagctggaaattatttttagatataaatacttttttgaaaacttgtagcagacatgaaagctactataaaaaatatcattcaaccaaacgcccacgttacactatgaataatacacacaacactacaaaaatttggctttctaatcaccttaagatacaacaattggaccatgatgagtggcttatttttccaactcagctgaatattttagtctttacaacatggttgaagaatagacatacttgggatgcagtcaactgaaagagctgaccgtgcaacctccctgatcaagtattgtgttggccatttaatgtggtggattgttaacgactgaaaaagccaggtccggctcgagaaagaagctcctctccagcatccttacccatctttatcatatcttcgaaagcatatgggccaattctggaagtttcaagcacacggattccatcaggggatgcaactaatcctctaaacaagcaattgccatcctcatttctgctagcatagcctgcaataggagtgcggcaagacccttccaacttttcaaggaaggctctttcacaggaaactgctagtcttgtttcttcatgattcagtgaagcaaggtattccgccattttatcatcattacttctacaggctattccaattgcaccttgggcaacagctggaagcatgtcatcaattgataggatcgaagtcacattttccgtcatatttaaacgtttgagtccagctaatgccaatagggtagcttggacaatgccctcactgagttttctcagccttgtttggacattgccacggaaattttcctccacatttagagatggatatctgtgcagtatctgtgactttcgtctgagtgaagcagtaccaacaacacttccagagggtagatcagccagtgaagctgcactcaaggatataaatgcatctcttacgtcctcacgtggaaggttgcatggtagaattgttttatcaggcaagtaagtaggaacatccttcatcgaatggacagcgatgtcgatttcgctgttcaagagtgcctcatctatttctttggtgaacaagcccttcccacctatgtctgcaagt

SEQ ID NO: 2252 - DNA, 1281 bp, Glycine max
  misc_feature (9)..(9): n is a, c, g, or t
  misc_feature (1267)..(1268): n is a, c, g, or t
  misc_feature (1271)..(1277): n is a, c, g, or t
  misc_feature (1281)..(1281): n is a, c, g, or t
tgaacattnaatctactctaaagttacaaaaggtcaaagaatgaattaactcaggaagcaatagccgaaagctgaccatgaaaccggtgtgcacccgatcgcactttaatctggtgctaactactgaacacccatttcaatcatatcttcaactgcatatggaccaaccctggatgtctctagcactgcacccgggttccatcaggggaagcaactaatcctctaaacaaacaattgccatcctcgtttctgcaagcataccctgcaataggagtgcggcaagacccatccaaagtctgaagaaaggccctctcacagacaactgctagtcttgtttcttcatgattaagtgtagcaatgtattccgccattttatcgtcatcacttctacatgctattccaatagcaccttgggcaacagctggaagcatatcatctattgataggattgaagtcacattttctgtcatacttaagcgtttgagtccagctaatgctaatagtgtagcttggacaaccccctcattgagttttcttaaccttgtttggacattgccacggaaattttcctgcacattaagagatggatatctgtggaggatctgtgactttcgtcttaacgaagcagtaccaataacacttgcagggggaagatcagctaaggaagctgcagtcaaggatataaatgcatctctgacatcctctcgcggaaggttacatggcagaattgttttatcaggcaagtaagtaggaacatccttcatcgaatggacagcgatgtcgatttcgctgttcaagagtgcctcatctatttctttggtgaacaagcccttcccacctatgtctgcaagtggttgtgtgaggattttgtcccctgttgtctttataatcacaatctcaatagccccctcttcggctaagtcagggtgtgatgccatgagtttgtctctggtctcatatgcttgtgctagagctagtggacttcctctggtaccaattctgatgagagcgaccttagtttgttgctcaacggcaacagaagctttggtgacccaaatgcgatggcatttggagagagatgcggttttggttttcgaagctgagcggggaagccacccgccatggagcgtggaagaaagagtattcatgtcaaagagaagagaagagaacaacaacagcgaattgttgaggcaaccccgtttcgcttcgcttctgtctgctgatggatggagtctgatatgatatgtccaacaagataaagttgcgnnaannnnnnncctn

SEQ ID NO: 2253 - DNA, 878 bp, Glycine max
aaaagaaaaatattcttaaacccgaaagcagatagatggatggtacagaatcagaaattttaagaaacaaaatgccaaatatgcataaaatcacaaagaaaaggtctattcgcataaaatcatagtcaacagagccattagcagtaatacaagaccgatcatcgtcctctacataatattatcattgcctagttacatagatgacaaactgactttatttaacacacgagcagaagaactctggaaaccacacctcgggctataaacttgatagtcagtcccttgtgctctctttaatccactctaaatatttaagattgcctccagtgatgggtaaggagatcacctctggcacatcgtattcatgattagttttgacatgctctgtcaatgcctccagaagggattgcctagtcttgataataagaagttcctcagaatcagtttggatctttccctcccactggtacaccgattcaatacccggtaccctgttgacacaagcagcaagcttctctttgacgatgctttcagccaacttcttacctgcttctttgttgggaacagtgacatagacaacaatactcggcacagtggagttactcccttccattctggtgctggagtggcttcgaataccgaacttggatcccgttttgagggcagaggaatggaagggcgtgcagagattggagagtcccaaactgagcatgcaaaacgcgccgacgaggggcaaacgacgtcgtagcgtggaggaggagaaaagggaagtagaggagcagagtgtagaagtcattttgggaagtcttatttcctgctccgccctctcacacctctatactttcacggacgcgtgggtcgacccgggaatccggacc

SEQ ID NO: 2254 - DNA, 1062 bp, Glycine max
  misc_feature (8)..(9): n is a, c, g, or t
  misc_feature (13)..(13): n is a, c, g, or t
  misc_feature (17)..(17): n is a, c, g, or t
  misc_feature (19)..(20): n is a, c, g, or t
  misc_feature (28)..(28): n is a, c, g, or t
  misc_feature (44)..(44): n is a, c, g, or t
  misc_feature (51)..(51): n is a, c, g, or t
  misc_feature (54)..(55): n is a, c, g, or t
  misc_feature (66)..(66): n is a, c, g, or t
  misc_feature (68)..(68): n is a, c, g, or t
  misc_feature (72)..(72): n is a, c, g, or t
  misc_feature (74)..(74): n is a, c, g, or t
  misc_feature (83)..(83): n is a, c, g, or t
  misc_feature (86)..(86): n is a, c, g, or t
  misc_feature (98)..(98): n is a, c, g, or t
  misc_feature (103)..(103): n is a, c, g, or t
  misc_feature (108)..(108): n is a, c, g, or t
  misc_feature (120)..(120): n is a, c, g, or t
  misc_feature (124)..(124): n is a, c, g, or t
  misc_feature (126)..(126): n is a, c, g, or t
  misc_feature (141)..(141): n is a, c, g, or t
  misc_feature (154)..(154): n is a, c, g, or t
  misc_feature (158)..(158): n is a, c, g, or t
  misc_feature (197)..(197): n is a, c, g, or t
gaaaagcnnctcngcancnnaccctatngtcagtctcgaagcantggcaanttnnaagttaagccncngatncncaggggtgnaantatcctttacancgatncccanctcatttatgangcanancctgcaataggagtngcaagcccttccnactntcaggaaggctctttgacaggaaactgctagtctgtttnttcatgattcagggaagcaaggtattccgccattttatcatcattacttctacaggctattccaattgcaccttgggcaacagctggaagcatgtcatcaattgataggatcgaagtcacattttccgtcatatttaaacgtttgagtccagctaatgccaatagggtagcttggacaatgccctcactgagttttctcagccttgtttggacattgccacggaaattttcctccacatttagagatgggtatctgtgcagtatctgtgactttcgtctgagtgaagcagtaccaacaatacttcctgagggtagatcagccagtgaagctgcactcaaggatataaatgcatctcttacatcctcacgtggaaggttgcatggtagaattgttttatcaggtaagtacgtaggaacatctttcattgagtggacagcgatgtcaatgtcaccgtttatgagtgcctcatctatttcttttgtgaataggcccttcccaccaatgtctgcaagtggctgtgatagtattttgtcaccagttgtttttattattacaatctgaatagccccttcttctgctagctctgcatgtgatgccatgagcttgtctctggtctcatatgcctgagccagagctagtggacttcctctggtaccaattctgaggagagcaaccttagtctgggaagtttgttgctcaacggcaatggaagccctgatgccacatttggagaaagctgaagttctgattctgaaagatgggaacaccaatgcagagcagagggtctccatttcacaacttgaattgccttgccgctgatagataggtatgatttggtctcccaaagataaaacgataggatat

SEQ ID NO: 2255 - DNA, 3863 bp, Glycine max
gcgcccttttttttttttttttttttttttttttaacataaactagcatcccaataaataggtaaggttaggataaagacccaaaagcatggaaaaaagtaacacaaccaaagttgctttttcaattcatatacgaaatttgacataatgttgccgttgtgtatcaattataaatatagtcaaacatgctggctgctgtcgttttcacctaagtctcaaacacacctctatgaagaagaaagccacctactaacggaaataaacggatatctgagggatgtcgatgtcattatcctcgtcatcctcgcatgccacaacaacatccaaatggcgacggtaggaaggaatttccaacttggctacatcccttgccagatctgcaacctttttgtccattcgatccttatgcctagggaacatgctattatagagtaggcaacttccacaagagatgctataagcattcaagccctttgctttcagccactcgagaagttccctgagggtaggattgtttccgagaatccatctatcccaaactgtccaactcatatcttgatgcttgataattttcggtggaactggttcagccattgaaaacagaggtagtgccaagttagcaaatgtgtttctgtagtcttcgactttgtgtcctccatccaaagctttgtagagttccaggcagacaagaccagttgccatggcagtcgaggttgcaattgcaggaatgatccggccagcaataaacttggctttaagcttgtcaacctcaggaatgctgtaattccgtgccctcatgttggcaagcccagcaatcacatccatatggtagtttgtgtcatcatccttctcaaattggattggtttcatcctgaacactggtgaaagatttgcccggcacctctctaacttgattactagatcattaataaccgctgcatcatctatagaagctgtagagagactggtggccttctcatctgtcactattttcacatctttcttaggctgaaagtcaggtactatcaccctatcaacagcttcagccatcttcctagggttcttaccccagtcagggattgggataccaaatgtttctgcccgtaaaatagaagctgacgacacaaaatttagatgacccaaatcagaggctgagaattgtagtggacgagggaatctttttggtgcagaccagaaaggagctccagtactagttgcagcatcttcaggaaaagtatagatcaactgcttcacccggttaacaaaataatcctcaaactttagccgagcccaagtgatacaatcttcaaaagtttcacacttctcctggtctaggcactcaagaacacgctccaagttatcccttgcttgagcatcaccagcatttttcattgcattagtatattcacttgggttagacaaatatgcatttacttcagctggagttttctcaagcaaaccctcaaactcagatcgcgcccatgtcaagcaatggtcaatgttgtgtggaaatgagtgtacagtacacattggtgcctgcttctcaggtggatctcttgatgcaccatagttttctgtcaggtggggaattaccatctgcgtattgcatttggctcccagagttccagactcaagaagaggcttttggaaatacaagcatctctgatcaacatatagtcttgcattaacattgtccagtgcatttacaacgacactcaagttttcccagaaggtatcattaaacacattctcagtttcagtaccaactcgattttgtagagcttcaatattaaaactaggatttatagctgcagcagctgaagcagcaactgtggacttggcctgtccaatattccaatcacggaaaaggaactgtctgcttaggttactcttctctatcacatcatcatcagtaatagtgagcttcccctgacttccacaagaaactcccatgagagcaagatttttcaaaaattcacatcccaaagcaccagatccaacaacaaacactttagaatcctctaatttcttctgtaatttctgtccaaatactgaaatctgtgcatcataacgaccatttactggtctgaaatcatttgggtccactggctctgaaggcagtgactccacagagtcaaagtagaagaactgaaaaagtgggtaaaacttcccagagcatgctttgacaacctcttgtccaacaattccaccaaacatggcagccataggattcaatactgccctagaaccaaaggcaaagtatcgcaaaagttttggatttatgtcttctaatttcccatcccttaagctgtcattaatatgactagcaacagatataagcttctgtgcatcatcctctgaaccagcaacagggaagcgacctaactcagaaatgaatttatccaaagcctggaatgctaagtgaaggagaggtgggcgatcaaacttcgaaaaatcactcagaagaaaatcaccaggatcagtgattgcttccttgagtggcttaaagttcaatacctttggttgtttgacctgcgtcacaataccacctttctcatacgtaccataatttgtggtgtcttcttcaagagtaaaagagtatgctctagcatctttaatctttcttggctttccatcattcaattctttcataccatgaacttcagagaatacaacaagatctccatcctgaaactcaagcctctcatcatcaacacaggatactagagcagggttgtcattgcttatggatgcaataatgccagtatggggttcttcaccatccacatcaacaacagtaaactcaggcccaaaatcacagaacacagaaccaaaaaggcctctaacttcagttttaataaaggcaataggaggctgatgactgtggcagtaatcattgaactcaaaggctttctcaagactgatatcagtaaaaacaacagcttggaaattggaaaggtgttctttagtcagctgagtagtcaagctttgtacaatcactgcattgttgagctcctgcagcttactaacagaagctgctgccctgtttttaccaacatcattctctgaaaacacaaagttactggatagatcccacagctccacagtcccctcatcatgcaaggtcactgacttgacaccagcaagaatgagattcttagcaatctcaacgccaagaccctgcatcccggagacgagaacgttggaaccaaagagcctccgcatggtctctcgcccatacacggcgagttgccgactgtggagatcctcatcgatgtccggctggttcgattcacccaaagccatatccgacgctccctcactcgcgtttccgctgttgctgttgttgttgttgaagctctggtcggtgctttcgtagttcttcaccgtagaatcggcggttctggcagcggcgatccgattcttcttgagagaactgctgctgctgctgctgttgttgctgttgttattgttgttgttgttgttgttgttgttgttgttgttgttgctgttgttgttgttgtcgttgttgttgtgagtctcttcttctgcaaccagtccttcgcaaggtctcttagttggaagcatatagtgcagtagtgagcgattggaacttgggtgagagggaatcaagagaaatggaacctctgattggatgctgagaatcggagagaaagtgttttcgtttggttttgttattggattttgggggttttattgggtttagagggaggggtatttatggatttgcaatgctcatgctagtattctagggtttcgttttcgagtgaggacaggacagctgctactaccattttttctctcccaaagagagaagagggggggggggcctacgtagctga

SEQ ID NO: 2256 - DNA, 2173 bp, Glycine max
gggatgttttgtcgtcttgccatcaaaatccatcatctcaagaaaagtgtattaaaaaaattagagcaaatgatataacatacaaggaacgaaagttgcttttcaattcatatatgaaatgtgatatggtcgacagtgtcgccttgtgtgtaaccattatgaatatgaagctggaaggtccaacatattctgttttctaaactaaagataagtctcggacacacctgataggacgacaacaaccaccttaacggaaatagatggatatttgggggatgtcaatgtcattatcctcatcatcctcacaggcaacaacaacatccaagtgacgacggtaagaaggtatttccaccttggccacttccctagccaaatccaccatttttttgtccatgcgttctctgtgcctagggaacatgctattatagagcagacaacttccacatgaaatactataagcattcaaaccttttgccttcagccactcaagaagctccctaagagtaggattgtcttttagaatccatctgtcccaaactgtccaactcatatcttgatgcttgatgacctttggtggaactggctctgcaatggaaaagagaggcagtgctaagttggcaaatgtgtttcggtagtcctcaactttgtgccctccatccaaagctttgtacagctccaggcagacaagccctgtggccatggcagttgatgttgcaattgctggaatgatccgtccggcaataaacttggccttcagcttgtcaacttcaggaatgctgtagttccgtgccctcatgtttgcaagcccagctatcaggtccatatggtagtttgtatcatcatccttctcaaactgaactggtttcatcctgaactctggttgcagctttgtccggcacccctctaacttgacgattaaatcattaatcacagctgcatcatctatagacgcagatgagagactggtggccttttcatctgtcactattttcgcatctttcttaggctgaaagtcaggtactatcactctatcaacagcttcagccaacttcttaggatgcttcacccagtcaggaataggaataccaaatgtttctgctcgtaatatagaagctgccatcaaaaacagaagatgacccagatcagaggatgagaattgcagtggatgagggaaccgttttggtgcagaccagaaaggagctccagtactagttgcagcatcttcgggaaaagtataaattaattgctttactcggttagcaaaataatcttcaaactttagcctagcccatgtaatacaatcttcaaaagtctcacacttctccttgtccaaacactcaagaacacgctctaagttatccctcgcttgagcatcaccagcattcctcattgcattagtatattcatttggattagataaatatgcatttacttcagctggagttttctcaagcaaaccctcaaactctgaccgagcccatgtcaagcagtggtcaatgttatgtggaaatgaatgaacagtacacattggtgcctgtttctcaggtggatctcttgatgcgccataattttctgttaggtggggaatgaccatttgggtattgcatttggccccaagagttccagattcaagaagtgacttctggaaatacaagcacctctgatcaacatacagtcttgcattcacattgtctagtgcattaatcacgacactcaagttttcccagaaggtatcatgaaacacattttcagtttcagggccaacacgattttgcagagcgtcaatattaagacggggatttatagatgcagcagctgaagcagcaactgtagacttggcctggccaatattccaatcacggaagaggaactgcctacttaggttactcttttctatgacatcatcatcagtaattgtgagctttccctgaccacaagaaactcccattagggcaaggtttttcaaaaattcacatcccaatgcaccagatccaacaacaaaaacttcagcgtcctctaacttcttctgtaacttttgtccaaaaactgaaatctgtgcatcataacgactattcaatggttttaaatcattagcatcaagcggttctgtagggagtgattccacagagtcaaagtagaaaaattgaaaaagtggatgaaatttcccctcgag

SEQ ID NO: 2257 - DNA, 2027 bp, Glycine max
gtgtttgatgtgaatctcctggcaagctattgcataaataaatggaattaagaccaagaaacggatcccaaagctgatttccttatcctaacactctcatctggtctctatgtctcgaatcttctccgcatggaacaagaagaagctgcaccttcatctcaacttaatccccactattttttcttcttcccacactcacttcgacgctctcgctgccgccaatagtgggcttctccggcccagtttgaggctctacagtagtagtagtagcagcagcaatggggagccaccagaggattggcctcacgatcactacgctgctacgcaaactcctattagtgttaatttcattcgggcctctgggcccagggacgggtgggtcggagggtccaatttgggtagggattttcctactccgaaggaaatctgcaagggactcgacaagtttgttattggccagcacagggccaagaaggtgctctctgtagctgtttataaccactatcaaagaatataccaggggtcagaggcagatgaaggactctctcaaggattggatgatggggatgatgtggagctggaaaagagtaatgttctcttgatgggtccaaccggttcagggaagacgttacttgcgaaaacactggctcgttttgtgaatgttccctttgtcattgctgatgctactaccctaacacaggctggttatgttggggaagatgtcgaatcaatattgtataaactacttgcggcagcagagttcaatgtccaagctgctcaacaagggattgtttacattgatgaagtggacaagataactaagaaggctgagagcttgaatattagccgggatgtttctggtgagggtgttcagcaggcattattaaaaatgctggaaggaactatggtaaacgttcctgagagaggagcaaggaagcatccacggggtgataacatacagattgacacaaagaatattctttttatatgtggtggagcatttattgatcttgagaaaaccatttcagagaggtattttgtttttctttttatgtctttgttttttcatcatatttgattattgtgaaataaaccagacgacaagattcttcaattggttttggatcaccagtccgttccaatatgagaactggtggagttacaaatgctgcagtcacatcatctttacttgagtcggtggaaagtgctgatcttattgcatatggtctcatacccgaatttataggacgatttccaatcttaattagcttgtcagctctaaccgaagaccaacttatgcaggtcctcacagaaccaaaaaatgctcttgctaagcagtacaagaaattatttaacatgaataatgtaaagctacacttcacagagaaagctctgagattgattgcaaagaaagcaatggccaaaaatactggtgccaggggtttaagagcactactggaaagcattttaactgaagccatgtttgagattccagatgttaaagcaggaaatgaactcattggtgcagttgttgttgatgaggagtcagtaggatcagtaaatgcccctggttgtggaggaaaaattctttgtggagatggtgctttggaactgtacctagctaagatggagggttcagtggctaacggtgccgtagctgagccagacttacaagaaggggaatcagagatttcatcaagagccgtgagcatgtaatattatatattatatttaccacaatcaaggtgtataatatatcattgttgttatctgtaaaaatcacattcataatctgctgtaattatcccttgtataacggtgtagcttctgttttatgtacattggataggaaggatatagaaaattgaaggatgtagcattgctaatttaggcatcacgtcatccaaaatttcaattgattttgatgaaaaaaaaaaaaaactctattttgagacgattttctcttttgctgccccactaatattaaggggaggagtgctagcaaaatactttttaactctcttttt

SEQ ID NO: 2258 - DNA, 1281 bp, Glycine max
ttttatttttttttttttcttttaaatcaaaattaaatccttactcatttaccataattgagattttcagatgatattacaatttaatcacaatatcagctgaactaggatacgaacagaaatccaagcatcaacgcagtccaactgataaacaaaatggacattatagactattactgctacaagttaataattctaccatccaagaggggaaaagatgaaacttatggttctatcatgttagaaaaaacttctcattcctcctcagagcctgaactttctgcagctttaccatgtttattcacagtgccattggcagcttgttgcttattttttgtgttctgatcatcctcttcatcttcactgtactcactctcgtagtcatcatcatactcttcatcctcgttgtcctcatcctcctcaactccatcctccatgataggtccttcatcagccaaaacagcagccctggtgccagcccgagtccgtttcaaaactttgagctttaaatttgtccttctgtcacagcccaaccaagaatcacacaaacaatagcaagtcaaactgtagttaccctctgatggggcctggaacttgcccaatactaatctagagccccctttcaccttctcaactgcttctgcaactgccttactggtctccttcacatttgctcctgacccctccatagactcctcaattgccttagatgcagaagttacagcagcagcttcatccatgaaactaaccttctgagaaaaccacacattatttgaaacagaatccgcaagcaaaaaccagtaattttcttccttatgaaatgggtagtagggggcatgtggaagggcaccaatcaggccattaccccttttaacatttatccaagcatggagggtcacaatgtcaccctcttgtataccctcttcaccttcagtctcacaagttacctcaagtgtcaaggaaggcatcatgtccagtaccgtctcaatgtcttgcacttccgtagaagataacccacctgtttgaataagcaggtcagctcgctccagagagtccatgtcatgaagttcctgaaatgttctcaccttgcgggccaccttcttaataataatagtctcacttatatgtggcaactgcagaaatggtgcaattccttcaggtgatccaccagtagactttctagcactaagaggaacagcctgcataggtcatacatcaagaaaagcacatcatataaataatgatttattaaaaagggggggggggggcctacgtagctga

SEQ ID NO: 2259 - DNA, 1306 bp, Glycine max
  misc_feature (30)..(33): n is a, c, g, or t
  misc_feature (1213)..(1219): n is a, c, g, or t
tttttttttttttttttttttttttttttnnnntttttttttttttttttttttttttttttttttaaataaaaattaaatccttactctcatttttaccataaaaattttcggatgatatgacaatttaatcacgatatcagctgaactaggatacgaacagaaatccaagcatcaacgctgtccaactgataaacataatggacaatattagactattactgctacaagttgatagttctaccatccaagaaggaaaaagatgaaaattacgattctgtgatgttagaaaaaacttctcattcttcatcagagcctgaactttctgcagctttgccatgtttattcacggcgccattgacagcttgtttcttattttttgtgttctggccatcttcttcatcttcactgtactcactctcatagtcatcatcatactcttcatcctcgttgtcctcatcctcctcaactccatcctccatgataggtccttcatcagccaaaacagcacccctggtgccagcccgagttcgtttcaaaactttgagctttaaatttgtccttctgtcacagcccaaccaagaatcacacaaacaatagcaagtcaaattgtagttaccctctgatggggcctggaacttgcccaatactaatctagagccccctttcaccttctcaactgcttctgcaactaccttactggtctccttcacatttgctcctgacccctccatagactcctcaattgccttagatgcagcagttacagcagcagcttcatccatgaaactaaccttctgagaaaaccacacgttgtttgaaacagaatccgcaagcaagagccagtagttttcttccttatgaaatgggtagtagggggcatgtggaagagcaccaatcaggctattaccccttttaacatttatccaagcatggagagtcacaatgtccccctcttgtataccctcttcaccttcagtctcacaagttacctcaagtgtcaaggaaggcatcatgtccagtaccgtctcaatgtcttccacttcagcggaagataacccacctgtttgaataagaaggtcagctcgctcctgagagtccatgtcatgaaggtcctgaaatgttctcactttctgcattatcaagaagacgacatgccttggtccaaccctcacttgtcatgggatcaatttggaaattcaatgaccaagtnnnnnnnttcaacatttgaatttcaaatagccaatagtcactatacagtacatacaactttgggttaactgtgcataaaagagatggctatgca

SEQ ID NO: 2260 - DNA, 1635 bp, Glycine max
  misc_feature (4)..(4): n is a, c, g, or t
  misc_feature (6)..(6): n is a, c, g, or t
  misc_feature (11)..(11): n is a, c, g, or t
  misc_feature (17)..(17): n is a, c, g, or t
  misc_feature (23)..(23): n is a, c, g, or t
  misc_feature (28)..(28): n is a, c, g, or t
  misc_feature (30)..(31): n is a, c, g, or t
  misc_feature (33)..(33): n is a, c, g, or t
  misc_feature (36)..(36): n is a, c, g, or t
  misc_feature (44)..(44): n is a, c, g, or t
  misc_feature (48)..(49): n is a, c, g, or t
  misc_feature (57)..(57): n is a, c, g, or t
  misc_feature (60)..(60): n is a, c, g, or t
  misc_feature (70)..(71): n is a, c, g, or t
  misc_feature (74)..(75): n is a, c, g, or t
  misc_feature (84)..(85): n is a, c, g, or t
  misc_feature (88)..(88): n is a, c, g, or t
  misc_feature (91)..(91): n is a, c, g, or t
  misc_feature (93)..(93): n is a, c, g, or t
  misc_feature (99)..(99): n is a, c, g, or t
  misc_feature (112)..(112): n is a, c, g, or t
  misc_feature (122)..(122): n is a, c, g, or t
  misc_feature (126)..(127): n is a, c, g, or t
  misc_feature (132)..(133): n is a, c, g, or t
  misc_feature (135)..(135): n is a, c, g, or t
  misc_feature (139)..(139): n is a, c, g, or t
  misc_feature (141)..(141): n is a, c, g, or t
  misc_feature (146)..(146): n is a, c, g, or t
  misc_feature (152)..(152): n is a, c, g, or t
  misc_feature (156)..(156): n is a, c, g, or t
  misc_feature (160)..(160): n is a, c, g, or t
  misc_feature (162)..(163): n is a, c, g, or t
  misc_feature (167)..(167): n is a, c, g, or t
  misc_feature (175)..(176): n is a, c, g, or t
  misc_feature (184)..(184): n is a, c, g, or t
  misc_feature (191)..(193): n is a, c, g, or t
  misc_feature (199)..(200): n is a, c, g, or t
  misc_feature (202)..(202): n is a, c, g, or t
  misc_feature (204)..(204): n is a, c, g, or t
  misc_feature (208)..(208): n is a, c, g, or t
  misc_feature (216)..(216): n is a, c, g, or t
  misc_feature (219)..(219): n is a, c, g, or t
  misc_feature (224)..(224): n is a, c, g, or t
  misc_feature (228)..(228): n is a, c, g, or t
  misc_feature (232)..(232): n is a, c, g, or t
  misc_feature (244)..(244): n is a, c, g, or t
  misc_feature (248)..(251): n is a, c, g, or t
  misc_feature (254)..(254): n is a, c, g, or t
  misc_feature (257)..(257): n is a, c, g, or t
  misc_feature (261)..(261): n is a, c, g, or t
  misc_feature (263)..(263): n is a, c, g, or t
  misc_feature (270)..(271): n is a, c, g, or t
  misc_feature (275)..(275): n is a, c, g, or t
  misc_feature (277)..(277): n is a, c, g, or t
  misc_feature (298)..(298): n is a, c, g, or t
  misc_feature (304)..(304): n is a, c, g, or t
  misc_feature (308)..(309): n is a, c, g, or t
  misc_feature (316)..(316): n is a, c, g, or t
  misc_feature (319)..(319): n is a, c, g, or t
  misc_feature (321)..(321): n is a, c, g, or t
ctanantttanaataantaaaancaaananntncanataacaanaacnnaacaaatntanacccaaaacnnatnnagaataganntantananagacanataaaaaataacnaacaccatcnaaannacaannangaanancgaantacaanaaanttantnnatanatataccnntataaaantacaaannnttattnnanantctnaaacaaancanagtanattntctncatatatatagnaaannnnatntanaaancnctaaaanncttnancccttttacaattaacaagantgaagngtannaatgtcnccntnttgtataccctcttcaccttcagtctctcaagttacctcaagtgtcaaggaaggcatcatgtccagtaccgtctcaatgtcttccacttcagcggaagataacccacctgtttgaataagaaggtcagctcgctcctgagagtccatgtcatgaagttcctgaaatgttctcactttcttgcgggccaccttcttaataatagtctcacttatatgtggcaactgcagaaatggtgcaattccttcaggtgatccaccagtagactttctagcactgagaggaacagcctggacgatacattgagaaagctcaacaacaccaattgcaggcctcagccatccatgcccctgagcatttcgcggtataactgccatcttcattaattcttcaagtaggcggggtgctgtttctaaaatttgtctgaaatcactttgtaaagatggcgacaaagctgcaaattcacgggtcaactgagcttgaactaacagctctgtcttaaccagtgcaggatgttgcttccaaaatttagcctgctcctgcttgatgtttttgaggtcaagattcaactcactccttaccaacataaaaagcttctgaagaggttcatcatcagtcctacgaactggaatttccatatattcagcagccttgatgaagacatccatgactcataattttcacgagctattggatctgtaagagcttgataagctttggcaatgtactcaacgaagtacttgtgtgcctctggatccggatttttatctggatggtattgaatagaaagtctcctatactttttctttatttcagactcagccgctccaggctctaatcctagaatattaaatggatcgaaaatttcaatctcacgactcatggtctttatgtaataaaccagaacaatcataaccacccaaagtagtaacaatgtaaagttactacaggttgagacattcgaaatcctcttgaatatcgatttatggtacttcccggaccgcgagcactcagagcactgacagtgaatgctctttgatttcttactggcagcacggcacaactttgttattgtatatggcacaataggaatggccattatcgtcaaaatgaatattgggaacagtgcactattctcctctgaagcagccatcgttcccttctgcacccaacaacctcaaaaggttaccaggcctgagtcttgggattcgaagaagtggaatgaaaggtcaacttggatgggagagggaaataggaggagatggaacctcagaatacagctcgagccgattcggctcgagcatctcgcagccgta

SEQ ID NO: 2261 - DNA, 1473 bp, Glycine max
ccagtatgcgaattgtatcctcctcttctgtgaattggtcacttatgcgtggtaccatgcctcagttaaccttccagcatagttatttcacgaatcaaaatatgagaggttccgagggctttaaagttttacagtcatggatgtatcctcaatccattctaccaccttctctaatttccgtcttgagctcatcaacatcagatggagaattggagttcttaaggaaaagacaagtagcttgggaagaatccttccgggacctctattacatgcttcgaaagaacatttgtggccttttttatgttagcactgcccagtttgtggtgatgttcactggtggcgacatctctgggaaatccaaatgttcatgcaatgcttatatctctcagtcaacccaagggttaagatcattgttaagagagcatgatctctgtttctctatgcctcttggccattcgaaagtagaacaagtttcaactgaggatctagttgagttgtcagagatagagaagcaaaacttaggacagactcggcgattaaggtcattatctgatgttgataatagcccagaatctttgctggtttttagtggcaacaacaatgtacatgctttatatgactttttactaaattacagatttctcttgacctcactgtctagtgtggatgtacctgtcttgtgctctcctgtgccatttcaaaattctgctttgtcttctcctgacattaaatgcgtggagactagaagagctgaagacattgctgcttcttctaatgggtctatatggaaagatgttgagtcagcacaaggatcatcagatagcctttgtaccattgaaattaaggatgcacttcttccaccttggattatttgtggtatatgtgcattgatggcctctgaaggaagaagctttgtggcaagttttgtgacggaacctagctcaattggcttgaatgttgccttaaaatcaacttgtgagaagtcggaatctaaagctgccggcagtgaaagcttacaagaccaaggaagtacgtttggcattccagaagttgtagtctcttctcgactgtgttcatgttcattaaaaggcgtaaggtacagtgatgaatcttatacagcatcgctatcccctgtacaatcttatataaacaagtaacttatattcatcactttgatggctaatttatttaaatgcctacccgtcccttgaccctccagaaaattaaaatctaggaatgttgcatttgtaaatccaaaaactagaggaacatgttggcaaccaagaatatgtaatatccatgtcaattgcgagttgctaattccatcaattggtgcattgagaatttcattcaagattacaaaactatgaccaccttgtgaggggaaacaaatcaattacgaactgtcgaactcattgtgcctttgggccttggcattggatatgtaattacgggatatttttcttccaaaaa

SEQ ID NO: 2262 - DNA, 1659 bp, Glycine max
ttacttgtttctttggtgaatgaagcactcagaataatattttaaactccaattttgcagtagatttggtagttgctgctatttagtccaataagtgtattgccttctaatttatatttttgtattcagtgtgttttctgacatgggaatctattcaacttgatcttatgacctccacagatatcagcaattgatcaaaggtctttttgtttttgtggctctgagaggggagtgattctaaactaatatatatgggggctggggaagagagcacagctaaatcttctaaatcatcttcatcagctcagcaggatacaccaacagcacctgcatatcctgattggtcaagctccatgcaggcctattatgctcctggagccactcctcctcccttttttgccacaaccgttgcttccccaactccccatccctatttatggggaggccagcatcctttgatgccgccatatgggactccagtcccatatccagctatatatcctcctgggagtatctatgctcatcctagcatggcagtgactccaagtgctgtccagcaaaatacagagattgaagggaagggagctgaaggaaaatatcgggactcatccaaaaaattgaaaggaccttctgcaaatacagcttccaaagcaggagaaagtggaaaggcaggctcaggttcaggcaatgatggcatatcgcaaagtggtgaaagtggttcagagggttcatcaaatgctagcgatgagaatactaaccaacaggaatcagctgcaaataagaagggaagctttgacctgatgcttgttgatggagccaatgcacagaacaattctgctggtgctatttctcaatcttctgtgcctggaaagcctgttgtcccaatgccagcaactaatcttaacattggaatggacttgtggaatgcatcttctggtggcgctgaagctgcaaaaatgagacataatcaatctggtgccccgggagttgcccttggtgatcaatgggtacaagatgaacgtgagctgaaaagacagaagaggaaacagtcaaaccgagagtcagccaggaggtcaagattacgcaagcaggctgagtgtgaagagttacaaaagagggtggaatcgctgggaggtgagaatcaaactctcagagaagagcttcagagactttctgaagaatgcgagaagcttacatccgaaaataattctatcaaggaagagttggagcggttgtgtggtccagaagcagttgctaacctggattaaacagcaacacatttcagttcctcagtgtagtgtttgatggtaacggcaaaatttgatagattcttaattaagacgaatctgcagctggaattttcttatcaatggcccggccttcttaattgagaataggatataatgtttttttttttctttgtcatactaatttatatcattaaccctcaattgtaattgcccttgtgattttacatgtcatttgtttgtaatattaaccagtaccgtagaatagaaaatgtaggctacttgagcactttttgtttagaacttagtattgcaagtgatgttaagaatcctgcttcaacttttcaaaaaaaaaaaaaaaaactttggagtcatttttgttctactatgcatgtgcttgagctgattgatg

SEQ ID NO: 2263 - DNA, 2041 bp, Glycine max
taaatgtagctacggcaaacgctacccaggttttgttggccacaggaggagggcatttggtttaccttgaaattggagatggcatattacaggaagtaaagcatgcccagctagagtatgagatttcatgcctggacataaatcccattggtgaaaaccccaatcacagtaatctagcagcagttggaatgtggacagacataagtgttagaattttttctcttcctgatctgagtctcatcacaaaggaacaattaggaggggagatcatacctcgttctgttcttctttgtgcctttgaagggatatcgtacttgctatgtgccctcggtgatggccatctcttaaactttatgttgaatactagtaccggtgaattaacagataggaaaaaggtatctctagggacacaacctattacactacggactttctcctccaaaaatactactcatgtatttgctgcatctgatcggccaactgtaatttatagtagtaacaaaaaattactttatagtaatgtgaatctgaaggaagtgagtcacatgtgtcctttcaattctgctgcttttccagacagtttggcaattgcaaaagaaggtgagcttactattggcactattgatgatatacaaaaacttcatattcgctctattccgctgggggagcacgcacgacgtatctgccaccaggagcaatctaggacttttgctatttgtagtttgaaatacaacccagctagtggtgaagactcagaaatgcactttgtccgcttgctggatgaccagacttttgagttcatatcaacttattctcttgacacttatgagtatggttgcttcataattagctgctccttctcagatgacaataatgtgtattactgtgttggaactgcatatgtactgccagaggaaaatgaaccaaccaaaggaagaattattgtttttgctgttgaagatggaaaactacagctaattgccgagaaagagacaaaaggagctgtttattgcttgaatgcatttaatggtaaattgcttgcagctattaatcaaaaaattcagctgtataagtgggtgctccgggatgatggtactcatgaattgcagtctgaatgtggacatcacggacacatcctagcactttatgtgcaaactagaggagattttattgtagttggtgatctgatgaagtcaatttccttgttaatctacaagcatgaagaaggtgctattgaggaaagagctcgtgactacaatgcaaattggatgtcagccgttgaaatcgttgatgatgacatatacctaggtgcagaaaacagttttaatctgttcactgttcggaaaaatagtgaaggtgctactgatgaagagcgaggtcgtcttgaagtggttggtgagtatcacctaggagaatttgtcaatcggttccggcatggctcccttgttatgcgcttgccagattctgatgtgggccagattccaactgttatctttggcaccattaatggtgttattggggtaattgcgtctcttccacatgagcaatatgttttcttggagaaacttcagtcaaatttgaggaaggtaattaaaggcgttggagggctcagccatgagcaatggagatcatttaacaatgagaagaaaactgttgaagccagaaactttttagatggagatttgatcgaatcatttctggatcttaaccgcagtaagatggatgaaatttccaaggcagtggacgtttcagtagaggagttatgcaagagagtagaagagttgacaaggttgcactgattttatattaatctgtgtagcttcgttgtttgtttgttttttttttcttatttaatattgttcttccttttttttttgaggggttgggtgggggttaaaataacattatatgcttgtattttctccccgctttttaccttctgtttgcattttacaatacatggatcacaaatggtgtatgaaatggatgtcatgttctaagtttctatttgccacttttggacacgctatcattttcctaa

SEQ ID NO: 2264 - DNA, 663 bp, Glycine max
  misc_feature (7)..(11): n is a, c, g, or t
  misc_feature (25)..(26): n is a, c, g, or t
atctgtnnnnngctcatgtgtgacnnggatagatacgaagagatatattgatagataattcagaaaaaaaaaatgaaactgaggatagatagatagataaaaccacgcacacacacacaaaaaaaaacaaaaacaaaaacaaaataaacatgatttgatggaataaggtgtgggtgttggtgcccctttgtccatctaggaggatggtgatgatctgactttgtgtttcaacagcatctttcgaagctccaccgggtcaatctcattggtgtgattgatgggcctgtagtaacccgtgattgggtccggggcccaagctgatgaggtccccgatgggcccgaactgttttttgtcacacccttctccattacactaatgctatccaatccccctctcatcgaaggagaagcatcagacgccgctgcgtaccctcgtcgttgaagggcaaaggcaagggcgcgtttggctggcgagaaagaatgtgccatctgaggaggttgaatttgaatcgttggttttgctgcgaaagctattattggctgcagaacgcttcgcagcagctaccaccacctctcaactttctgtgtgtatttgtggggaggcgcaccacccccttctgtcgtcttctcgcagccgtacggacgcgtgggcggacgcgtggg

SEQ ID NO: 2265 - DNA, 2004 bp, Glycine max
aatcattatgaacatatcaaaatattaatttctcaaattattgtaatattctcatttagaacaatagattgggaaagaaagaaaagaaaagaaaaaagtacagcatggtgtatccaaaacaaccaactagtatccaatatggatacatggctaacatgtacatttgaccactgcctttgccctttgagtgttgtttggaaaagaatatgtataattatacattttcactttcaggatgaccattgatcaggtaaggtgagaaagtatgtagtcatggccttccggaaccttttcttgtattgtttaggagaaactatagtgggagcagcattttttggacccccaagtatccctgatgccttcacccatgtctccaaatgcttgtcccatgtgtattgtctcatgaaatcaatgatccccagaaccagttccttgcgctcatcgtcgactccaaccagcaaagaatagtccataacgtcaacagacgccaaaaaggatgtgtcattccatacagctctttccagtattctcttagccctactccctagaaatatgggctttgttctcaatgtttctaacaaattcatgtctagcatcactttgtttgtcccggttgtgtctggattatacctggatctttctgagcccttgagatcatataccctggatatgtttctcttgtaaaagagattctccattaccatcagatctatttttgtttccttgccaccttttgggtatttgacagtgacctgataaataccaagaattttggcaagacaagttggccctcctgagttgagggcatccatcaggtatttgaaatactgaggtgcaaatttttcaaaggactccaattctgtctttgtcacttgtttaataataaacctctcgtccaatgatttagcgaaatatacattacttttccctccttgtgcactccatctccggcaacggctcatggatcgcacaaaatcaacctcattggggcagcatttttttctaagtgattcaaactgctgtgcaaaatagcaagtgacagaaaaattcactttacctccagctcccacagaatcatcgccaaaggaaatttgcaagtgtaaagattttttggagtccctgagaagagaaccaacagaagatggaacttcctcagacccataactaccataattgatataatccaagtccagactaccccatgcagaaaagccggaagcagctaaatcttctttgcttctctcacgagcaatcctactctcttgcatatctgacttaccagacacccaatcttcatattccttggaactaagggcataggatattatgctagagtaatcattgtcatagaccgcaataactctatcaccatgatatgtttgggaaagtagcaatcgagcaccttcagctatgcctgacacagaggaaatgaatgatggtgtggagctcagaatcagatttagtttctgagtctcccatggcaacatttgaaagtaagaccgcaatatgttagagagggggtctctaaccatattcccgtaatctccagaagcatgaaaagatctaagtgtcgataaatgtaaagatgagggcaagatttttcttattctttcctgaactcttactgctgaatcaaaagaatgaactctcactggttgtgacacccttctaaaaggaggactatcatgttgattcggccgctgaatacttccagctgggacggcattagcttgaggttgatcagttccagtccatgcagaatctattctctcagaaagattggactcatttgatgggaaacactcggataatgttctgttaagttcaccatctgaatgtactttctctccctcaagataacatgtaaatgatcccgaagcacaaggttcaagtgtgtcatctggctctgcaagcatatgactctcatgagattcatgcggtcgcgtggggcgactccggttttgctcaagtccacaatcaaaattctgctccttgtgaagtgag

SEQ ID NO: 2266 - DNA, 1013 bp, Glycine max
  misc_feature (3)..(3): n is a, c, g, or t
aancaaggtagtttgtggttcttgctttttaactttttcttgcatccgattatccaaatatattattattttatggttttggtaacagagttagaacaccaatttacacttattgagcaatccaaaatccaaatacacgagatatattaagaacttttcagggcattatattaattgatgatacatattgctacttgtccttcgaagacaccggacagattgcctatgtcctcagcacattagatatgtagaataaaatcttagtactcaagattgcaagagcttctcgatgtctttctcgattttcagaggtgaggtggtaggtgcatatctgtccacaaccttcccttctttgtttactaagaactttgtgaagttccacttgataccatcgccaaatattccccctttcttctcctttaaaaacttgtaaagtggcactgcattcttcccattgacttcaaccttatcaaagataggaaattcagccttgaaccttgtgcaaactacttcctgaatttcttcattgtttcctggttcctgtccagcaaactggttgcacggaaatgccaagatttcaaatccttgattcttgtacttctcgtacaatacattcaattctttgtaatttgtctgtgtcaaaccacattgagaggcgacattcacaatcagtagaaccttcccgctgtaatcattcagactcacatcatttccactgatgtccttgacagtgaaatcgtaaatggagttggaagattgttcagccatgagggaaggagtagatgggtatgtgtgagaatagaagaagaaaaaaagtcaatcacttcataccaatcaatcaacgcaacgtatctgaaactattttataccattatcgcggtgttgcgagatagaaaatgcaggtcacgacgttctcatgtggacacaaattaaattaaattggggggggcgggcctacgtacctgacgtcatcatgctttcaattcttacaccatttcgtctaggaaacggac

SEQ ID NO: 2267 - DNA, 1027 bp, Glycine max
tgttttttttttgttgacttgcttttaacataaagatgcatccaaatatattattattttatggttttggtaacagagtgagaacaccaatttatacttattgagcaatccaaaatccaaatacacgagatacattaagaacttttcagggcatatattaacttatgatacatattgctacttgtccttcgaaggcaccggacagattccctatgtcctcagcacattagatatgtagaatcaaatcttactattcaagattgcaaaagcttctctatgtctttctcgattttcagaggtgaggtggtaggtgcatatctgtccacaaccttcccttctttgtttactaagaactttgtgaagttccacttgataccatcaccaaatattccccctttctgctcctttaaaaacttataaagtggcgctgcattcttcccattgacttcaaccttatcaaagataggaaattcagccttgaaccttgtgcaaacaacttcctgaatttcttcattgtttcctggttcctgtccagcaaactggttgcatggaaatgccaagatttcaaatccttgattcttgtacttctcgtacaatacattcaattctttgtaatttgtctgtgtcaaaccacattgtgaggcgacattcacaatcagtagaaccttcccgctgtaattattcagactcacatcatttccactgatgtccttgactgtgaaatcgtaaatggacttggaagattgctcagccatgagggaaggagtagatgtgtatgtgtgacaatagaagaagaagaaagcaaaagacaacacgaggatagatatgcagttccagaaagtcaaccacttcatatcaatcaatcaacgcgacgtatctgaaactattttgcatcgttcatatcgcggtgttgcaatgtagaaaatgcacgccacgacggttctcatgtgaacgcaaattaaacttgtatatatggttcgctgctcccatcaatcaatcaattcttacgccatttcgtcaaggaaac

SEQ ID NO: 2268 - DNA, 991 bp, Glycine max
atgacgccccctgcccgcgtccggttttttttttttttttgatccataaaattgggttttcattgcaaagcttcattcaaagcaaactggttttcatacgttacaatcattttgaacctagcactctgaggccactacttctaaaagagctcataaatctcattcacatcatcgaacagagattcacaaaaatgatatcataatccatacagcgaattagatgttggatatttaggaattgaaaggtctgcatacctacaaaatgttaagaatccttctcatctggaggatcacgatcaactacagcaagtggatcttctccagtttccgatgggtgctcagatggagggggttgttgctcttcattttcattgttctcagggtggaaattgatggggaactttgtgacccttggtttatcagacaaaatgttcctttgaaccctatcgattaaaacctttggtggaggttcctctctcagctgctcatcatcataatcattgttcacataatagccaacacgaataaattcctgacccagataggagcaggtcaacagaagcacagtgacaccaattatatcttcttcacgaatcttggatggatctggtggatctgcctgtaaaacaaaacgatagtttccaacgttgacaggaccaacaaggacactctctaataattgatcataggtctcatcctcagcagatccaacataaatgagcttccattccaaatcatctttgagagcggtgagacactcgtaggaaatctcgaactgaaagggggtcagaaaggaagcagggttgtccaggacggtgacgttggtgatgttcacagcactcatctcagtattcacaaaacacaaaaaagaagaagaagaagaagtgtgttggcgggagagggttttcaagacaacacaactcgcctccgcccagcaaaatcgcacgcgtgcgtaccgtatgaattaagttggataaatgcatacaaaaat

SEQ ID NO: 2269 - DNA, 1335 bp, Glycine max
  misc_feature (13)..(13): n is a, c, g, or t
ttttttttttttntttttctagatgaagttacttcgtgcttattatcttattaacaaaattaagaagaaagacaatatagcttgacacactttcaagaactctgtgtaatttacatacaaactgcacattccaataccatctttcccattagtgttatcaattgtcattttcaatatagatatgacaaataggttacaataaacctgttaacatctctctcttataacataccagggtacaaggtagaggctgcgaaattagaaacttgattatgatcgaactttagcaagccgggcccttatttcttccatttcttcttcatcatcaacaccctcagctatagcatcttcctgcaaataatattgaattccataattggtgttaagtgtgaggcaagacagagccttgtttataaggaaaatggactaattgcgcgaacctctgcgccaacactttgagcaggtagcttcaccctctctttcctcacagcttcaggaagttgagcagctgtctcaccagctattgcggtcaagactttatcaacttcttcttctatctcatcttctatgtcctcagaatctagcgctgagtcgacggcatcgtttactatctcctcgataactcctgcctttgtcatttctttgctgaactcttgcattgtcaccgccatttcaggagccttcatgagattattgacaagcttcataacctcagcactctttgatagatgtcccacagtacgagcaattgcaacactctctccaaggtgcattgatattgaattcatttgtgctttgttttcataaaggcggttcacagtttgcctagatctcacaagttccttggcaagtgcctttgcagagcccatgtcattcctctttgcagcttctctaatagccttctgcacatttttttcttctctctgtatatcgcgaatttggcgctcaatgttgcgacactcttggcgaagcctgcgctgccaatccctcaatagttgctgcggatttggcttcggcttcagaatgttcatcaccttctccatttccgatgcccgaagccgaaaattgatttttcgagggataggaaagaatgaatgttgcccacaaaaacaattgcttcaaaatttgatctttttggcaaaatctagtgtgctaatagggacgatgtagtgaggaagacggcgtcccgattctgagatgcagcagtggaggtgaggcgcgatgcgattagcttcgtgtcaaatgcgttttatgaaccatttgttcatgttgaaatttaacaaattctttttgttggggggggggggggcctacgtagctgactcgttaaatatt

SEQ ID NO: 2270 - DNA, 1145 bp, Glycine max
aagaagaaagacaatatagcttgacacactgtcaagaactctgtgtaatttacatacaaactgcacattccaataccatctttcccattagtgttatcaattgtcattttcaatatagatatgacaaataggttacaataaacctgttaacatctctctcttataacataccagggtacaaggtagaggctgcgaaattagaaacttgattatgatcgaactttagcaagccgggcccttatttcttccatttcttcttcatcatcaacaccctcagctatagcatcttcctctgcgccaacactttgagcaggtagcttcaccctctctttcctcacagcttcaggaagttgagcagctgtctcaccagctattgcggtcaagactttatcaacttcttcttctatctcatcttctatgtcctcagaatctagcgctgagtcgacggcatcgtttactatctcctcgataactcctgcctttgtcatttctttgctgaactcttgcattgtcaccgccatttcaggagccttcatgagattattgacaagcttcataacctcagcactctttgatagatgtcccacagtacgagcaattgcaacactctctccaaggtgcattgatattgaattcatttgtgctttattttcataaagacggttcaccgttttcctagatctcacaagttccttagcaagtgcctttgcagagcccatgtcattcctctttgcagcttctctaatcgccttctgcacatttttttcttctctctgtatatcgcgaatttggcgctcaatgttgcgacactcttggcgaagcctgcgctgccaatccctcaatagttgctgcggatttggcttcggcttcagaatgttcatcaccttctccatttccgattgatcccaaagccgaaaattgatttttcgaaggatcagaaagaatgaacgttgcccacaaaaacaattgcttcaaaatttgatctttttggcaaaatctatgaaaattagatcccgctgaagaactcggttcatcaactgatcaaagatgagtattcggttctatgaataacacccacgcatcaccgtggcaccatctcactctttttttcccctttcacctcgagccgaattccgagcttacgt

SEQ ID NO: 2271 - DNA, 613 bp, Glycine max
cctggtggcatggcaatgatgccaatgatgttatcagatggaaggattgcatacatagtgcaacagccagggtttcaacagcctgccccagtatcccgacatgggaggagtggtggcagtagctccagtggtgggaaatgcagtaatgatgataatcgcaatcgtgggcatggccgctatcatccctactaacttaatgggctttaaggagctagcaaaacaaggaattgcacctgaggcctaaaagtgttgacgattcaaggcacagcgcccaactgattaagacaaacagggcgctgctgtgaatgcagttatgattttgtaatacatctacctagggccaagattcagttaagcatctaagtcaggttttcgtataattttacttatcttgtccatcaattttttgatctcaaattcttaaagagaccccagtgatctatctgaaggacatgataaatcttactagattgatgaaaaattatgtagaggtgtttcagatgtttagcttgcggttcatgtattcatgtttctaaccgtcgttctagaagaattggaacgatgtttgaatgagtattggtgccagtgcaaaaccaactcctcttgtcgaacc

SEQ ID NO: 2272 - DNA, 1060 bp, Glycine max
  misc_feature (60)..(60): n is a, c, g, or t
agagttgagaactccagcactcgattttattttgaaacatgttatttataccattgtgtnccataaagagagaaagagaaaaagccaaagaagtataaaatgtcagtgtattaatacattatcatatttcagttcagaacacaaccaaaaacatcaatttcgctagctgtaaacacttccttaacaatatgccagaattaactgcaactagtcatattggcagagcatatatagcattgagctagtgggaaggaaaactatcctatcactttccacaatggcaggaaggtttagtttattttcctctcaatgccgttctgtttggctgaaatatcggtcggtatttagcggttggttccaacggtctgaatcatgagagtcaggcacagatcctccatgcatgggcgcaaatgctttctctctcattcttctctctctgtcatactcaaatttatcccgaagaaggttaactttctcccagttatcagattgcctgtttctcccaaaattttggtccttactatgctccatttgagactgaggccttctactcctgtatggggagaaatctccatcatcatcttcagcagactcatagtttgcatgatcctgagcaagctttttagtgtaaccctcatcccaataaagcctctcccagttttctcttagttcattatacagctccatatactttttgcaccaaggatcatgctcggattccttaagaacgaggcgcgttcggcgcatgaactgttctctgagctgcttgcggcgcttgttggggatgttctctcggggaatcacgaagcgctcacgtagcggcacgagatcgccgatctcgtgcacttcgccgtccaccgcccaccactccgaccgctcctccgccctcttcagcgccaccggcggtgacttcggccgcgttcgggcccaccggagctgcccgaggagaaacggcgtcgtcaggggctgaacctgaagccgtttcgcgagagagagcatcgaaacaaaaaataaagtgtatcagtgggttttcttcttcaagtgttgcttcagttcaatt

SEQ ID NO: 2273 - DNA, 990 bp, Glycine max
ccggctcggagtttttttttttttttttttttaaggaaaaactatgatcgtttcaaactacacaaaacgtttttaagatacactcacacgctttggaagcaagcttgttaattatttgagaggacaaaactcccaagacaaattctagcatagaaaatagattgtcctctaaacatgaagaagaatattagctagaaaatttacaaagaaatactatataagaatcacattgtccactccagatccaaactataaagacaagtcttaattgaattagcttaagaaaaccttagaactcactgtcttaactgcaggtggcacgaggaatgctaaagcacaatttggaagagggtgaactagcaccaccaactccttcacaatctcccttgaaatcattacatgatgatccatagcttaagagcttcttcttgccaaacttagccatagggacaactttggaggagcttgaagatgatgagggccatgaagaagggtatgatgatgaggacgagagaatcattttcttgatgaggttcagctttggtagcattgtgagcaagagactggactttgatgagtgcttcttctctttctttttgtagctattgatagtgctaaaatggtaagaaggtggaggagttagaggagggagtgtgtcctctgagaacctgtgttttggggtgccaggctcagattcccacacaaatggcacagcaagggctattctgaaagaagggttggacattgaactttcctttgaaagaagcctgcagaagaacttgtcatcttgcttgatactaaggacactcttctggggtacctcggtttttgtattaaccatctttggttgattggaaccgtactaggttgttgtcactgactgattgaatttgcagagaagaagataggaggagaaggtttaagcttggttttctggttcaagtatgagtggcaattacaaattggggggggcccccgcggcgctctcga

SEQ ID NO: 2274 - DNA, 1228 bp, Glycine max
ccccgtgcaggcacctgcccagtattaattcccgtttcgacgagcttattagtcggcgggcgccctttttttttttttgggttttttttaacatttcaaatgccacttttttattaaataattatttcaccatgccttaaggctcgaagtaacatcaagattcatcaaatgtaaacgttacaaagtttggaactaaactacacaagctatatctaacatattcaatttgtgaaaaggaaatatctgactatacatccatatgtacaaaattttacacaataaatgttttggtactgttaagtattgatacaaggaagaccttttgccatccacaagaaccaccctggcttcaaccgttaggtatcttttttttcttcttgaagtcaagaagcactttttctctctcgagtggagtcgctgatagcaaccatttgctaaaagcaagctctcccatgcccagagactgggcaaggagcctatattgggttctcttcctttcatcaatcaaaggaactttctgttttttaggtatactatctggtttttttctttggtggtccaaatccaaagagatgcttggcttgactaggctatcatctaaggggatgctagtatctattttcccttgaatccctgggccgaagttgacgatgtcttcattgcgatgagtatagacaatgccaaggtctacaagatctggtttacttgttgcatccctcacagatttgttacacaatctggtttctgattccagtactgatgaacttgtttcttcttctgacggatttacttcttccggttgttctgtttcatgcccatgttcttcatgcaattcaatgatctcactggtaaataacttatcagataaatctcgaaataaattggaaatcccaaaaagctctccttgaaattccttgcagtcctggacaccttcaaaatatcgtttttccatcttcccagagacagcaatgtttgagagctgctgcttgtacacctgacgagagtatacaagttcttcaagtgaaccagctgcaagcagacggaacaccacaacatgccgcttctgtccaaaacgaaaggacctgtcctgagcttgtaagtcttgtgcagggttccagttgggatcaaatattacaacacggggggcgcgcccacggtgctgtccaagcccacccgcacgagttgatattaggaatacttgtttgcttggacttgagttgaaatcatc

SEQ ID NO: 2275 - DNA, 2106 bp, Glycine max
attttagcaaatttgtactaccgaaacgtaaattaaaggaaaagaaaaaagaaaaaacaaaagcagagaagaacaaaaaaaaccagaagtttgttttactaaggtccaccatcccctcaaattcaagaaaccgaagctagagaactacgaggaagaggaggaagagcagcaacaactgtaagcacaaacagtcactttcaaacaccaacaactgtgtgtgtctaaactaagagtctgtaattggctggaagtttgatatgatgacaattttcaattcctatccttggaagcccttgataattcataaacatgatggaaaaccttagagtcagataacattgatctttccttgttttggtggatatatggctaatcattctttagttttagataacaacacatctgttagtactgttactgtagcagagcagcctttagtcattgggcaagagtttccagatgtggaaacctgtcgaagaacaatgaaagatattgccattgctatgcattttgatcttcggatagttaagtcagatcgcagtcgatttatagcaaaatgctccaaagaagggtgtccatggcgtgtccatgtagcaaagtgtcccggtgttccaacttttaccgtaagaactctgcatggagagcatacttgtgagggagttcagaaccttcatcatcagcaggcatcagtaggttgggttgcaagatctgttgaagcacgcattcgagataatccacaatacaaaccaagggaaatactgcaagatattcgtgatcagcatggagttgctgtttcttacatgcaagcctggcgggggaaggagcgtagcatggctgcacttcatggaacatttgaagagggttaccgtcttctccctgcttactgtgaacaaataaggaaaaccaaccctggtagcattgcgtctgttgttgccactggacaagaaaattgttttcaacgactgtttatttcttatcgtgcatcaatttatgggtttataaatgcttgtaggccacttttagaacttgacagagcacatcttaaaggaaaatacctaggtacattgctctgtgctgcagctgttgatgccgatgatgctttgtttcctttggctattgctgttgttgactcagaaagtgatgaaaactggatgtggttcatgtcagaattgcggaaacttctaggagtaaacacagacaacatgcctagactgacaatattgtctgaaaggcaaagaggcttggtggaggccgtagaaacacatttccctactgcttcacatggtttctgtctgcgttctgttagtgaaaattttcgtgatacatttaaaaatacaaagttggtaaacatcttttggaatgctgtttatgcgctcactgctgctgaatttgaaagcaagatcaccgagatgatggaaatttcacaagatgtcatatcatggtttcaacaatttcctccctatctttgggccgtggcatactttgacagtgttcgatatggccatttcacacttggggtaacagaattattgtataactgggcccttgaatgtcatgagctccctgtagtacagatgatggaacacatccgccagcagatggtatcgtggtttaatgatcggcaggatatgggcatgaggtggacatcaattcttgtaccatctgctgagaagcgaatcttggaagcaattgctgatgctcattgctatcaagtgctccgggcaaatgaagttgagtttgaaattgtgtcaactgagaggaccaatattgtggatatacggagtcgtgagtgctcctgtcgccgttggcagctgtatggcttaccttgtgcccatgctgctgctgcacttatttcttgtggacacaatgcccacatgtttgctgaaccatgcttcactgtacaaagttacagaatgacttattcacagatgattaaatcctataccagataagagccaggggagagatctgggagaaggagcagaagaggaaggagggtcaagggtttgatataattaatttgccaccaaagacttcgcggccgcctggaagggcttaaaaagaaggtatactagtggagaactttaagcgtcccaaaagagttgt

SEQ ID NO: 2276 - DNA, 1126 bp, Glycine max
aaagttagaagagattatctttatccttttagcctttgggtacccctctgtgtggcagtgcatcttcatctgaagtgagaagctaaactcaagggtcaaaaagagcacaggttagtcatgacatcttcattctcaacgcagttggtgcaaagtcagaacctacctcctcgttttcatcgccatgtccaggggaattttagccaagatgtgtcaaaggtttcaatgacacatgtggtccgtagcagtaccaaatcacagcttggttacggtaaaacgttggcatcaagatctcactatgctgccagattttcagtctcacgacaatctgaagcaaaatcaatcacatataggagaatgacatgtactaatgctaaggaaaatgttctacagctgcaagccaaagtgacaaacaagtgcttctttgatgtagaaattgggggtgaacctgctggcagagttgttttcggcctatttggagaagatgttcctaaaacagttgaaaatttccgggctttatgtacaggagagaaaggatatggctacaaagggtcctacttccatcgtataatacaaaatttcatggttcagggaggggacttcactgaaggaaatggaactggtggaatcagtatctatggtgatagctttgacgatgaaaattttaacttgaagcatgtgggtcctggagttttgagcatggcaaatgcgggtactaataccaatggcagtcaattttttatctgcactgtacagactccatggttagacaatcgccatgttgtgtttggacatgtcattgatggaatggatgtagtgaggacacttgaatcgcaggagacaggcaagtttgataacccgcgggaagccatgcaaaattgctgattctggggagctgcctatagatagttgatctttgcactgaagtgcagtacaattttctgactatcaatcacagtttttggttgagaagggtgttgagggatatggatatctgcaatgttttacatgtttgtattatcattgatactggctgaaggagaaatcgaatgttactactagtgcatttagttaattaccattgttctgagagatacaacacccatattttgtattaccaaactgtacg

SEQ ID NO: 2277 - DNA, 1712 bp, Glycine max
aagaaatgacgcatcgtatccatgcatcatagagtctattgctttcgtatagtgagaaagtgtgaatgctgcctcaactgatcggaatggggatttcctccattcagagtttaacaataaacttgaaaacaacaattttttgaattggaaagaacattttgggctttgtccattcctttcattgctcactccttttatattcaactcaacccaataaaccagtgtaagaaaagtacagaacatacacatctctcggcatctaagtaaagcactcccatcagcgttacataataaaaaaaacacacacacacattgtatgtagctcatttcttggttttatcaagaacttcaatgtatctctttggaactccatattgttcaatcaaatgcctagctaagtcatcgataactcctccttgaaccaaaacctcatgccctttcttacctggtagttctgcaacagtggtactgcaagcaaacttcttctgcagttctgatgccaatgcttcagcatctataagaaaagattccataccagagagtttggttaccttcttgttgccttgccggcgttctgtcaataactgaattgttttaagtgcacctttacaaactacagattcattccctcttgtcacaacatggtgaggctgcatacggctcacaaatgttgatcctaaatccttcttgtgaatttctgtaggatatgttgttccttttttaatagcccccttgaacagtgcatcacataatattacatcaagaaccacaacggatttatttgttggtttcacaagattttctttttcaacatatttgaagacaatatcagtagcttcagaagcactaaaaagtttccccgtgtcagctcctacaggtgaaaatatggaattgacatgtacacttggtttgtagatttcagccacttcaagagttttggatgaacgaatttcattggcagactgaacactgggttgctcacttttctccacttgccttttttcaggcttaaaggatgaataatcagcatgttttcggtttactgaaaatagcattacttcctttttgtgtttatcttctttcactgatatcaagccagaggtggattttgcttgtaaccactttgataactttttgtaggaagattttttgatgtctaaagtgattcctgaaggcctacacggcaatacatggtttgaccatagagtgcttccaggcaagggaaggtctttgtccttcaccgttgtgtgcaaagcttgaagaaggcacttatctaacagggaattaacgtctgcagttgatagagtctgttggtcatctgggtcattagcagaggcagtatcccgtaaattcaaatcagccacgccttcagttacttcagcagcggtatcattttcattaccatttggcatcgtcaatgcagggttagaatcaggttggaactcatttacatctagagattcctccggtccatcaccttttgggttgttgtgctgatcaattgatgtctcaccgacagcctcagtcaaatcagaatcatgagaagcttgtaacaaagaaggatcctcaaagacaacatcttcgaaaaaacctgcattaggcacgcaatgcccctcggcagattcccaaagcaaatcacgatagtaatgagttattctcagcgcctttccacgtaatccagcttttaatggggggggggcctacgtagctga

SEQ ID NO: 2278 - DNA, 1965 bp, Glycine max
gcacgaggagagaactagtctcgagtttttttttttttttttttttttcgttgaatatttgaatcatatttcatttcaaccaaaacagaaaaatcagcttcatgcagaagcaaaggcagcaacagccacccagagatctctatttattaggagcttgatagccatggaactatgaacaaactgaatggcccttcaagcatatcaaagaatggatatgatgtggactatatatatatatatcgatctcttgctcccatggtcaatctcctcttaaaatgttgaaggtccatggggcaagcattatcatatttctctctcacacactctctttcactcctgcttttctcgtgtaaaatgacatttttctctacactgcacaaaactatagaaaaagaaaaagaaaaatagaaaatcttgcagggttgactcatattgccttagtattaatcttcctgagttaggaagaactccactgtcacttttttgccccctagaaagaggcactccacaaagcattctcaccctctccacacctcctatgtacctctttaatcctctcagcagacctgcaaattccactgcagctccaatcaaatgatgcaacacaaatgttccctgcttgggccttccactcacaatcaggaggagtgccacaacaaagtcttcgatcatctatatgctccacatcaagtccaataaaccaggatcctagtgacacatcctcgttggcatacttgtgaagaacattctggttaattgatatgtatgtagccaaatcgtttgaaatggcatacaactgtcctgtggcatgacggaagtatctgtttccagcctctccaaacttccagtactcaggttcatggtaccttacccctttttgggataggacaggcccagatttcatgcatccaatgtatatccgtggttttgatcgatgtctaactagagtttgtcccagtgttgctatatttacatgaacatcatcatcaactttgacatagaaatcagcatcccataagttcacagcagtggcaaagtaggtttttgtctttgctgacaattcaaggtatccttccacatgattcagcctcaagaaatctccatgctttctgtcctctgcttcaatagctctgtctagaataccacctgatgtagcactgtgtccaattacaaagcgcatgataatgcccttctcctctagcttctttcttttctcaccttgtggcatccaagtggctcgaaccgagtcccttcttttcctgctgctgaatgcagtgttaataccaacgaccataaggtactttctcttacccgaagaagattcactcaaccttatatcatctgaaataggagcaccacttcgtagagattcctgagttaccctagcagcagccaattccatctctaagttcgaaatagtcttgtccaatgtttgtatggaattatgactcttgaaaacttcaccataaatgtctttatcgcgcttcatttccatctcttgcaaaattctcgaattgcaaccttcagaaactaaactcaatttttcagcttctgaggctgttggtcgtgctagtcctttgttgttttcaggtatggtccatatcctggtagtgaagagcattccagcacagaaacttcctaagcagagaaacagtacccatctctgcgagatgacgcttctagaaggcaattctcctctgcttttccaagtcataattgtttttattattatcttcaaaattggcacttcaacaggcaaaaacccagatgcaaaactgggtttctaaaagtgaagtggcccttctgagttctgagttctgaagaagaagaggaatatatggggaggagagagaaacagaacagaacagaacagaacagagaagagcagagagatgctctgttttatttgaagttgtaatttgttgttggtgtgctttatggaaattgtatgaatgtgttgaggtg

SEQ ID NO: 2279 - DNA, 962 bp, Glycine max
ttttttttttttttttttcattttttttttttttttttttttttttttttttttgggactagaattcattaaatacgtcaattctattctgtaaggaccatattaaacaaattatcccagtaaaaagaaataacaggatcatcctgcatccaactgctgcttgaaaactgcttccatcacaactaaagaacattcaacatcttgactcagattcaagacttgaccaaaccatagtcatacttatcataaaatgtatactttattcatagtatagattgcaaatgcatctgaaacacaaaatcacagctaccaaagtacatacaacctgattcgagcattggaaagaatgtgtcaactgcagtggccacatgcaaattataaaataactgcaacttatgtcggcccttttttgtgtgaaatgcaactttctcatagacccctgactttcttgatcataatggccttaagtttcctagcaagatcttcagatcgaatcttccgctccaagttcttttgggctaaaacacgcttctcagagtttttgatatggaatctttgctcttgctttatcatcctctcaatcccacttgattgcatcttacgctgcatcaatcccaatgctgcttccaagttcccacctatgaccttcactcttatgcctctgcattgctgaagcttctgcatttgatgatggccattattgaagggttcaggcgtgaaacctgaatgtctgaataatcttgataaacgccttgcaactgagttcatatctaggggagatgaatgtgcttactactattccttttatgagcactcggctcgcgtcgtcggaggaagtcgcgtcgcgttgcggcagatagggcttcaaagtcgaaacagagaaacgacggcgtataggaataagggtcaccttatgaaacctgaagggggggggccttcccgcccccctccggacgcgtggg

SEQ ID NO: 2280 - DNA, 1850 bp, Glycine max
cacacacactattcaactttttctctataaataatactagtaccccttcacccctcccattccatcatcattcaacaaagaaacacccaaaatggcatcctcagcctcgaccacgctgtcttctcccttcctgcgactagaattcccctcctcaaccaaacaacgctcttcaatctccatcagagcctcggtctccgagaaacccccgctaccggctgtgtcggtgacctccccggagcccagcaagcttccgatccgcaaaatccccggcgactgcgggttcccggtgatcggtcccttcaaggaccgccaagactatttctacaagcaagggcgcgacgagttcttcaagtcccgcatccaaaagtaccagtcaacggtcttccgcaccaacatgccccctggccccttcctcgcccccgacccaaacgtcgtcgttctcctcgatgccaaaagtttccccgtcctcttcgacaactctaaggtcgagaaaaaagacgtcttcactggaaccttcatgccttccaccgaactcaccggcggttaccgagtcctttcttacctcgacccctccgaacccaaacacgccctcctcaaacaactcatgttcttcctcctcaaatcacgtcgcgcccacgtcatctctgagttccacgcgtcctacaaagaactcttccacgccctcgaagccaacctcgccgaagccggcaaagccagcttcggcgatgccaacgaccaagccgccttcaactttttatcacgctccctcttcaactccaaccccgccgataccaaactgggcctcgacggcccaaaaatcgttcagaaatgggttctctttcagatcggcccaattctccgattgggcctccctcaattcttagaagaatccaccatccgaaccttccgtctcccgttctctctgataaaaaaagattaccagagactatacgatttcttctacgagtcttccggtctagtattagacgaagcggagcgattggggatcacgcgcgatgaggcttgccataatctgttgttcgccacctgctttaactccttcggcgggatgaagctttttttcccgaacgtgttgaagtggatcggacgcgccggggtgaagctccacgcgcggctggcggaggagattcgctccgccgtgagaagcggcggcggggagatcagcatggcggcgatggagaagatgccgctgatgaaatccgtggtgtacgaggcgttccgaatcgacccgccggtggcgctgcagttcgggagggcgaagagagacttgatcattgagagccacgaccacgcgtttcaggtgaaggaaggggagatgctgttcgggtaccaaccattcgcgacgaaggatcctaggatcttcgagagggccgaggagtttgtcggggacaggttcgtcggggaggaaggggagaagctcctcaagcacgtgctgtggtccaatgggcctgagactgagtctccaacacttgggaacaagcaatgcgccggaaaagacttcgtcaccttggtttcgaggcttttcgttgtggagttctttcttcgctatgattccttcgagattcaagtgggaacttctcccttgggttcttccgttactattacttccctaaagagagcaagcttttagttagttagttaattaattaattaattaattaattaatatttgttattaattttgtttttgaccggttaggatgatgatagtattattattattattatttttttatcatcgagaatgatagtatgtgataatttataagtttattgtatggttacattttacataaaatgtcttgatttgatttgctagttctgaaaaa

SEQ ID NO: 2281 - DNA, 1388 bp, Glycine max
atcatctctctctatatatatagtagcaatagccctctcccttcccatcaaaaatggcatcctcagcctccaccacgctctcctctcccttccttcgactggaattaccctccagaacaaagaaacgatcttcatcaattattcctgttccctccatccgagcctctgtctccgagaaaccaccgctaccggctgtgtcggttacctcccctgagccaagcaagctccccatccgcaaaatccccggcgactgcgggttcccggtgatcggtcccttgaaggaccggcaagactatttctacaagcagggccgcgacgagttcttcaagtcccgcatccaaaagtaccagtcaactgtcttccgtaccaacatgccacctggccccttcctcgcccccaacccaaacgtcgtcgttctcctcgacgcaaaaaccttccccatcctcttcgacaactccaaggtcgacaaaagagatgttttcaccggcaccttcatgccttccacccaactcaccggcggctacagagtcctctcctaccttgacccctccgaacccaaacactccctcctcaaacaactcatgttcttcctcctcaaatcccgacgcgcccacgtcatctctgagttccacgcgtcctacaaagacctcttccacgagctcgaagccaacctcgccgaagctggcaaagccagcttcggcgacgccaacgaccaagccgccttcaacttcttggcacgctccctcttcaactccaaccccgccgacaccaaacttggccgcgacggccctaaaatcgttcagaaatgggtcctatttcagctcggcccaatcctccgcttgggcctccctcaattcttggaagaatcaacaatccggagcttccgcctaccgttctctctgatccaaaaagattaccagagactctacgatttcttctaccagtcttctggttctgtgctagacgaagcggagcgattggggatcacgcgcgatgaggcttgccataatttgttattcgccacgtgcttcaactccttcggcgggatgaagctgttcttcccgaacgtgctgaagtggatcggacgcgccggggtgaagctccacgcgcgcctggcggaggagattcgctccgccgtgagaggcgccggcggggagatcaccatggcggcgatggagaacatgccgctgatgaagtcggtggtgtacgaggcgttccgcatcgacccgccggtgccgttgcagttcgggagggcgaagagggacttgatcatcgagagccacgaccacgcatttcaggtgaaggaaggggaaatgctgttcggataccaaccgtttgcgacgaaggatcctaggatcttcgagagggcccaggagtttgtgggacag

SEQ ID NO: 2282 - DNA, 2696 bp, Glycine max
tcgccgaaattatactgggtaccccaaatcatgcgagaattccttttagcgtcgtctcgctaggtctgtcttcgaaatcaaagacggaggctctgaaataataaaaaccacgcacgcatcgaaagaaagagagagaagaagaagaagaagaaaagaggggtcttcgaagaaaccatgagtatcctctctctctaaactctctcagattcgatcctctcttctcttctttcaattccgcttccctcgcactaaatgacagggtttcctggccctcgccgcgatcacgcttcttcttcctcctcctcgcacaattccaacagcagtggtagcaacgtatttaatttgcttgcaaggagggagatctcaccccgaacaagatatgtggcaaaatggcattggggagaacccggtgaagcttcaaaatcaaagtctattccttattctcgtcctaaaaaagaagttgtgagagatgcaagacgtggtctcctctcatgggttgaggctgagtcattgcggcatttgtctgctaagtattgtcctttggtgcctcctccaaggtctactattgcagcagcatttagcccagatgggaaagttcttgcctccacacatggtgaccacacagtaaagataattgattgtgaaactggaagttgcttaaaggtgttagttggtcataggagaacgccttgggtggttaggttccatccattgcacccacatatacttgctagtgggagcttggatcaagaagttcgtttatgggatgctaacacatcagagtgcataatatctcatcatttctatcgtcccattgcatctattgcttttcatgccaaaggtgaaataattgctgttgcatctggccacaagttgtacatatggcaccacaacaagaaaggtgaagcatcctctccaatatttgtgttgaagacaaagcgctcccttcgtgctgtgcattttcaccctcatgccgcaccatatcttttaactgcagaggtcaatgatcttgattcttcagattcctcaatgacagaggctacatctcttggttatttacaatatcctccgcctgctgtttttgtcacaaatattcatcctacagaacatattaatttgtccagcgaactaccttatgtgtcattacctttctatgtaatgcctgcatataatgttgatgagtcaagagcagaactacagcatgctagtcatgatgttgtctcaggtagcatgcaaattgagtcttctgccatggtacagttgcaagcagacccaagtgcagcagagcattatgagactacagtgtctcccatgggatacattctctgagatgccctctagctctcaaactggtgcagaatatcctgctcatactgctctctctaatggaatgggaattggcctcagtaatctcacaatggatggtatggagaccgatgaaaccagacctgctgaaggaaaccaacatgggaacttgactaatacctattctcttaatggcatgctacatggactgtctaggcaaactgcaaaccgtggggttccctcagagtttggtcaatttcatcagttttttccttcaagagatccaagtggatgggagattccttttctccatggatggataatgggtcaaagccaagttggtgttccttcaatgcttcctcacgtgggtgctagtcgtgacaatctatcccaacagattggttcttcttcttacataatggcatctaatcattccacttctaatgttgatgcagcgatgccatcttcagcaatacctggcagcatcagcataccgggttcttcaatgagatcaggtttacggaatcacttttcacaatcccgtgtacctgtatctgaatctggcaatcttgctgcttctattaataccccacatgatggatttgatatgcaaaccatcgtaagtcgaattcagtcagaacttgccacatcagtggctgcaacagctgcagagttgccttgcactgtgaagttaagagtgtggtcacatgacataaaaaatccctgtgccccacttaatgctgatagatgtcgtctaaccgtaccgcatgctgtcctctgcagtgaaatgggtgctcatttttcaccatgcggtagatttttagctgcctgtgttgcatgtatgcttccccatatagaagcagatccaggattacaaactccagtacaccaagatcctggtgttgcaacatcaccaacccggcatccaatttcagcacaccaagttactttcctgaggagaccatcgttggagtcagtcagtgagcaaggtttagacaaatgattggacatgtaattcaaagatctgcttcacatcactgtacaactcatctgctgtctctgctgatgatctgcacaaacgcaacaccatattatccaatgctgagcccatgcaaccgatggtggtggaacttcactcgcattagcaaaaatgtatatttttgtattatccatgtatgaatatgtactaacattttcctttgttaacatgttttcttattttcccctccaacccctccccctccccctccaacccataagtgggcttctctttcttacatgtgtagcttttagtagttaaagaattttttttttcttagtccctgggaaattttcaaactacacgacatggcattaatcacagcattcggacggcaagcatttcaaaaaaa

SEQ ID NO: 2283 - DNA, 2383 bp, Glycine max
ggctcgagattgtgaaactctcgagccgaatcggctcgaggttggtcataggagaacaccttgggtggttagattccatccattgcatccacatatacttgctagtgggagcttggatcaagaagttcgtttatgggatgctaacacatcagagtgcataatatctcatcatttctaccgtcccattgcatctattgcttttcatgccaaaggtgaaataattgctgttgcatctggccacaagttgtacatatggttccacaacaagaaaggtgaagcatcctcaccaatatttgtgttaaagacaaagcgctcccttcgtgctgtgcattttcaccctcacgctgcaccatatcttttaactgcagaggtcaatgatcttgagtcttcagattcctcaatgacggaggcgacatctcttggttatttacaatatcctccgcctgctgtttttgtcacaaatattcatcctacagaacatattagtttgtccagcgaactaccttatgtgtcattacctttctatgttatgccggcatatactgttgatgagtcaagagcagaactacagcatgctagtcatgatgttggctcaggtagcaattcggctcgagctgctgccatggtacagttacatgcagacccaagtgcagcagcgcattatgagactaccgtgtctcccatggatacattctctgagatgccctctagctctcaaactggtgcagaatatcctgctcatactgctttctctaatggaatgggaattggcctcagtaatctcacaatggatggtatggagactgatgaaaccagacctgctgaaggaagccaacatgggaacttgactaatacctattctcttaatggcatgctacacggactgtcgaggcaaactgcaaaccgtggggttctctcggagtttggtcaatttcatcagttttttccttcaagagacccaagtggatgggagattccttttctccatggatggataatgggtcaaagccaagttggtgttccttcaatgcttcctcacatgggtgctagtcgtgataatctatcccaacacattggttcttcttccataaaggcatctaatccttccacttctaatgttgatgcagcgatgccatcttcagcaatacctggcagcatcagcataccgggttcttcaatgagatcaggtttacggaatcatttttcacagtcccgtgtacctgtatctgaatctggcaatcttgctgcttctattaatgccccacatgatggattcgatatccaaaccattgtaagtcgaattcagtcagaacttgccacatcagtggctgcaacagctgcagagttgccttgtactgtgaagttaagagtatggtcacatgacataaaaaatccctgtgccccacttaatgctgatagatgtcgtctaaccataccacatgctgtcctctgcagtgaaatgggtgctcatttttcaccatgtggtagatttttagctgcctgtgttgcatgtgtgcttcctcatatagaagcagatccaggattacaaactccagtacaccaagatcctggtgttgcaacatcaccaacccggcatccaatttcagcacaccaagttatgtatgagctgcggatatattctctcgaggaggcaacatttggttcggtgcttgcttcacgagcaattagagcagctcattgtctgacttcaattcagttctcgcctacatctgagcacatactacttgcgtatggtcggcgtcatggttctcttcttaaaagtattgttatcgatggagaaacaacattgcctatatatacagtgttagaggtatacaaagtgtcagatatggaacttgttagggtgcttcctagtgcagaagacgaggtcaatgtggcatgctttcatccttttgctgggggaggactagtttatggaacaaaggaaggaaagcttagggtcctccagtatgacggtgctcatgcagtgaatggcactggaccaagttactttcctgaggagaccatcgttggtgtcagtcagtgagcaaggtttagacgaatgattggacatgtaattcaaacatctgcttcacattacttactgtacaactcatatgctgtctctgctgatgatctgcacaaacataaatgctgagcccatgcaaccgatggtggaacttcactcactgcaatagcaaaatgtatatttttgtattatccacgtatgaatatgtactaacattttcctttgttaacatgttttcttatttacccctccccctccaacccataagtgggcttctctttctacatgtgtaacttttagtggttaaagaaaatatttcttttcctttttttcaaaaaaaaaaaaaaaaaaaga

SEQ ID NO: 2284 - DNA, 1078 bp, Glycine max
attctgtagagcggccgtactttttccccctttttctttgttttttcaaacaaaagcactttcaattgccataaccaagttgaatcattgcatttttcatggtaaatgcctaaacgaattctttcatacacaacatgcacacaatctcaataactaagcaaccactacctaccccctacccctatacatcacaaatttgattcattgattcatggaaaccccttttattacaatgattcaaggaaaccagtttttgagagaacagcattcctcacttcgctaagatctctacccttgagggtccttccaacaccttcaaaaactgaaaatgaggatatctgactccttgcaagccttcttgcaataaactcatgagggggtagttttgtatcatattcattctcttcctcttcctcatcatcactataccctccaccataattgacaacaccaacaccatcaccatcaccctcatcattaacagaatgatgatagaaatcatcatagtcctcaccaaaccttgaaacactcttgggggtggtcttgtttggcttgttcctataaatctgtgaccaatcaggaatgttgagaggtgctgattgctgaagaaccttggtttcatgtgaggaactagcactactattgccactactagtccttgggatcatccttgctgcacttgggagagtcctagggacagcttgaggagaaaaagaccctttttcccttgtcttgtgaactccagaaatgttgtaatcaggtttttccttgaaaacagcccaaacttcttcttcttcaaagtctccatctctcaagcaattccatattccactcctctgcctgtttagactatacttgttctccatcaatcacttccttcccttggaatcagaatctccagatgcctgactttatgttgattctagacgtttttgggggcggcgcccctctagctgtttgaaggagtctatcttatgaagcagaagggaaccccacaagagagcttcacaacaacagcaaggccccaaggggtaagaataagacgagacccacttctgcttctgcccgtagagccgaa

SEQ ID NO: 2285 - DNA, 983 bp, Glycine max
cataacatgggtgacatgcagcatcatcatttattcattacatggatatctcaactcatttttcatcttcaggaatgaaccataacactcaaaatttatggacataaaagaatgaaaacattatattttgcaactatttcatctgtacaaatatattcaccaatagaactggagtacttgacagccgcgttctgcaatcacacagcaacggatcaagctgatactcaggctagtcaaagtcatcattttggaatgtatttctcaccaccccattgtcaagttttttggtaggtagatcagcaggaaacaaatgtatagctcctgcattgaattcaaatccacatctggatagtactagctgccagacatatgggataaaaaactcctctgggtgactctcttgttcatatgtgaaatgaagttgagtaaacatcttcatcccatcagcacgccaagaccgacagttcataattatcacttggagcactaaattgacagaccaatcaccattcattctttgggcatccatgcgactattaaaaaaatctaacacagtgtagatgttttcaacaagctcatcgaaacgggggtgattcttgaaaggctgaaagacttcctgcttgtgcattattgcatacaccacctcaggattttgaggcagtacataagtcagaattgcatttataatttctagtacaagcctcaagaagtcagtatatatctgcaactctgctgactgtatcaaaagaatatacatttagaaaaaggaatagtcagaagtctgtaatcaatagaatcacacaagcgcaaaacccttatcacaaaccatatcttctacaaggctacttctttcaattgagttgttttctgcaatattgagcttaccatctctgagatcagctaatttgttatacctaaccataatcaacattagaatcaacattatacaagaaatcacggggggggggggcctacgtagctga

SEQ ID NO: 2286 - DNA, 833 bp, Glycine max
aatcatccaaacacagtataaataaaaaaaccaccttcgtccgatccactccaaacgcaacatccgaacgaaacaatcatggcagcgaacccacccgcgccttcagaatccgacccgaaccaaaacccgggttcggagtcctttccgtacttcgaagacatgaacgaactcgagacagtcttcaaccgcttcgacgccaacggcgacggcaagatctccgccgacgaactcgacagcgtcctccggtcgctcggatccggcgtctctcccgaggacctccgccgcttcatggaagacctcgacaccgaccgtgacggcttcatcagcctcacagagttcgccgccttctgccgctccgacgcctccgccgacggcggatccggcgagttccgcgacgccttcgatctctacgaccgcgacaaaaacggcctcatctccgccgcggagctccacctcgcgctcaaccgcctcggcctcaagtgctccgtcgacgaatgccgcgacatgatcaagtccgtcgacgccgacggtgacggctgcgtcaacttcgaggagttcaagacgatgatgacgacctccaagaatcgtggcggcgccaccaatggctccgtccattagcttcgccgccgatcgaatttctgacgcgtctccggtgactgcttccgtcgtagtacgatctctctcttgcttcttcttcttctctttgtatgattattaatcgttttggtgaatcgctccgctgaaacattttagacattagatcgaattccgaattaagatgatggaaatgaaagttttcttatgcttcgtaaaagtcaaaaaaaaaaaaaaaa

SEQ ID NO: 2287 - DNA, 1905 bp, Glycine max
aggttaagaagcttcttttgcattgaagtgcgtaagctcagtttgtaaggtaaaacagaccattgtttgacaagaacatatacggaaaattaaggcattatcagctgttgaaggctaaaacttgagccaccctcgcagcataaaaacagtatacatgttgatgttggtatggctgtatgtatcttaaaattttactcagacaaagaacttcaacaaaataaataaattaataaataaatgatagaaattttcatacaagcacattttcggtgtattggaagtaacttaagaaaatgggtaacccctatattttcctttcttctcctttggaagtgaaacacttcatcagcttgtcatgaaatgatgaaacaaacaatttgctaaaataatgttgtgaacccattgtatgtacaaggtcagtagttgacagcaaactgccttccttagatccctaaatcattatcatgtagttttcctttcattctgagatacaaaattgagtattccccccgctttccagcatgttgtctccaatccattcactccatataaaaatagggcttgcaaatctctgcagtcttcccccaacacatccatccagctatgtgtcccaagtttgtaagaaccaacacaagcatatgtgcaagataagaaagtaggtttggcttatccaacattgcatgctcctctccccctcttccaaggctgagaatctcatggggctcatacagcttcgctgaaagccccaatatctggccgaagcgctttcaacagtgggagatcacaagaatgaagaaatcaaacagtccatgaatctccctgttatgcagaagggtctgcagataacgaatggttatacgtctctctttcccatggttccagatgagttatgcttcttttgtattccatactgccaggcatctcttgatttgtcacccccatgctcaacatcatctaaagaattctccattgaataccgcaattgacgatggttcccatttctggagctaactggagcacccatattctcatcatcttctgatggtggtcctaaccttgactccatatgcatgtccattgatctatatcttggtccacctgatctcatgcccctcatatttgaggaaggcttaccaggcaatgatgtgtaaacaggtgccttagataccagaaagtccttaggaagagagtccatgtccatgtagcaattccgagattttgcatcattaatcaacgcagcccaatcttcagattgcagcagagcatttgcatttcccatgacccaaagggcccttcgcgcacgcgtaagggcaacattcattcgacgtatatctgcaacaaagccaacaccatgactggatgcacgcacacaagacattataatgacatcccgttcttgaccttggaaggcatctactgtgttgatatatagatccttcccttcttctgaatttaagacttcgtcaaactcacgctggaggcatttcaactgcagcttataaggagtaattatgccaacagtaatctttcctaaacccaaagacttcactgttttctgaacatgctcatacagtcggagacaaaattgtgcttcatgtatgttttgataagacactgatccacctctgtgagactcgcgcccatgtctgatgtcatagaatatatatggtctaagtaaagggtccttgtagtatggctcatcaggcaatttagccacactttcactatcagtaaggcgtccctgatagaagtacctagaagggaaatcccgaatctgggggtgcattctatactgcacagacaaccacattgttgggccatctgcttttttgaaacctttcaaaaagactcctactgtacatcaatgttccagcagccttgcttataactgtagcaggaagctac

SEQ ID NO: 2288 - DNA, 910 bp, Glycine max
ttttttttttttttttttgccaaataagtaattaaaccttttttttttatcagcttcaatacaacaaggttaacatgtaatgttagaagatcccacaaatttcatgcctaattatgatgcaacccagagctcaaaagctcatctaggaagaaaacagtcaattttatacatcaagaaaatattcagatagtaaaccagttctctctacttcgtcacttcaaaagtagctcgaagattggatatcatgactgggcactctcccttctcatcatactcggcgtattctccagttgacaagtcaacattctcaaacttagttccctccaacgactcaactttccatccatcaccgaatacaaaatctactggctcatagcccctgcagtcaaataacatcaatggagcgtacttccctgattcactgatttcctgggttagtggtttacctttgccttcgatcatggtcacagtgccatccctgccacaaaatttgcacttttgaatgagatgagtggtgcccttcccaacggggagaggaacggtgtcgtttaggacgacgcaggtttccttctggctcagttctccgcatcttccgcatttcaacttgaagaggtaagagaagttagggtcgtcgcagccaccttggggttggagattggtgaggttctcaaggtctgcactaatcatcaacatgaagttcaccattttttctctctcttggcgtcaaacgcagtctctctctctctctttctaagacagtagcacttttgctttggggatttggtgctttggattgaaatcaatggatgattccagacggtgtgaggccatatcccccatatatatatatatatatagagagagagagagagagagaaagacacaggaaaagctcaacagcccaagtttt

SEQ ID NO: 2289 - DNA, 784 bp, Glycine max
gcatggaacttggaagctgttttttcctcttcaattccacagggttcaccatgtattgttagaagatcccacaaatttcctggcctaattaatgatgcaccccagagctcaaaaagctcatctaggaagagaccagtcaattttatacatcaagaaaatactcaaccagtaaaccagttctctctactttgtcaccttcaaaagtagctcgaagattggatatcattactgggcactctcccttctcatcatactcggcatattctccacttgacaagtcaacattctcaaacttagttccctccagtgattcaactttccatccatcaccgaatacaaaatctactggctcatagcccctacagtcaaataacatcaatggggcgtacttccctgattcactgatttcctgggtgagtggtttacctttgccttcaatcatggtcacagtgccatccctgccacaaaatttgcacttttgaatgagatgagtggtgctcttgccaacggggagaggaacggtgtcgtttaagacgacgcaggtttctttctggctcagttctccgcatctcccgcatttcaacttgaagaggtaggagaagttggggtcgtcgcagccatcttggggttgcagattcgtgaggttctcaagctctgcagtaatcatcaacatgaagttcaccattttttttttcttctctctctctcaccttagtaacactttagttttgcgaatttggtgctttggattgaaatcaagagaggctgagaataacaaactccg

SEQ ID NO: 2290 - DNA, 894 bp, Glycine max
  misc_feature (19)..(19): n is a, c, g, or t
  misc_feature (59)..(59): n is a, c, g, or t
tcgagtcagctacgtaggncccccccccacattaatactgcagcctttcctgaaaggtntttgtgaaatctcactttctcttaaacaaggaaacagaaaagttgaactgtgttgtgttggtatcttctcggatggaccgttgagacatttttcaagaagtagcaaagctccttctacaatatttgacttggtgctttccttttggatcttacaatgggaaacagtgaggaagagaaatctaccaagactgaaaaaccttcttcacctgtaacagtggatcaagccaatcagaccaaccagaccaatattcatgtctatcctgattgggcagccatgcaggcatattatgggccaagagtcaccatgccaccatactacaactcagctgtggcttctggtcacgctcctcacccgtacatgtgggggccaccacagcctatgatgccaccttatgggcctccttatgcagcaatttatccacatggaggggtttatactcaccctgcagttcctattgggccacatacacatagtcaaggagttccgtcttcacctgctgctgggactcctttgagcatagagacaccacccaaatcatctggaaatactgatcagggtttaatgaagaaattgaaagagtttgatggacttgcaatgtcaattggcaatggccatgctgaaagtgcagagcgtggaggtgaaaacaggctctcacagagtgtggatactgagggttccagtgatggaagtgatggcaacacttcagggatggagaagggaaaactgagatacaaggcagtccaatttccaaagagactgcagcttctaataagatgttgggagttgtccctgccagtgttgcaggaacaatagttggacatgtagtttcttcag

SEQ ID NO: 2291 - DNA, 1926 bp, Glycine max
tctcaacgcgtccgagctctttccctcgttttttaagagagagaaagtagagagagagacacacacaactcccacaattgctttgcctaaccttaatttcaggacacttcgaagctaccaggaccaattgttgttgttcttccctttttgtgctttttgattcagagatttttggttttcgtttttttttttcacaaggagaaagttcggtgtctttaagttgaataacttgttgggacatatttgatttggcgctttttcttttggtgcttgcctcatgggaaacagtgaggaagagaaatctgttaaaactggaagtccttcttcttcacctgcaacaactgagcagaccaaccaacctaatattcacgtctatcctgattgggctgccatgcagtattatgggccaagagtcaacattccaccatacttcaactcagctgtggcttctggtcatgctccacacccatacatgtgggggccgccacagcctatgatgcaaccttatgggccaccttatgcagcattttattcgcatggaggggtttatactcaccctgcagttgctattgggccacactcacatggtcaaggagttccatcttcacctgctgctgggactccttcaagcgtagaatcaccaaccaaattctctggaaatactaatcagggtttagtgaagaaattgaaagggtttgatgagcttgcaatgtcaataggcaattgcaatgctgagagtgctgagcgaggagctgaaaacaggctgtcacagagtgtggatactgagggttccagcgacggaagtgatggcaacactgcaggggctaatcaaacaaaaaggaaaagaagccgagaaggaacaccgatcactgatgcagaagggaaaactgagctacaaaatggtccggcttccaaagagactgcatcttccaaaaagattgtgtcagctaccccagctagtgttgcaggaacattagttggacctgtagtttcttcaggtatggccacagcactggagctgaggaacccttcgactgttcattctaaggcaaattccacaagtgccgcacaaccttgtgcagttgtgcgtaatgaaacttggttacagaatgagcgtgagctgaaacgggagaggagaaaacaatctaaccgtgaatctgctagaaggtccaggctgaggaagcaggccgagactgaagaattggcacgaaaagttgagatgttaactgctgagaatgtgtctctgaagtcagaaataactcgactgactgaaggttctgagcagatgaggatggaaaattctgcattgagggaaaaactgataaatactcaactgggaccaagggaagagataactttgagcagcattgacagcaagagggctgcacctgtaagtacagaaaacttgttatcaagagttaacaattccggagctaatgatagaactgcagagaatgagaatgatatctgcgagaacaaaccaaattctggtgcaaagctgcatcaactactggatacaaatcctagagctaatgctgtagcagctggttgaaaccagtaactgcactggctaattatgtaattttggcatattacaagcccaaaattacagcttggtgctaacagttttcagagggatggatcagctgaattttacaatctaattccatctatatagaccagaactaattctttgcttgtgagtttcttagggcataaactctgtattttactagatttcacagaattgaatgacaactttaaaagtttgtaaattgaagagtattagggatttagtttagactttaagagaggcttgtcggccgctgtataattggttgtgtattaactatattggtgtgatctttctaatggtatcttagtcaaggcattctgacttttggtcaaaaaaaaaaaaaaaaaagc

SEQ ID NO: 2292 - DNA, 2131 bp, Glycine max
  misc_feature (2027)..(2028): n is a, c, g, or t
  misc_feature (2030)..(2030): n is a, c, g, or t
  misc_feature (2091)..(2091): n is a, c, g, or t
  misc_feature (2103)..(2106): n is a, c, g, or t
  misc_feature (2123)..(2123): n is a, c, g, or t
  misc_feature (2127)..(2127): n is a, c, g, or t
acgcgttcgactacgcgtccgctttccctcgttttttaagagagagaaagtagagagagagagaaacacaactgctttgccaaaccttaatttcagggcacttccaagctaacaggaccagttgttgttccctttttgtgttgtttgattcagcgatttctggttttcgttttttttctttctttgttacaaggagagttcgatgtctttaagttgaataacttgttgggacatatttgactcggtgcttttcttttggtgcttgcctcatgggaaacagtgaggatgagaaatctgttaagactggaagcccttcttcttcacctgcaacaactgatcagaccaaccaacctaatattcatgtctatcctgattgggctgccatgcagtattatgggccaagagtcaacattccaccatacttcaactcagctgtggcttcaggtcatgctccacacccatacatgtggggaccaccacagcctatgatgccaccttatgggccaccttatgcagcattttattcgcatggaggggtttatactcaccctgcagttgctattgggccacacttacatggtcaaggagtttcatcttcacctgctgttgggactcattcaagcatagaatcaccaaccaaattatctggaaatactgatcagggtttaatgaagaaatcaaaagggtttgatgggcttgcaatgtcaataggcaattgcaatgctgagagtgctgagcatggagctgagaacaggcagtcacagagtgtggatactgagggttacagcgacggaagtgatggcaacactgcaggggctaatcaaacaaaaaggaaaagatgccgagagggaacactgaccactgatggagaagggaaaactgagctacaaaatggtccggcttccaaagagacttcatcttccaaaaagattgtgtcagctactccagctagtgttgccggaacattagttggacctgtagtttcttcagttatggccacaacactggaactgaggaacccttcgactgttgattctaaggcaaattccacaagtgccccacaaccttgtgcaattgtgcctaatgaaacttgcttacagaatgagcgtgagctgaaacgggagaggagaaaacaatctaaccgtgaatctgctagaaggtccaggctgaggaagcaggccgagactgaagaattggcacgaaaagttgatatgttaactgctgagaatgtgtccctgaagtcagaaataattcaactgactgaaggttctgagcagatgaggatggaaaattctgcattgagggaaaaactgagaaatactcaactgggacaaagggaagagataattttgagtagcatcgagagtaagagggctgcacctgtaagtacagaaaacttgttatcaagagttaataattctagttctaatgacagaactacagagaatgagaatgatttctgtgagaacaaaccaaattctggtgcaaagctgcatcaactattggatacaaatcctagagcagatgctgtggcagctggttgaaaccagtaactgcactggctgattatgcaattttggcatattacaagcccaaaattacagcttggtgctaacagttttcagagggatggatcagctgaattttacaatctaaatccatctatgtagaccagaactaattctttgcttgtcagtttcttaggacataaactctgtattttactagatttcacacaattggatgacaactttaaaagtttgtaaatcgaagagtattagggatttagtttagacttttaagagagggttgtctgccgctgtataattggttatgcattaactatattggtgtgaactttctaatgggatcttagtcaaggtattctgactttttgttagttttggttttgtatactttaaagcaattcctcatgttgtggctgtggttgccttttaccatgtgtttgttaccacttagtgtgcatttggattgaattaattttagaaatgttaatctgaatgatnnanaaaaaaaaaaaaaaaaaaaaaaaaaaaaaaaaaaaaaaaaaaaaaaaaaaaaaaaaaaaanaaaaaaaaaaannnnaaaaaaaaaaaaaaaanaaanaaaa

SEQ ID NO: 2293 - DNA, 672 bp, Glycine max
tttcacacaagtagctgctataattctgaaaaaggtattatgaagtctaactattacaacgatatgtttcacaaggctagataattgacatgatatcataccaaagttcaatggagttgagtgacaagattagtattcttgctgtaatataatctagcatattattaattaccattttccataaaaaaaaataaaaaaaaaccaaaattcctatctgcaaaacaatatatgtgatgctatgataaatcaaagccgtgacaaaacctattgcgctctccatgtcaggacatctgaaattcaagcaacggtgaggggttgctgcttggaaggttggaggcccttgtttcgtcgattttgatcggaatcggcgaggaaatcttcgaggttgtagatgacggtgatgtagagagagcagctagggcatcgagcgatttcttcgccgagcataaggtcttccttcgtgatctggaacaggtccccgcacgggcacgggtacgtgtaggcctgcaactcctcgttccactccatatcctcgatctccacatcgtcgtacgacatcgtttcgccctctcactctctctctctctctgcgttttgcaatttaaaccctataatcttgagaatttctcactactctgcacttccctcaaaacgacaaaacctaactaacat

SEQ ID NO: 2294 - DNA, 1617 bp, Glycine max
  misc_feature (1546)..(1546): n is a, c, g, or t
ctctaacctaccctttccaaaagaaagagcaaactcatttaagaaaaactagaacagaaaaagaaacaccaacacctgactcttgtacacttttgatgagtattattatagagtccatattggtgagaactgagaagccacacaactcatcatcccacattccctctccctcttgtggcaagcttctaaaagaccaattccaatggaagtttcatgcaagattctcagaagatcaactcacagttttctgcaaaactatcattacttcacctcaacagcagctttcttagcttttcctttctcagcttcaatactcctctctcaagcattagtcccttctccttcatccctcttgcctcaaatctatagccgactaaggactctctttgatgctgcaggcttcccttcttcacaattgtttaccattctcaacctcaaagtttctcaaacaatcacttcttcaatcctcgcccttcctttcaccctcacctttctcctcattgcaaaagcatccataatccaggctctcaatcaccacaaaccaacttttccaccatccttcaaatcaatactatccctttacaagcctctcctccacacctatttttgcaactgtttcttgattctctcagcaaatgcaagtgcttttggtctcatgttttcggccttcagcttcattgaaagacttggctactcttcctcccctagtggcctcatcctcttcatgtcagtaactggggcaattctcttttctgtgattcttgccaatgctattgtcatatgcaacatggcactggctctatctggcatggagggacatggtggatacttggcaattctgaaagcatgtcttctcctaaggggaaggacttcaatggctttgttcctggcacttcctgtcaatgtggccttggctgccattgaggccttgttccaattcagggttgtgaggccctatcatattgctggaataacaaggccttgtgtggctttggaggggattttcattgcttacctctactcaattttcatcatccttgacacggttgtgagctgcatgttctacaaaagccttaagacaggaccactgatcggtcatgaggacaaacatttgttcaggattgaattcccagatgaagacaagtacggttacatgggcaccaaggaacttccttgagtaacattgaggtggaaaagttattaatttggtcaaggcttttctcatatttcatgaaggagaaggagctgcctgttattttatacgagtatagaaggaatttacaaaattcattcatgttgcttgaaggaaatcgagcaactttgaagacataaaaggttttcaaatgagcaacctcagctcagctatgtgcaaagccaaagaagctagagattagtacaccatttgatataaatgcaattctgttatattcttagactccatcttttgtttttgtctattttgctttgtagattagcaaatggcaatattttacagtgtggataatacaaatgctttcctttaattgccttcttctctgtgtgcaanttctcactgattttctaccgtttttcatcgaatgaaaaatcaacaatgattcgcgaaaaaaaaaaaaaaaa

SEQ ID NO: 2295 - DNA, 3323 bp, Glycine max
ggctcgagctttgccgcgcgtttggtatgtctggaattccttgacataagttacaactatttggatgatgctggcattctatcttgtttggatgggctttcatctcttaagtctctatatttaatagataactggttgaatatatcttcattccacggagaggctagcaacatttgtctttttttattttaaaatgatgtcatcaacctcttctaatttttggtattgtttttccacaatttgttggcttcttccacaacacatgtgcatatatacctatataagtttttgaaactctatcttcaaagttgcgtaatctggagctccttgacataagtttcaactatttgactaatgacatcctgccaaccctcgggggatttacatctttgaaagagctgtatttggttggaattcatttggactcagatcttcatttccaagagaacgatggatttacgtggccaaccggtttacaagcccttgatctggtgggaaacagattaaataacaagtttcttccatcattaaatgggttagaaagtctcaaacatctttatttaggcttcaatcagttagaaggatcgctgaatataggcggattatcaggtttgactagcttggagattcttgatctaagttataataatattagtgattttgtggtccatcaaggcttaaaaagtctacgcagattggatgctctttatttagatgggaatatgatagatggaagcaagttaagaaagtcgttgcgagctttttcatctgttaggatgctttcaatgagagaaaatgaatttaaaggaacaattgttgttggagattttctggatttaagtaacctagaagatttgacaatggacctcagtaataacatggagaatgagtttctcaaaagtattgagaaattgacatctttaaaagttctgtctctttatgattgtaatataaatggcacccttcctcctgcggattggtctaagttaaagaagttggagttgttagatctatccggcaacaaatttgagggaccacttccttcgtcttttgttaacatgacgtctctcttggaattggaaatttctgataatcacttcattggaaatttcggttctaacattgcaagccttacatcacttgaatattttggttttacagaaaaccaatttgaagttcctgtctctttcacaccatttgccaatctttcaaagatcaagttcatctatggtgaaggaaacaaaatcttattggactcacaaaatagtttgccaacttggattccaaaatttcagttacaagtgcttagtgtgtcttcaacaactaaaactaaatctcttccgctccccaattttctcctttaccaaaacagtttaaccacactagatttcagtagttggcagctgcgtaggccctccccccatgggttgtgggaaaacaacacaaaaatgacccatgttctgtttagaaattgctctttcactggtactttccagctacccatgcgtccccttcctaacatatgggaaattgatgtttctgacaatatcatagttggccaaatccctagcaacaatttcagttcaatttatccaaatttgcattttcttaacttgtctagaaacaacatccaaggttcaatccctcatgagttaggccaaatgaactcattatattcattggatctttctggcaatcaattgtctggagagataccaaaggacatatttggagttggtcaccaactcaggttcttgaaactatcaaacaataagcttgagggacctattttgaatatccctaatggtttggagaccttgttattgaaccataatagatttaccggtagactcccaagcaacatttttaacgcatccatcatttcattggatgtaagcaataatcatttggtgggaaagattccaagccttataaaaaacttgtcaggattgaacgaactttgtttgtctaataaccattttgaaggatccattccattagaacttggagaacttgaatatctaacttctttagatctctcccaaaataattttattggtcttgttccatcatttgcaaattcttccgtggcatttatccatttgaacaacaatcgtttgagtggattgcccaaaagaatgttccatggaaaatcttctttagtgatgttagaccttagctacaatgaaatatctaacaaccttcaagatctgatacataaccttagttataaaaggttaaattttctccttttaaaaggtaatcactttatgggggatataccaaagcagatatgccagttgatagatttaaacatgctagacctttctcataacaatttttctggtgttatccccaaatgcttaggtaaaatgccttttgagaataagtacctgaagagcttgttagcaagattttctacctttgatccagatcccaataaccttgcccaatctccggaccttgcccaatctccaacaccggtatcgggaccaactctaaatttgcaagagaaagcaaatttcactacaaaggaaagaactgacacttacatcgggagagtccttttttatatgtctggaattgacttatctcacaataaactgaagggaaatatcccatttgagcttggatacttgacaaaaattcgagcattgaacttatcccacaatgatttaactgggaaaattccagttacattctccttgttggcacaaacagagagtttggatctttcttttaacatgttaaacagtcaaattcctcctcaactgagcatgttaacatcacttgaagtatttagtgtggcacacaataacttatcaggtccaacacctgattttaaaggacaattttccacatttgatgaaagcagctatgagggtaatccgttcctttgtggtcctccactgccaaagagttgcaatcctccacctactattataccaaatgactcaaacactgatggagacaatgatagtttgttggatatgtatgttttctgtgtgagctttgccgtgtcatacatatcaacattgttggtaactgcagcagctttatacatcaatccttactggaggcaggcatggttttactacatggaattggtgagcatgaattgctactactttatcaaggataatctgagcaaggttttcaaaattggaaatatgtaatatatcaagttgtatgtctagaatgatttccatgtgtttttgctaagtttgatagaataaaggttatgtataagttgtatgaaaataatatgcttcgtatatgccattcatactatgttaattattggagggggtagtaaagttata

SEQ ID NO: 2296 - DNA, 786 bp, Glycine max
  misc_feature (5)..(5): n is a, c, g, or t
  misc_feature (7)..(7): n is a, c, g, or t
  misc_feature (9)..(9): n is a, c, g, or t
  misc_feature (12)..(12): n is a, c, g, or t
  misc_feature (26)..(26): n is a, c, g, or t
  misc_feature (30)..(30): n is a, c, g, or t
  misc_feature (32)..(32): n is a, c, g, or t
  misc_feature (35)..(35): n is a, c, g, or t
  misc_feature (49)..(49): n is a, c, g, or t
  misc_feature (52)..(52): n is a, c, g, or t
  misc_feature (86)..(86): n is a, c, g, or t
  misc_feature (112)..(112): n is a, c, g, or t
  misc_feature (130)..(130): n is a, c, g, or t
  misc_feature (149)..(150): n is a, c, g, or t
  misc_feature (152)..(153): n is a, c, g, or t
  misc_feature (184)..(184): n is a, c, g, or t
  misc_feature (192)..(192): n is a, c, g, or t
  misc_feature (194)..(194): n is a, c, g, or t
  misc_feature (197)..(197): n is a, c, g, or t
  misc_feature (228)..(228): n is a, c, g, or t
  misc_feature (232)..(232): n is a, c, g, or t
gcccncncnatntaatggggggggcncccncnttngccccccgggtttnccnttttaggttccggtttgtatgttgggggaattgnagggaaaccattttcccccaggaccnggtatgcccatgtttccnccaggctggaaattacccnncnntaaaggaacaaaaggtggagtcccccccggngcggccgntntanaaatagtggtccccccgggcggcaggaattntttntttttttttttttttttttttttttttttttttttttttttttttttttttttttttttttagaggacaaactgattatgagaattttattcgctggatacaggtgtggccactaaatggacgtgaccgataagcagtagtacacatggttcagtgaaattaagcatacatgacatatattatagtaatgacacacaattatacatctttaaaagtattttttttatcacaaaattaaagaaggatgctaacatctcaaatattcagccatagagtgggtgttttggtggtggggtatatcctctaggagcggccattggatggggtatttccacgaacagggacggcggcgctgccgcattggaaaagttttcggccgagttgaagaataagactaggttgggcagcacttgcaagctcaggagagatgagtagtaaaagtattgcaaaaagagcagcaaatgagatccatttggccattgctaaaatgcaagtttgagaggatggaactatattagttgtagatgacccctgggtcaagatccatcttttag

SEQ ID NO: 2297 - DNA, 821 bp, Glycine max
tcgtttttttgtttctaaaattcaaagtagtgtaatttcatttccaaactaatggtgatttcatttcactagctaccctgtttcagattctacagtaccatgtcaccccatacacaagattcatcagacattacaatgaggcaaacaaacaatgaaacgcaacatttccctcaccaagttgcgccgttttgacaagtcattggttttgaagaacctccgcttcagccttggccataggatcatccttgatctcaatttcctcttccttctctccctctcgctgctctgccacttgcttccggtgcaagtcttctgccgcctccatcgccgcacgattctccttctcaatccgtttcatctcttcctcctgctgctgccgctcaaaccaggtatccgcatccgcccaaacgggctgggcggcccagccctgctcccctcccttgatgcgttcggggagggcgtagttgacggtgaggacgcggccgtagagctcggcgccgtccatgttgtccatggcggcggaggcatcttcccgttcgaggaaggtgacgaagccgaaggagcggtgcttctgcgaggcctggtccagcggcgtcttcacgtccttgatgtcgccgaagggaatgaacgccgcgtggaggatcaactcgttcacttcttccgctaagcctcccacgtatagcgtgttcttctgcacaccttgcatcatcgccattgctacactgagttcaaacgagttgaaactcggactgaggtggaaaaaggtactagttgaaagagttgaaacatttgaaattaaacctgtgttttctgtttggact

SEQ ID NO: 2298 - DNA, 1448 bp, Glycine max
atggccctccaaagacttagcatcacactccttttggttctattcatgagtctccattctcaagctagtgttgagtcttctaattggaaatatgcaccaaacattggaagtgttagagctgcgtattggcctgcgggtgatgacctttcaccctcttccattgacacaaaatacttcactcatatctactatgcctttatccaacaagaccctcaactttttcaccttagtgtcaccgaatttgatgaaaaatggataccaaaattcatcaatggactccgctaccgttacccgccggtgaaaactctcttgtcgattggaggaggtggtagcaactcaaccgcattctccctcatggctagcaacaaacacacacgacaagtgttcataaactccaccatccacgtggcgcgccaatacgggttcaatggtctcgatttagattgggagttcccagatgatgaacacgatatgtcgaaccttggtgttttgtttcaagagtggcaccaagctttggtggtggaagcaaaaataagtagaaaaccgcggttgcttttgacagccgcagtttactatgcttccaccatcaaactcatcggtgatggaccaagatcatatccagcccaagccattcggaactacttggattgggcaagtcctatgtgctttgattaccatgggacttgggacaattttacaggctttaatgcagcattatatgatccaaagtccaacataagtacccaatatgggatcggatcttggatcgaatcgggtgtgcccacccaaaagttggttatgggtttaccgttatatggtcgggcatgggcgctccgagacccgaacgttaatggggttgaggcagaagcagttgggaaagccacggatacagatggtactatggactatgatgaaattttggtgtttaacaaagagaatggtgccactgtggtgtatgatgatgtagctgtggctttctactcttatgcgggtacaacttggattgggtacgatgatgggccatccataaagaaaaaggttcagtttgcaaggtttacgggcttgaagggctatttcttttgggctgttgggaaggataaggattggaccatctcaagacaagcttcaaatgcatggagacactgacggctagctacgccgagttatttttattcatattgttgttcgacttgctaggattttacgtaagtcagaatttcatgtaatcctcaagccttaattgatgatacagaatcctcatattcggagttgtggtgccacaacataaataggactgtaacatacttgaatactttgattatgtaccaataatgaataaaaaaaaaatatttcgaattccacaagatgattatatatatatatatatatatataaccaaattaatgatattatgcatgagtcgttaagagtgcatttgattcccaagt

SEQ ID NO: 2299 - DNA, 710 bp, Glycine max
ttttttttttttttttaggtaacaataatgaccattttctgtaattgaagcaggggaaggcaaaattcacaactttataacgtatctctaaacacaggtgagatccgatttttacaaggtaaatccaaagctggaaacataaattaaataaaagaagaagaagaagaaagagggaagctaatcatacttctccctccaagagtaaacaaggaagaaaacccacgaaagggccaagagaaaatcgccaacagtctggcggagccaatccaaggcgagatcctcgaccttgcgttcgaagtagaccctccacatggccatgaagaggtggagaagcgtgcaacccttggcgaagaagacctgaaagtcacgatctttaacaaacgacaccatgaagaggaggaagccaatggcgacgaggagcaagccggagaaggaatcggaggtcttgatgagaagctggtcgtgcggcgtggatcccaagagcttggtggcggcctgcacaccgtggccgaaggtgtagacctccttcatgtagaacatcatcagggccccacatgtcattgctatcaccgagtgcaggatgcagatcaccataaatgccgacgatgccattctccttctcatttcatctctaaaaccctaataaccccatcatcttgccttctgctttctggatacacaaaacaaaaaccaccccatcctaaaatctc

SEQ ID NO: 2300 - DNA, 776 bp, Glycine max
  misc_feature (776)..(776): n is a, c, g, or t
ataatctggtaagattattgaccattttctgtaattgaagcagggaaggcaaaattgacaagtttataacgtatctctaaccacagatttgataagaaagaaagccaggtgagatccgatttttacaaggtaaatccaaagctggaaacgtaaataaaaaaataaaaaagaaagagggaagctaatcatacttctccctccaagagtaaacaaggaagaaaacccacgaaagggccaagagaaaatcgccaacagtctggcggagccaatcccaagcgagatcctcaaccttgcgttcaaagtagaccctccacatcgccatgaagaggtggaggagcgtgcaacccttggcgaagaagacctgaaagtcacgatctttaacaaaagagaccatgaagaggaggaacccaattgcgacaaggagcaagccggagaaggaatcggaggtcttgatgagaagctggtcgtgcggcgtggatcccaagagcttggtggcggcctgcactccgtggccgaaggtgtagacctccttcatgtagaacatcatcagccccccacatgtcactgctattaacgagtgcaggatgcagatcaccagaaatgccgatgacgatgatgccattcgacttctcatttcatcatctctaaaaccctaataacctcatcatgcctttgctttgcttctggatgcacccacccatcctaaattttctttaacccgggacacccatcctaaaatttcctccccttctgtcgtcttctcgcagccgttcatn

SEQ ID NO: 2301 - DNA, 1091 bp, Glycine max
  misc_feature (1)..(1): n is a, c, g, or t
  misc_feature (923)..(923): n is a, c, g, or t
  misc_feature (980)..(980): n is a, c, g, or t
  misc_feature (994)..(994): n is a, c, g, or t
  misc_feature (1004)..(1004): n is a, c, g, or t
  misc_feature (1017)..(1017): n is a, c, g, or t
  misc_feature (1055)..(1055): n is a, c, g, or t
ngacgcatctagattcttcgacgtggtgtgaatatgcgttagcgcacacgtcaatctccccgtcttaattgacctttcctcaatctttcactcttttgtgtcaggtcaaatatgcaacctcaatttagccagattaacatctctgttacatggaggggaaagaaatttgttgtcgagatgaatataggagccaatgtgaaggatctagggcaggaattgcaaaagttaacaaatatcaaagaagataccatgcggttcattgttccacagatttctgccagaacgtcaaaacttctggcccccttttccaaggaacatgcacttttaagtctgcaggaaacttcaattaccgaggccaggtcaattataatgatgggtgtaccaacaaatgaggttgaagaggttttacaaaatgcaaaaacagatttaagaatagctggatttgaggacgaggagaagagacagaaacagagaatttcccatggacctcatatttcattgaaacttccacaagggcagtatatattttgtgattttcgtacacttcaaattccaggaatagagctgaatcctcccccttccgaagcacttaaaagaatgcacatgcttgctgcagatcctggaattgttgctgtcatgaacaagcatcgttggcatgtaggaattatgactgagatggctcccattggttatgttggtgtgagcccaaaatgcattcttggttttaacaagaatcacggagaggaaatatcattgcgccttcgaactgatgacctcaaaggttttaggaaatatgaaagtatcaagaaaactctactgcatgaacttgcacacatgatatactctgaacatgatgtgaacttttatgctctgtataagcagttaaatcaagaagcgtctagtttagattggactagatctgnaagccacactctcagcggagtaaggaatactgcggatctatgaagacaaactttatngcagagactagcantaatcctcanaagcttggaggtnacaggacagatcagctaataaagtgcacgtgaatcttntgttgctgctgcttactatacggctgactaatgttt

SEQ ID NO: 2302 - DNA, 1024 bp, Glycine max
  misc_feature (3)..(4): n is a, c, g, or t
atnntatttttgttttttctttcaagttttctacaaccatattttctttctcgtcaagcggtatacttctttaatctaaacatttacaaggaaaacatccgttagtaattgaacaagttaaaatagtgacaaagtaaaagccaaataaggctaacgaacaattttaacttccaaactgtaaaattaaaggagcaacagtccatgcttgtatagctgtcacgggatgagcagaagaacattctccatactgatatctaataggtaggttcatcatccccgtcatctacatcattataatcatcttcatcgtcatcaaaatctatattctgattataatcatcatcactaatatcttcttcatcctcctcttgtgcattttcatcctcgtctccatcttctccatctttcttttcattttcatcattttcctctttgccctggtttgttttctcttgttgttcaaagaaatcaagtttcttcatctctgactctgggttccatcgaaacttttttcttctcgacgcacgcttagatgcaccttgaactaactcctgagggaaatcattgaacattaaaacttgtgagagagagtcacgagtgaaatcgttcttcttcctgtcagagaatttagctatgtgcatactttgcctcttcttggaggttttgtcctcgagaaaataaggagaggcttcccaataattttgaaggtgactatcccaacgaagcaactttttggtatcatcatgaatatcatcaaggttaacatcaggcaaagtaacagcctcaggaaaaagatcaaatggaacttgagaggcaaatgtattaaatccacctcctcgtccccatccccatcctccccgtccccgccctctgcctgacatctccactcaagtttggtctttgttctttggagggttggggctttagccccttgcacccgaaaataaataaatctcaaatatagttaaaagtttaattaggtttttcaaatgttccgtaaaacaaacacggtagtaatttaata

SEQ ID NO: 2303 - DNA, 1878 bp, Glycine max
attatgatggttttttttttttttgtttgatggttgagaaaattaagtttaacgaacttgtttacagtagagttgccattaaacatcaatcctaacagctagcattacacaaattaaacttgtgcatgcagaatgaaagtactcattagaatgagtagacctatttagtccagcttctctccttccttatgaaaatatatacatcttatatcaaggaagagtgacatgacaggactagttgtccgcaacggggatagagaagtcatgatcatgcattcattcacaagctggttttgtgtcaaagctgctcaagcatattgcaaaggcttggaaagctgagagggggtatcggtaatccatggtgaatatgtccttcccaatttttccaaattgtagtatcactttttcttgttctgcagctgaaacattttggcatggttcagcagctgctacaagctggaagttcttcacagaggccactgtaacccttcccttgaaattcaagcaccaacattgcagttgttcgtgccatctaggagctttgtttttcaaaaccaatggttcccttgcccgctggattgattctggagtattggcagtgccagttgagtcaaactcaacaacttctggtttctttccttttgagtctggtgtggtggtagatgcatgctcggtggtggtagacgcatgatcattaagataattggtggtaaacttcaaaggagtaggggcgttccctccttcttggattgcaaatatggggattaagtgcatcatacaccgcattcgccttggacctcttgttcggaggacattgagttcataagatactgtggccactttgtagttagcagcagcagcaaccttgttaggaagtacctgcttcagatggactctttgctgcaacttgcaattcagtggaagtgaagtttcatgcgcgggctcgccatccaagattgtgaacttggtgcccagaaaattagacctcagctttccaacgtaagtgttgctagcccaagagaaatcatcggaaaccaatgatattataaattctgtacatgttgcccttctaatcttctttgctgccagtaaaagtttgctcatatcaccagaaagagcagggctcagaccgagatataaacaatatgttgaagtcattctttctctcctaataaaacactggattggagagtctcttggaccaggctgctttagtgatatggggaaagtgataaaaccacactgttctggtgtcttgaccacatcctttgttatctctctccacaacttacaaactgaggcacatgccacaagtgctctacgtgcaggccaagaagtttcactggcttccaacctttgaattatgtctaatagcaactcgggtggcaaattagcccaccggctctgccatgatgaagatgaagaagaagaagaagatgatgatggtggtggtggtaaggaacattctggtgcaatgtgagattttccatggcgatgcacatgcttggcttctccacctcttctatacatgttgctaatgccctctccaatctccttgagctcacgcacaatgctcctgaatggcattatgataggtgtagtactatcacagccatattatgtttgaaaagaaaaaggggggggggcctacgtagctgagtgaaagtaccacaatagtagtcccatcttcgcatgagttatgtggatttatttattgatgacaaaagtggtgacacgtgaagctatggagtattaattaattactcccattgatggaatgagacacatatgttatgacgcagtgttgggaggtaatttaacttaaagacaagttgggttcaagattcaaaccctgatccaaaaaaaccggacgcgtgg

SEQ ID NO: 2304 - DNA, 2554 bp, Glycine max
  misc_feature (549)..(549): n is a, c, g, or t
atcctaccttcagaaactagccagattgttaaggaacggcttttgaattttgtaagatcattatcaacagtactggcctttgcctattgtttgtcaagtgtaattcaacaagtgcagaaattcttagccgagagtactgatgcaagtgaggcgagaaatgtctgtatcttttctttttgaataggcaactgatattatagtctgatgaagtttaaacatgataaatatattgtcaattccatttatgtttttacctgctggctgtcataaatttaattgctattattatgactccattgaaacttgatttttcaatcagtcagccagtaacattagttggcaatatagttgcccagctatataatgatgcaaaattgttcagcttttggatttagcatttctccctatcaatttgttttacacattctgaagattatcaatgtgctaaacttctatctacagaagaacatgtagaactgagaactgttgaatatatgatggctatatctttttctatgtacataggctgaaacaattcatttatgggtngtgcatgtttttagatgatatatcatttatggaataccagtagcttggcaacctgcaatgccattggaagataattgtaaaaaattggatttgggcgtattgttttgttattagttatggttcaatttcaatgacatagtaaattgtctgtttttgttagatgggattccaatttgctggcaaagctgtttactctgcggtatggatagctgccttttcactgtttatggaattgctgggcttctctacccagaaatgggttactgcaggaggtcttgggacagttttgttgacccttgctggtcgtgagatatttacaaacttcctttcaagtgtgatgattcatgcaacccgaccttttgtggttaatgaatggattcaaacaaagattgaaggatatgaggtttctggtacagtcgagcatgttggctggtggtcaccaacaattattagaggtgaagatcgtgaagctgttcacattccaaaccacaaatttacagtgaatgttgtgcggaaccttagtcaaaaaacacattggcgaatcaaaacccatctagcaattagtcatttggatgtaaataagattaataacattgttgccgacatgaggaaagtattagccaaaaatcctcaagttgagcagcagaggttgcacaggagagtgtttttggacaacataaatcctgaaaatcaggcacttttgattctggtgtcttgttttgttaagacctcacattttgaagaatatctgtgtgttaaggaagctatactgttagatcttcttagagttattggccatcaccgagcccgacttgccacaccggtccgtaccctgcagaaaatatacagtgatgctgacttggagaacataccatttgcagattcgacatttggtcatggtgctgggacagtacctcaccgtccattattagtgattgaaccatcttacaagatcaatggagatgataagaaaagtcgagctgcacggccagctgttgatcaagataacaagacagctacgcaaaccaaagttgacaccaagacacacaacgtggctagaggaacccaggatgacactgagggggataacaaagttttgacacctaactctgatgcaaatggaaactctaagacagttgtgacacccaaacctgatcctgaagtgggtgaaaacaagccattgaaatcagattcaaacaaggagaacgtggaggtgccagaatctccttctaaatccaaagttactggtttggtagtggataattcagcccagaaggacgtagatgtcaaacaatccaaggttcagatcactaaaaacataaagccaaatattgactctgacaatgtagtgtcctcctcaactaacaatgctgacaaaattggtggatttaatacgaatatgccaatgaaacagcaaggggaaaagaaacctgctgcacaggctcatgcatccaggactgttctggaagagaatatagttctaggtgttgcattggagggatcaaagagaacacttcccattgatgaggagattgacaatgtgacatgtcgagaggcaaaggaaatggctgctttgcagggtggaaatggatctccaaaggcttcagatggaaatgacaagtagttattaaagcagtgagttcaacttgtttgaaagctcaatgttccaagtccagtagtacactgctttgaaccagtttcccacccctaggaagttgtatatattatcacttcatgtgtcacacaccccttttacaaaggactcgagctgtattgtcatatcatttcattatttttgctgtttcagcaatatatggagaagggctttctccaatttttcgattataaaaaaaaaaaagtttactgtggacctttattttactagaagataatccactaacaaatagttataaaatttggatttacacaccattcttaaagaacatcagaagcaatggattataaacacaaccttgtgtgtaaataagtgtcagttgttctgaac

SEQ ID NO: 2305 - DNA, 525 bp, Glycine max
  misc_feature (19)..(19): n is a, c, g, or t
ttttttttttttttttttnttttttttttttttttttttttttttttttttttttttttttttttttttttttttttttttttttttttttttttttttttttttttttttgggtctaataatgaagtcattttatttatatatttatttttttcatcggcttacatactattaaataggtatgaaagctgtgattgttatggttaaactttatatttaacataaataacaaacacatacatggaacttaatgccacaagctccatgtgctgcgggtgatccaaaatgttgttggcaaagaagttcgcaaggattcttgaatatttcacaatgaactgacaagctttctaccacacaatttggtaccactgtcatttgcacttgttttccagaagcaatgaagacaacaagcacgaggatgggaaaataaaaagggattttcattttcttgatatgggaaataatcctatatagctttgctttctattgtgatagatcccccttctgtcgtctttcgcagccgta

SEQ ID NO: 2306 - DNA, 1385 bp, Glycine max
cataccactcatttcttaaaccctttttaatttataattccacattatatgactgcttgtggtggaagattttttttttttttttttcaacaatacaaagatgcacatatttaaaaatgctcttatgtcacagaccaaagaaatttacaagctgaatagtaatactgcccaagttgcgcagctgacaaagatatgtcttatataggtctgcatacttagtctgccaagatgaattgaactcctctgtcacaattatacagaaggcgaaattttttgttctggtaacagaggagctttagacagtggtaatatttgaagctctctttgggaggactgcataaaaagaacactgataaaagtaatagattgttcaaatgctttggtccactgctccaccttcctccatcttctttcgcattttgtattgcaaggtagctggtgcacaatctaaaggtgtttctccttgtgcatttctgtattccaggcttgcccccgaatccatgagaatgaaaactatatcagtttgattgaagactgcagccaaatgtaataaagacagtccttgcttgtccctgtaatttgcatccacaccctcattaagaagtttcttaacagcagcaacgtcactattttttattgcttctcttaaaccctctccagtaacttcataatcaatctggggtctgtctgaggtaccattagttacatgaccaacgttaaacatagaactaaatttactagttgaaatggagcttctaattttcggaacagtatctgtcttcttaggtttaggatttgatggagctgcaataactggattgggtttctgctgggggaatgcatcagaggaaggggttggagcttcacaaatgcaaagtggcattccacatttacactctttaatgcctgacaaaagcttagtctctgcagttagtatggattttgaatcaacatttgcgttgatatctaatttagaaattgtatctgtcacactgtttactccgtctgaagaagtctgtggttcatccttcccagaccgcaagttgttgaaacaatcagcacatactcggacatttgagtaaaggccaaattgtggtaaagccatttgatttgatgaatgttcattacacaatgttctcccacaggatcgacagtggtgccttcttctgaaagtgttgaaactgcaattgcagacaacgcatcgcgctgcttcttggaaagaaggaggagcttctgctgttgacatgattttctctttctttcccttttcgctgcaaatgttcaatctctatctgctgatcaaatcacagagcccctgggatcaattcatttctccaaagaggatcaggaataacattttgggggggcctacgtagctgactcga

SEQ ID NO: 2307 - DNA, 787 bp, Glycine max
gacgtggtaggttctcaggtatgtggtgagggcgatggtccccttcttcctgaaaggacgagagaaggaatctctggtgcgggatctcaaaccatgaccagccggcatcttttcttcttacctagggtttctctgactccctttttttttttttttttttttttttttttttttttttttttttctttttcgagtttttttttttttttttttaaaaatggaaaaacatatatataaatcatcaatcacaatatattattacataacaaaaattgaaaaagaatacgggtccaatgtaaaggataaaatccttcttattctccctaagtcctaaaacaaataacaataagtatattaaatactgtataatctctctccggtatacctataagtatagataccaaagctcataatcaccactctgtatataaaacgaatcaattttgtacaaacccaacgaaattaacgaattcaatgcttcaagatagccatcaatgacagcacaaccgaagctccgatcatggcgacggagctcgaaacggatcccgccgctccggcatcgggactcggagccggggagaggtcttgagcattggcggcggcgaagaagagagcgacgacggcgagaatgaaggcaaagaaggttcttgctggtgatgccatggcgatgaagctaaagaggaagagagagaaaaaattggaagagttcttagagaaagataataaattgtaagaattaaggagtatagattgatcccggcggggccctacgtagcggacgcgtggg

SEQ ID NO: 2308 - DNA, 1809 bp, Glycine max
gcataaccaataattgaatttgaatcatttgggtctctagacacaaacactaccccctctttccccctcctcaacattgttatgatcccttgttggtaaccattccatttgcacttgtctttgcaaccaaaaaacaagctctatgaccaacgaaatgaaagaagcaagtgccttaggagctagaacagcacgagcatgcgagagctgcctaaaagtaagagcacggtggtattgtgcagctgatgatgcattcctttgccatggctgtgacaacatggttcactcagcaaaccaattagcaagtagacacgaaagggttaagcttcaaactgcatcctctaaggtcaactactcagtgacccctaaggtagcatggcacagtggattcacacgcaaggcaagaacgccacgccacaacaacaacagacactcatcattgaaacaacaacaacaaaaaaaaccattacatgaagaacgaggagaggaagaagtgtttttcaataacactattagtcttcttccccttgtgcctgagcttggaagtgaagagccattgcttaatgatgagactgaggagcaactactgtgtcgcgtgccggtgtttgatgctgagctttgtagcatatacaatgaagtgaaggacgaggttgtagctgctggtgaagaagccttggacttggaaaacttttcttccgagtttcttccatcagatacggaccttgctgagtttactgctgatgtgaaaagctttcttggaaacggggctgatgaggattcacctgatgatgatgagcacgtgaaagaatcagaactactgattcttgattgcaaagaagaagaaggagatgaggaaatggatgaatgtattgatggagtactaattggagccaaagatgcaatggtgaaggtcaaagatgaagaagaacttgatgctgatgatgacacagcttgccatttggattcgattcttgatatgaacggcgaggcatttaattggaatattgttgaatcagaatcacctgcacaggcacaagaagatgaagtgagtaaagtgggaactaagaaggacatatttttgagattaaactatgaagaagtcattactgcttgggcaagtcaaggttctccatggactaatgggaccccacctaagttcttcaactctgatgattgctggctagacttcttgggttcgaatggtgggaatgttcaatgctgttatggggcagtgggaagcttaagggtgcatgcagatgggggaagggaagcaagagtgtcaaggtaccgagagaagagaagaacgcgtttatttgcaaagaagataaggtatgaagtgaggaagttgaacgcggagaaaagacctagaatgaaaggtcgatttgtgaagaggacaccctttgttggagccactgcgttgccagcttaatcatcaatcaccactgacatgattgatcatcaaagtgatcaaataaatggttaacttttccaagtttgattttatggaaaagttagtttgattaattattagttactaggttttgccatgtatgtacattatcatcactaggtcaggtttctcttgcttgggatatttattgctttctctagcaggtctagctagtactaatggaaatggtagcccctctcagcatgttgaagactttggtaatcaatttcgggagccctttttcaatgttgcttaattatgatatatataagaatctgtaattaatctatgctaatgttatgtttacctttaactctgagggtactgattaacagtgtttaacatcaggtacttatatgtcc

SEQ ID NO: 2309 - DNA, 1288 bp, Glycine max
cgttttttcttttttctgaaaatgattcaaagaactcattccatgatttgcctcacgtgacaacaacaatctgtttaacactcgtctatacaaatatggatcttataactagtaaaaattagaatgaatgataattttccaattttgcattgtaacaaagaacaagagacacttgttttatttaggttggaggcagccttgacttttaattgaggaagataaacaaatgaatgcaatttcattcatcgtaatcataactaccatcatcatcatctaactccacttcagcatcatcaaatgaagtcataagtgtgaggaacacaacaactgcaaccaactgtgctaccacaaaatatttggccttccttttgaaggttttctcctcctgtgttttctcccttttgggcttactcttcggctttgaacttgaatgacttttagaagcagatgatgttgcatcagtatgaaattgtggggcagaggaaggagatggagctgcatctataagttctgtcttacattgttgcacatatctaactaaattagcatgctctgaaaacttgatccgcaacattgaagattcaggtaaagcatgaagaacaactagtccatgtgcaagaaaaatagcatccaagcttgatggcctgttctcaaataagtaattctgttcacctaagcaacttgacagcgcctcatatgcagactttgctctctcataaatctcttcttttttcacttcagcattgtcattagttatcccatgtttcagctttacccaaatagctttcttccaagacagaatcttccccaatggccaaggaagatcagagtaatagatgctataagcagaggaaccttcacaccccagccagagttcataggcaagtgcatcagcaagccaagtggtgagaattgctttggttgaaatccactcagggagtgaagaaaccccactatccaaatcaacaaccccaacatctttcttcaagcactcaatgatcccctccttctcattattataagccacagagtcaccaacctcaaagtaaggaatttgattagaatgagggttgttgaggtggaagtccaattggaagggaatttgggcgaatttgagataaatgtaggcagagagggattgagtgcaaccggttggaaggccaaaacatggctttcgcaccaccagagtgttcagttccgccatgcatcaatttcaataatttctcaggggtttaggttagggttcatgtgattgtctctggtttcttcacccgcgtgctttgttttt

SEQ ID NO: 2310 - DNA, 1768 bp, Glycine max
aaagcaataatcaaacttgaatatctaccgcttctaaagtttgtcctttttttacatcaaaatagtaatcacacttaacatattagcagaactatgaatacattgtttttcattacaaagggcataataatcgatctcgacccaactaagaacaaaaacggcgtataaaaaaagaattacaaaaatagaacagactttgttacataacaccgagaatagttgtcatacctcccagactaaaaacaaaacagaacagactggaaggtatcctcaaatccacatccatgcaattgccaacttcagcttccacagctttgaatagtttacgagatcttccatgttatacctatttgctcaatctcaaatctgaaaactgtctttgtctttgtcccagctgcaattatatcctctcccaaccagaaaaaaccatctcccttttaaaaacaatctaaaataaagcactccaaactgctccatttccttcaccacactttgagtggacatatttaatcttctccactgacttacagattccactgcagctccaatcaaatgatgcaacacatatgttaccggcctgcgccttccactcacagtctggaggagttccacaacacatattgcggtcatcaatatgctcaacttcaagaccaatgaaccatgcaccaagtgagacatcttcattagcatatttatgcaaaatcggctggttgatggaaatgtaagtggccagatcctttgagattgcatatatctgcccagttgcatgtcggaagtatttgttcccctcttctccaaacttccaaaactcaggttcatggtatttgacatcctttctagaaaggacaggtccagatttcatacacccaatgtagaccctgggttttgatcgatgacgagcaagggttgttgccaggacacctaaattgacatggacatcatcatccaccttgacatagaaatcagcatcccacattgaaactgcagtggaaaagaaaatctttgtctttgcagacagctcatgatacccttctacatgttctaggcgaaggaagtctttgtgctgagcttcttctgagtcaatagctcgatctagaatgctgttggaagttgcactgtgaccaatcatgaatctgataacaattcccttctcccgttccaattgaagaagttgttcaccttgaggcatccaagtctctctaacggaatcacgcctcttcctgctactgaaagctgtgtttatgccaatcactataaaagccttcttccttggagcaccttccccagaagtggtggttgaagcatttgaatccgagatcccactttcacgagaactcctagctgctgctagttccatctgaagcatcgaaacttgtttatctaaagctctggcatgctgaatggcttcatgggttttctgcaattcgctcactgcatccttgggctgcatcttcttggttgcacaatcccctgagatcacttgtagctgttgttggtcccgctgatgctgcgcagtaagcaacccgtttgattccggtgggtcccacatcctgcttgtgacgagcataccaataatgaaggaaaagacagagaaaattggaatccacgttgcagagattttggtcgaggtacgagtcttcatgtttgtggtggaggattggaagatgaaggtgtgcgtggaaaagttgtcaagacgaggaattggtctaacgagtgcaagaactcggaactagcaacgcaatgcagatacgtttatttttaacttctt

SEQ ID NO: 2311 - DNA, 966 bp, Glycine max
ttttttccttaaaaataacttctttaatatctcttatgcaaacaaaagaaatacattacttcagaatcaattctatataatcacattgatctaaaataaattctatcaacatagatccaaacacatactcagtctctcataagatttttgtttattttgatgtattaatacacaattcccatataaacatcatacgatgaacgtgaggagagtgtaatttcagacttagacatggcctccatctgtctgtggctgatatgttcgacgcctaagctgagaatcagaagtgggttgttgcagaaatatttttgtcggatcattaggatcaacatatgcgtgtctcatcatctcatcaaccggagtctgagatgcctgcaaaggatccacataagtttgtgtctgcatattagcatgttgattatactgcctcactgaagtaatcaaattgaagaagagagggatgaaggttccacagcctccctctttgaataagatcttaaatgagtgtgtagagtaaagagctctgtgttcgtcatttgggactacaggctcaacatgtccagaaagattgttgcagtgaaatataggctggttaaatttttcaccatggatgtaaagcaaaggcatatcaaaagcagtgaagtgtccaactgaacttttagcaacgaagaccatccgaatatttgacaaatacacgattccctttgttttgagatgacccccatgatttccagaggcaggaatcttatcgacctcgaattcgacgccgtctctggccaacacaaacatctcgttcacgaaaggaacgggcattccattaggaaacaattgaggattcaacgccatctctctctctctctccgatccaaatttcaatctttaactttctctctctagaagattgaagaacctgcacgctggtctttccagacttcaccccccttctgtcgtcttctcgcagccgta

SEQ ID NO: 2312 - DNA, 722 bp, Glycine max
ccctcgcgtccaacaaaatctagcagaagcaaattcacttctaagatacacatattaagttcaccagagagagagagagacattaatcaagatgggtacgtggttcacaaatgcaaggccgtatctgctgttagtggcggttcaatttggctcagcaggcatgttcatatttgcgatggatgctataaagaagggtatgagccattacgtgttcatcgtctatcgtaatgccatcgcctctgtatctcttgctcccttcgcattcgttttagaaaggaaaattaggcccaagatgactttccgggtattttcagagattatggcactggcttttttcgaaataatactggaccagtgcttcgccctcttgggcatgaaattcacgtcggcatctttcctatctgctgttatgaactccgcaccctctgttacttttgtgatggctgtcattttaagaatggagcacatgaagattaaggaggtggcatgtcaagccaaagtgattggcacagtagtaacatttggaggcaccttgcttatggcactgtacaaaggacccgttcttaattttatgcgatcttcaactagccatcctagccaacctgagaatgtggccacagaaactgggaaccattgggtcatagggacattggtcctcctcattggttgggctggcttttctgcattttacatattacaggccataacattggaaaaatacc

SEQ ID NO: 2313 - DNA, 1019 bp, Glycine max
tttttggaaataaaaatacctctttttttttcaaattaagctgaacaatattgtcaatataagctgtacagagaacaaataacctctgaatttacaacctctcaatcaaattagcttatttatgaaggggcaaaaatcattctgaacctgtttcaggaagatcctaaaagaacaaaataaaacaacatactccacaacacagcccagccaactgacctccctgtccttcaacaaatgctatgctcctacaaattctttggagctgcgacactctatccacatataaaagaccatttagtctcaaagaagggctatccaaggttgggaattcattcttgtctgatgaatggagaagaactcatttctgtactgtaaaatgactcttctgggttgatttcatatacatcttcatccttctcatcgtcccatttgatgatctcccttatgtatttgaatgcctcgtccactgacgtgcgatcccggcctcgagtttgccccacaaacaacttctggccggttagtgaataataaagctccttgaacctcatagctacatagtaatatgcttggtgcgctagggcatgattgttgtgatggggtctcacgggacaaaagtctccaaaccactcacaaattgacaaaggaactttgtttatcttgtcttcaaagacatcatatttatttaggagaagcacaaatggggtatctttgaaacaaggatgcttcaccagactctcaaaaagatctttgcttgccagcagtttgttacgaagctgaccagtactagtaggccacatctggtcgtagtcactcagggaaacacaaaatatgattgccctcacatcttcaaacatttccaaccacttgcaaccgtcacgcagtccctttgaatttatgcgaatcagttgatatctgggtgaatgaggaggataattgatgttttcactgtatatctcagacatgggactcctatcatcaaatgagaattccataaaggcaagaccattgctctgagtaac

SEQ ID NO: 2314 - DNA, 1618 bp, Glycine max
  misc_feature (1510)..(1510): n is a, c, g, or t
agaatctaatgaataatccttcagctacgtaggccccccccccccccaatccgcagatgcaagagctcatggatcgaaaccctgagctagcacacatacttaatgatcccagcactctccgccagacccttgaagctacaaggaaccctgagatcatgcgtgaaatgatgagaaatacagacagagcaatgagcaacattgaatcttctcccgagggattcaacatgctgaggcgcatgtatgaaaatattcaagaaccatttttgaatgccactacgatggctggtaatacaggaaataataatgcagcagtttcagggactcatggtggccatgcaagggaccgatcaacaaatccctccaccactagttctgaagcaactgctggttctcccttacccaatactaacccgcttccaaatccttggtcctctacgggaactggaggtgctcaaaataaccccagaaggtcgttgactactggtgtggatgccagacagcaaggacctactggcttaggtgggcttggtctgccagaccttgaaagcatgatgggtggtagtgctatgccagatcctgctttattgacccagctaatgcaaaatccagctatctcacaaatgatgcaaagtatgctttccaacccacaaacattgaatcagatccttggtgctaatactgagcagcgtggcatgccggatttaaattctcttagagaagtaatgcaaaatccagaattccttcgtttgttttcttcacctgagacgttgcagcaactcttgtctttccagcaagctcttatgtctcagcttggccagcaacaatcaacacgggaatctggtcaaactggcggaggcactggaccaatgaacaacttgggattggagatgttatcgagcatgtttggtggacttggagctggtagcctagcggttccaaatagatcaaatgagccgccagagcagctgtatgcctcccaactttcacagcttcaagagatgggattctttgacacacaagagaacattagagctcttatcgccacttcaggtaatgttcatgcagcagttgaacgactattggggaactctggtcagtagcagacaatgttggcaaattccttttggcaagttctcctctgtcgatttccaaggttagccactttgaaatcagtggtgtttaagtgccttgttggatattaaataaaatcagaaatctgtccaaattatagtggccagagctgaaatggtgtaggttatatatattggactgtgattgttccttctaatggtccaattttcttatgtacatacttatattgaaactagttttagacgcagcaggcgatcttaaatatttcaaatgaattgatttttgtgcttttttgtttctattattaatgcttaataactccacaattactgatttggccggtgggaagggacaggagactatccgttaaatatcaattggtagaatgtgatgtgaactaccgtattgattgatttanattcgactttggtcatgttattttgcacaaatctgatcaaaatctttttcacttatagttgtctcaaggttgatgtcttagttagccttatgttacatccataagatt

SEQ ID NO: 2315 - DNA, 2472 bp, Glycine max
ggtaactaataaattaagaccgttaaccaaataaaaatcatgtagtcactaactaggcatttatagcacaagctaattttaactaatttcattatatttccttacacttacctacaagtgacaaaaatgatcgtgttatagagaaatttctgaaatagaattaatgagcacaagaatgcggccccaaatactgcacatccttggaaattcttcagaaactgttattttgcctatcaaatgaccctaatcccctatagaatttactagtttcacaaaatttactagtcagattctggaagtaaaatgtcaatccctcttcattgctttgttgaaaaaagctcttgcggttgctattgcaaggtatgcaaagacggtcagagtgatgcccccaaacagaacaagacgatcataagcagcattttgtactgtgtagacccgcatacctattgtattccagttgctctctgtccagacagggtccacaacccccattttgtcagaggaattagggggcaaaacattccacactcctgattcaaattttagccgtgttgaatatgctggaacatacctcgttgtagagagaacacaaactcccttgccatcagtctctgctttgatgcatacttcatctctaccattgcaaccatgttgacaatctgaactattattctcccttgggatagaagttctgtcagccagaaaattccagatgaacctgggaacatcattgatgtatcctgtatatggtgtagatgaaggttcgtccaagataacacctacgtaatggcttggacaggttgacatgggtgaaatatattttgtcaccaattcacaagaaagaccaggatcacagtccaacaagcaacccataagttgttcaacaagtgagacattaacatttatagcagccaaagtagaattttgtacatcttcagtttcactggcgagcatgtaaagggttcgggcaatgagagaagcagcagcaactacagctgacgaatttacatttgataaatcatcaagatgactatggtagaacttgttgacaaagacagagtcaaaatcttctaggacaacaccagagattgcaggattcttttccaaaaaggacattaaagaggatggaggtatcccaggatttgaggcacttgcagatgctatctttatgttttcagatatcagtgactcctgtgcacgtttcaaggcagccactgtctgatttgtggcagaagaatccccttttgtatgagcaaaaaagtttttaacaccttgactgagaccctttccaacagaaccaatttcaatgaccgtttcaattaatgtctgattaaggccatgaacagcatctgagtgcatgtcaagttctaccaaaaatctcctacttccaaggtaaccccatgcctctccagtgaaaactgcaaaaacaagctgtttactaaggtcaccaagaccatccaaatgagaaagtgcatcaacagctgctagtaatgcaattaaaccagaaataggggagtctgcaccaaggcttttgtcccgaaaaaatgaagcagaatccatagatgccactgtcaataaaatgggcttagaccgttgtaaggatgaaatgttgatcggaggaagagatgaccagacactgcctgtatccacctaaaggaaggcaagtttcttcttttaaacaagactctgaatcatgtgttccagatttcactgtctgcatcaccaggtcaaactcagccacattagaagtataagatttctttgtgtcctcattctttgttacaaactcttgaagagtctttgagccactttctgtgagtaaaaatacaggaaacttgtaggatttccacataataccagaaccaattgaattccattggtagctggtattatgataaagagcgaattgagcttgtggaaacttttggtccggagaaaatccctttaacttattctgcacatcacccgttggttcaaccagtacaccaaggactttactagcaaagctagagtcatctgatattctagtaaagagagttggaaactcatccagtgaaaccaatatagcagaaggctcagctattttgtcaacattttcgaaccttaaaattggagccacaaccttatctcgtccaggatttgaacaaccgatggtgccagagagattcatcaggcgcacgcaaggataaccgtcgatggaagcgtacatagtgttctgaagatcaggcactgattccatggagctcgattgtcctgagaagcaggagggaaggtggaaggtgaagaagaagaagaagagagagaaaacggttagctccatggatggatgaataaaccctagtgattagtgagaatggtgcatgtgcatgtgcaggggcagagagtgtgtgtgagtgggttttcttttcttcttcttcttcttcttctcacctttcttcctctctcttgattctgaaattggcggacgcgtgg

SEQ ID NO: 2316 - DNA, 2170 bp, Glycine max
  misc_feature (57)..(57): n is a, c, g, or t
aattttgttctcatttatttgtgattacctgcttgtttgttggtttgtcatttttcnatctttttttttcttcttgtttttgataagtaaagatttattgagataaaaaaaaggcagaaaaagtacaagatgtacaagttctgcaaacagtaaagatatgttgttttgtcatttttctgataaatgataacaattatcgggttgaattaatttatgagagcatatatacttcgcattatattaaaaaaaaaaatacacacccacttttcgaagaaaagattataaagtatattcaggcatcctggcctttacgataaatttcttgtagttaataaatatatcattagatatctggacttttttgttcatgcaggtattcatgcatctatccaaagtttcaacctgaaatattgtttactaggccaaggaccatgagctagagatacctgcatttgtacaaggtaattatcccaatttagagattttaattgaaagaaagaaagaaaaaatgtaatggaaggacgtagacaatgtcccattaatttgtctgtttgtaccttaaacggttatgaaacatttttctctatacatatgctaattaagagataacaaatacaattttgtatgttataatccgaaaatccaggtgcatgcaagtgcaacacttttttatttgtggttgatattattgattttagtggagtggagaatcaagaccatcttgagaagaaagtgaatggaggggttgatgcctctgtgaagggaaagatggcatcttcctgaaagagggtcttttttcaagctgttgtatggttctcttggcatagagtgtctgaaacaatggggatgctctctccttgaacttgagaacagtaaagaagagaagtctgtaacatatgagaatcacaaatagagctgctaagtcccaccacttggaatggtttaattcaatgcctaacatgtgtgtgatgacgtattctccactcaattttgggtcaccaggtaacagaggatcaaactcaagcccaagcaagtcattcttgtaggaaccctggattgcccaagaaccataactgatatatgaaattgggtagcgccaaaccggctttggaagatcagagagcaacctgaagaatccggaggtcatcatcatgattcctattattccagcccctgtaattattcccatgaggaaatttggaacaagtgaagctacaaccatcatgaggctctctattaccgagatgcagctgtagatgttgagaaagaaaaacacaaagtgactgattcctggcctgaatttcaccatgttatacgtaatggtgctagatgtcagagcaattgcaaccaagaatgggaatgaagaaaggaagttggctaaaatatatgctgctactccatagtatccatttagcctttctcgataaaaggccggggggtcggcctacgtagctgactcgcccccaattgacatgaatgtcataaatcctgatataaatgcaccgcaggcaccacgggccaggatggaagtgtagctatagcctacatcaaaataatcggttcccacacatatggatacaatgatgtaaattatgatcctcaaccaagtagtaacccacatctctacacatgttcacaaatgatctctttgtcaacgttaatagttgcttccaccaactagcttgacttccatgttgtgttggaggttgaagcccttcatcggtagacagttcttgaattctgttttttgcccttctggcatatgttgaacgcctatatttctcaactagtgttgccttaatctctgctgtagccaaattcatgaaaggatctgctgaatttggaacatcatgaattctttgagatcccttcagtgtagctgttacaatgtcgaaatcagaattgatacatcgtaggaagtgatcagaaggatttcttttacgtggacaagggaaaccagcttcagcaaaaaactcaattgccgattttgcttctccaaaataactgtttcgcccccagatagtaagaagaggtcatcaaagagtgcaaagacttcactgcttggttgatgaatggcccagatgacagtccttccgtcacgagctacatttctaagagtttgatctccatcacatcccgagccccatgccgaggttagggagcgagtgca

SEQ ID NO: 2317 - DNA, 1248 bp, Glycine max
tttgactttaagtgatggcattgaactctcaaaaaaggtagatacagtcataataacatggcaaccacatcacatgacatccacatgctacgagatttaacaaaaaaatagtataatagaagaaatcacattcatacatatattgaataacacttatgttcaaaaaaatggattcaaatcaaagcaagtggcaccaaatgtagatacataaatataatctaaattaaatattcaataggaagagtgccatcagaagagcaccagcacaccaaaagttgccaagacaaggttggcccagattccatagctgatgaacttgtgagaagaggagtcatcatgagtagatgatggagatgatgctttgctatctgcactgtgttcagttggagaatcagcagcaggggcaatatcaggagttggtgcaggagcaggtgcaggaggtatattagtgccaagaatggcctcagggagtagcaccttgtcaacttgatatattgcaacaggatctgtggcatgaacagcactgctcaccttggtcttagaccatcctgaactaatgtgcactgtcccagaatcatcagtgaaattcaaagtgtaatcccctccggcaaatgtgggagtagagctggtttggctaaggcttgtgaactcagcaagagaatagaaatgtggcaaggcatggaagaggatcacttgctttagctggtcagaggtgaggttggataggacagttttctttacagcattgaaggcactgtccttaggaacaaagatggtaattccttcttcagtgttgttggcttggttttggaaagtgtcaatcactttggtggactcaaggtatccaaggaaggtgtgaaatggaccagcaacactgagcaactcggtgaggttcacgtagtcgggtgccggggctggtgctggagttgggctcagagagggaggactagcagttttggcaaatgctgaactgaaaagcagcataatgttgctaacaatgaaaaccatagaaaacgccatatattccttggccactggtttatcctacctttctatatcaacagtctctccaaattcctgaataagaggaattcagagaggagaatgtgaaggacgaggaaggagaatggaaggagggtatataaagatagaatggagggtacgtataccagctggaagggtattacagcaaagagatgcttctaactagagggtgaagacataatatactttaatgggaaatgcttt

SEQ ID NO: 2318 - DNA, 1336 bp, Glycine max
ccggaaacatccctctagggaataaaatcattttttttttttttttttaactttaagtgacggcattaaaactctcaaaaaaggtagatacagtcataacataacatgacatccgcatgctgagatttaacaaaaaaatagtataatagaagaaatcacattcatacatacattgaataacacttatgttcaaaaaaatggattcaaatcaaagcaagtggcagcaaatgtagatacataaacataatctaaattaaatattcaataggaagagtgccatcagaagagcaccagcacaccaaaagttgccaagacaaggttggcccagattccatagctgatgagcttgtgagaagaggagccatcatgagtggatgatggagatgatgctttgctatctgcactgtgttcagttggagaatcagcagcaggggcaatatcaggagttggtgcaggagcaggtgcaggaggtatatcagtgccaaaaatggcctcagggagtagcaccttgtcaacttgatatattgcaacaggatctgtggaatgaacagcactgctcaccctggtcttggaccatcctgaattaatgtgcactgtcccagaatcatcagtgaaattcaaagtgtaatctcctccggcgaatgtgggagtagagctggtttggctaaggcttgtgaactcagccagagaatagaaatgtggcaaggcatggaagaggatcacttgctttagctggttagaggtgaggttggatagggtagttttctttatagcattgaaggcactgtccttaggaacaaagatggtaattccttcttcagtgttgttggcttggttttggaaagtgtcaatcactttagtggactcaaggtatccaaggaaggtgtgaaacggaccagcaacactgagtaactcagtgaggttcacgaagtctggtgccggggctggtgctggagttgggctcagagagggaggactagcagttttggcaaatgctgaactgaaaagcagcataatgttgctaacaatgaaaatcatagaaaactccatatcttccttggctactggtttatcctaccttgatatatcaatactctccaaattcctgaataagaggaattcagagaggagaatgtgaaggaccgggggggggcctacgtggctgatatataaagatagaatggagggtacgtataccagctggaagggtattactattggctacagctacagcaaagagatgcttctaacttgagggtggttctttgctgaagacataatatactttaatgggaaatgcttctctggaacacacttttttttctctccttgtatc

SEQ ID NO: 2319 - DNA, 1787 bp, Glycine max
catagcgtaatcaagaaactcacatcttaaaataagaaagttcataccatagtccataaataaacaagatacatagatggattaatgtaacacaatcaacttaataaagcctacgattactcaaccagtagcaaatgaaacaatccagtttccgtcagaaaagaaatgaacaacctacaaattggacatctctgaatctaacaaaggacgaaataattctaagtagactacagttgctaacttattcgtcaataaatgctctatatatcttttctctacagaaacagctaaacgaaacaaccatcaaaacccagcgagtagggaagtaaactctttcttgtcttgaaattatatatacatattacacaacagttgttgaaacacccagttgggacttggtaggttcttcgttttctgtcacacttgttcgtttcccttgagaatattgtacttgcagagaggacaagttgcattcatcttcagccatttcacaatgcacgacgaatggaaatgatggttgcagggaagagcatgcagctctgctccatcctcgtatgaacagaggcatatacaacattccgcatcctcgagtagaagtgttcgttcattttccaagtaagcactgctggtttctatgggaaccattgatccagctccaccactaggtttatccacatcacttaatattcgaaatttgtatttcggaagcatgctaagatctgcttctgacgcaccttcctgtcctgcaacagcatagagaatagcaatgatgcagggcaaacaacaacagagagcaatgccaatcaagcatgccaagacaacacaaaagatggcaaaaaagacatcaaatgccagaaagacaacagccaaccagtacaatcgtggggcatcttgcagaagtatatcgccaccagagacaacccaataaaagcccactatccaccaaaggaatgaaaccccggtatttaacgactcacatcgttttgcgaatctggagcgagacgtgttgccagagctcccatctccgtcgtcactgtagtcgtcatcgtcgccgctgccggcgtcgctctccacgtcccgcgccctctggctgccgctgcgagagtccctccggctccggcgccggtactcgagccacacgagcaacacgtgcacgaggcactgcagcgcgtacccaacgatccacacgcggatcggcgtggtcgggtgctcggaggtggtgcatgcgagcatagccgccgagacgaccacgaaggccatgttccacgacatgtcgagcgccaccaccggcttggagtagccccagtcagcgcggcgctcctcgagctcacgcgccgccgtctcacgtaccagcatggatgggccacggcggccggcgcggccgagaaggagcgccagcgcgggggcgggacctcggccggcatcggtgcgggagcggagaagcggcgtataaggctccggcgcctccgtgggcgcggtttgtgatgacatggcagggcgaggtctctagagagggaaagagtgagagcgttgcatgattaaagaggggagtggtgtgataagaattagaagagaagagtgatttgtgtttgggaaagagaaaggagaagtattagtagaaggcgttgaacggtggatgggtgtgcttcttacttcttggtagaatacttgcaattctattctatggacagatgccctttgcttttatcgaccccctgccgaccaaaaatatttattggttagtgcgaattcttctatacctctcttatccccattttcatttttaa

SEQ ID NO: 2320 - DNA, 1224 bp, Glycine max
ttcattaattttccttttcaaacgagtcattatttaccacgaacagttctaaaccagcattaacagttgtcaaactgcccctatgtaactgatactatcttgtaccattttaacaaatattccttctacaaaatcctcctagccaagtagtacacagtgcagatcaaaatactagagatgatgagaacaaatttgggatcaagtactatccataaagagtaatctgtaatgtctttactcagtttctgttcgaatttctttgtcacataaacatgtccaacagacagggagaatacaaattatatgaatggtgatcacctccgcactggtggtacaccccttccaggtgcagctccacgcccagcagcttgagcctttgctcgcattgcaactgctctgcccctaccaacaccaagtgatgcacccttgcccttgattcttgcatccaaacgcttaaacataggcgcattcttcagcatgtctgggatgaccataaacctgactttgcttcctcgaataaaaacatgctcaagttgcgatgttttgccatccttggcagtgtaggtgatgctctcgagttggcagttccagttgtcctcgcactcgatcatgctgcctctgtagagttctccgctcttgagctccaccgtcaccacgtgccccgaagcctcgtggagcagcttcaccggaattcccaaactcctgctcatgcttctctcaaacgcaaaaaaaccctactccactatactcagatttgtgattgtgacttttgtgttgtgttgtgccctcctcttctgccgtctgctcgccgcaattttaccttttcaaaaaggatggtcgaaggccgtttgagctggtttatcatggtcaatttgatgattcacgcccaagtaataatgtaccggtcactggaagacttgagcttggcaatagatcgtgttcttagtggccaacctgtaccatcagagcaaaaacctagtgttggatgcagcataaagtggcacccagggaagaagttttgattgataaactgtaattattttgttcattaaaagtttctttttcaggtttgctatgctttatgtaatgtcactaaccatattagactgttacaccttattttctttccattcagtgtgacttgtaaggaaatggtgtcatttgtggttcttatagttactgtgtatttcacataagtaataagttgcatactatagtgcgcgc

SEQ ID NO: 2321 - DNA, 642 bp, Glycine max
ttgcttgaattcagacaaaaatcgtatttccaaaactgcagaatacatcatttagtacacattgcataaagaccaacgaaggaacaagcagattcctacatccttttctctttgtataaccgttaggaatctttgaattcaatctagccaaacttttaatcatcacatgtgctcatgaatccaccaagaaagccagctccattacaagatccacacaaaatatccttttttcccctgcatagccaacacaatccaccagctttaaattgtccattgaagtgatctacagaattaactccagtacctttgcattgagtacatgattttgcaccatttccatcacaatcagaacaaacaatgctcctaattgttttgctttgtgtagttttatcttctgtagccttaaccttcaaggactgaaagcttggaactttagaattctgacacacttcgttcatcccaaaagccttttgggtaactgaattaccggcaattgtcccaggtctgtttggggatttcaaggaacaaatgggagcaaagcacagagtgtacgacattctcaatcacaaagacttcaaaatatcaaacgatgtagccaagtttggtctgaactgaactgaaggagtgagttcaacaaatgcc

SEQ ID NO: 2322 - DNA, 2516 bp, Glycine max
gctcgatggaagttggtgttgtaacaactctaaggaataattcatcatcctatgaagttgggcaagagacatactcatgtttcttgaggctgaaaagcacagttgaagaagatgcaataaggttgcagcctggatctagtgaagtccatatgttttttccagatagccttggagatgatttgattgttgaagttcaagattccaagggaaagcattttggccgtgttcttgtccaagtggctgctattgctgacgatccggctgacaaattacgctggtggcctatttatcgtgaaccagaccatgagcttgtgggcaagttacaactgtatataaattattcaacaagtgcagatgacaatagtcacctcaagtatcgttcgctagcagagacagttgcatatgacttagttttggaagttgcaatgaaaatccagggatttcagcaaaggaatttattgttgcacggtccatggaaatggctgttgacacagtttgcatcttattatggggtatctgagatatataccaagctgcgatatctatcttatgtcatggatgtggctacacctacagcagactgcctcaacttggtgtataacctgctagcacctgttatcatgaagggcaatagcaagacttctttgagccaccaggagaaccgaatactaggagagaccaaggatcaaattgaacagatacttacacttgtttttgagaattataaatcacttgatgagtcttctttctcgggcatcatagaggttttcagaccagcaacgggtcaagcagcaccagccttggaacctgctgttaaactctacaagcttcttcatgatatcttatctcctgaggctcaaactgcattttgtcattatttccaggttgctgcaaaaaagaggtccaagaggcacctgagtgaaacagatgaatatattacacaaaataatgaaagcagtttgatggatggcatggctatgtctactacttaccagaagatgaaaaccctatgtataaatcttagaaatgagatccatacagatatccagattcataatcaaaatatacttcctagctttgtggacctgccaaatctttctgcttccatatacagcacagagctttgcaacagattaagagccttcctcatatcttgtccaccgacgggcccatcatcaccagtggcagaacttgttattgcaacatcagattttcagagagatcttgtaagctggggtattggtcctatcaaaggtggagtggacgcaaaagagttgttccatttgtatattcttgtttggatccaagataaacgtctatctttgctggagtcatgcaaattagataaggtgaaatggtcaggagttagaacacaacattctactactccctttgttgatgatatgtatgagcggctgaaggagacgttgacagactacgaggtcatcatttgccgctggccagaatatgacaaaaattggctacaggccattgctgatattgaaaaggccattgtggaagctttagacaaacaatatgcggatgtattatctcctctcaaagaaagcatgggtcctaagaaatttgggcttaataaatatgttcaaaaacttgccaaacgatctacatgtgcctatgtggttcctgatgagcttggaattcttttgaattccttgaagagaatgctcgacagcttgcgccctaggattgaatcccagttcaagacatggggttcttgcttgccacatgttggaaacacgacacctggtgagcgacttagtgaggtgacagtgatgctgagagcaaagttcaggaattacgtgcaagctattgtggagaaacttgcagagaatgcaaagttacagaataccacaaaattaaaaaagattcttcaagattcaaaggaaactgtggtggagtctgatttaagaactagaatgcagccactgaaagatcagttggctagtaccataagccacctgcacactgtctttgagactcatgttttcattgccatatgccgaggttattgggatcgtatgggacaggaaattttaagtttcttggagaacagaaaagagaatagatcgtggtacaaaggttcaagggttgctgtttctattctggatgatacatttgcttcacacatgcaacagcttctaggaaatgcattgcatgagaaagacctggagccacctagatccatcatggaagttcgttccatgctatgcaaggatgctcccaatcacaaagacaacacattttactattaggctaattctacatgtaaatatgaagagaggaatgcacggggtaaaaagagaatggatcaccaattttgttgtaggagcaagcaactcaactgctccctgaatgattgatgtgcttttcaatgggaatagtgattttttaatacacgatatatacacagtaaaattactcattgtaatacttggtagtagtaatatataaatgttagttttttgcattctattaatcaaaaaaaaaaagggcgg

SEQ ID NO: 2323 - DNA, 909 bp, Glycine max
tttaggtgaaggcacgattttatagctaccaagaataaagctttaaacaaaatatggatttcatttccaagatgtgtaagctgcatgctccgtctagttgccctgaagaaattttgaaatgatattcaaaagcttccctcaatcaaaataagcaggggaaattattctaaccattatcaagtcattgaatcaatttactttttgatcccacatccacaaataagtaaacatatagttaaactttaactccagccagctacactttattgatgtaaaatgtttacacacctctttaaaatggacggtcattacaggtctgtgataaagactacacagacctttccattgacaaataacagaaagttgacagggccaataatgtcatcccacaatagcacaaacctgtgagtcactggtatccgccgccgcgagcgttgatgtcctcctcaacggcggaattgagataaacgggcggaaagtcggagacggcgaaggtctgttccttcatgagcttctcgacgtcgggcttcttcaagacggtgcgtcgtatgggagggcggttgcggcgctggtcgcgggtgaagtacttgatgtcgtagacggtctccgggagggagttggggatgatgggcttctccttgacggtggcggggcagctgaggcggtactccacggccaagggcaatgcggatttgtactcagggtccgcgcacgggcccgtgatctcccatggcttctttatgaaccgcttcaggctctgcatcagagaattcgacgccgatttcgccatgtctactgggtttcgtttgtttctgtatcaacacatagatccccttctgtcgtcttctcgcacccgtatccttctgtcgtcttctcgcagcccgtatcctctgtgtctctccagccgac

SEQ ID NO: 2324 - DNA, 981 bp, Glycine max
ttttttttttttttttccaagggaaaataattacatccacattataatcctcaaaccatacatacgccaaggtaatcaatctatgcaggcatacaggctatttttcttttttttttttttccaactactaccatatgaaaagcattgcttgtaacggatgccggaaaagttgtcttttctcagatatagtaattcttgatttgtttgtaaaaagcaaatacaaaggctaggagctgtaacacgatctcttacaagcaattgaatgacaatttttagattatgtactgatcagaatagagaaatgtgaaaacggtcagatatcaatttatcggcccaaaaatgtgacatgatccttttgtactgcctgtgttaggttgatatcaaagagctcacaacgtataggcatctccatctcatagaacggattcttcaaaacgtagtccgtgtacaattcatagacaaatttcaataaactctccatgtgttgtgctccaggctcagagaccacaaaaaattttgtccctgtcagtgattgaaagcaatgaagatcaaatgtatctgcttggagaagttcaattcctaaacaacctgaaacaggtgataactgctgagagatagcatgcattgagtgccataaacttgccacccgcaagctgtcattggtatccattcgtccagctgacccataatccttataatagattaatccaccagatttattgatgatgtaaagactgtaaattgctgccattccagaatcttaatagatctctgcaattgatgaccgtaagccaccgtctgtttcttctttcagattcaaaaggaattaaacggagatcaatagtttgagttagtgttgcggtttttcagggagatcagaggacaacacgtgcgagcgtgcctgtgcgtgcgtgagaaagaaggaatgttggttggtagcttttggatgacaccgaagattacatgaggcaccctcgagcc

SEQ ID NO: 2325 - DNA, 751 bp, Glycine max
aaccacggatgtctggaaacttgtcttagacattgtaaatcttgataaaatacaaaggctaggagtagtaaaagaaactcgtcccttacaagaaattgaatgacaattttcagattatatgtactcatcagaatatagaaattagaagagtcatatataaatttatcggcccaaaaatgcaacacgatccttttgtactgcctgtgttaggttgatatcgaagagctcacaacgtataggcatctccatctcatagaacggattcttcaaaacgtagtccgtgtacaattcatagacaaatttcaataaactttccatgtattgtgctccaggctcacacaccacaaagatttttgttcctgtcagtgattgaaagcaatgaagatcaaaagtatcagcttgaagaagttcaattcctaaacaacctgaaacaggtgataactgctgagagatagcatgcattgagtgccataaacttgccacccgcaagctgtcattggtatccattcgtccagcagacccataatccttatagtatatcaatccaccagacttattgatgatgtaaagactgcaaattgctgccattccaaaaacttatccagaatttgcaacgaaaaccattcaaacaaaggaagaggcagaggccaatcgaagcagggtgctcactcacactctagaatgggggaaatcacgacacgatttatgaccagagaccagagaaagaaaaatgagagtatgagtcattttt

SEQ ID NO: 2326 - DNA, 721 bp, Glycine max
cgaggtcgacgtcctcaataagctttttttttttttttttttttttttttttttggcaagcagtagagtttcacctccacatatctaaatcaaattaaatagctcagcaacaccaccacagacaaacacattcatccagtacaaaatattggatgaaggaatattaattctagcagcaagaatcaacaatatgcaaatccaataccaagtttagtgccattgataattctcttagttctcataatctgtacaaaagtttatgcattaatttctcaaggtcctcctggtgtctttggatcatgccggttgtttgctcctgtccctggataatcattactctccaaatcaatccttctctctaccatgaactcttctgccatatcaaacatttcttctccatttttcaattcctcaacaccctgaaacttatctgatgtaatttgggtaggggttttttctttgtttggcaaaagccttcttgttgtttggagagcagcagaagagagaacaaatgaaaaaaccagaaggatgatgagcaattgcaggggggatttgaacctcatgttgaagagaaacaaattggagatctgaaagatgacaaattaataagagagctgaagaaggtgaattttgtggaatacctgtggagatggtgtttatatagagaacaacccaaagtactatagcttgctccaaagtcaacctcaacttttacatgttt

SEQ ID NO: 2327 - DNA, 1199 bp, Glycine max
ttcgtataaatattcacttattttcatataattaaataatcttcaactcagtgcaatttatacatcaaacatttgtgcacaaacataattcagagctctatacatttttattgtttcatctcatcaataacataagcgttaaacattttcctaaattattgtagtccatcccttctttaaaaacagggcatatcagtccctttcacaggaaatcatttgcaacaaatattttgaactgtgaatgcttttttccaagggacataatgacgaaggaattcatacatatagtagatgctaaataatcaaacccagtcaccatcattccattacctccaagaacaaaccaaactctccaatttctgcatagcccttgcaggggcaacccacaaaccccaatgacacatgaaaggatccacaagaagaaaaactatacaatgttggagtcatctcaaaaacttgagaaaacaatttggtgttgatagttttcataagaaagcaatatctatatgagcttcttcttccgaaagaatcgtttcagaaaccacagttgcaaccctgaaaccaaaatgcagatgccaagagaaaagatactgaaccaagcgactctagcattcgttgtttcactaacttccctcatctctgcttccctattcttcaaataaattagattgtcccggatggcttccacagccccttcaagtttccttagctcaagttcaacaccctctatcttttcttttcttgcaacggagtcccaatctttggcatggattccagttttccattcaaggctgattgtggtctctcctccaccttcttgatgtttgttattcacccaaaagcatgccacgtagttcccagactcggtagttgtaaatgcaaactgaccgtgggtaacattttcattctggtgaagattatttccataaggggatgtcaccttggcggaaatagtttgaagttggtgaccctggacatcatcggctacaacatagtaatctgctaaaacgacaacgtgtgtctggatttcctcggacatgcacttggttcccttgctggggatggttaaccatacagcctcggtgagagtggtgaaacataacagcaagagcagaggggttcgagagctgaggttgatgtccttcgccattactcaagggggggggggggggcctacgtagctgacaatcagaccgggg

SEQ ID NO: 2328 - DNA, 2768 bp, Glycine max
ccacgcgtccgcaaatttagaattcacgcaaccaaatagactgaggcttactgcttttacttccccaagtttcaattttgagagaatatcaatgcttttgagaatttaaccaaagtccccgctctccacctcccgcgcccggtgctaatggcaaataggcaccacccctcagtgtttctggtgttggttactgttttactttctatccattgctctgagcaattgcaatcctctcactctcagactcttctcagaattcagcagctattgaactttcctgctgctttaagcaactggaacagcagcacagacttttgcaacacagattcaaactcttccctcactgtagtgtgctatgaagacaccataacacagcttcacataataggtgaaagaagagatacacctctccctcgaaatttctcaatagattcctttgtcacaacactagtaaggcttcccagtttgaaagtcctcacattggtttctcttggtatatggggtcctttgcctagtaagatagctcgtttgtcatccctggaaatagttaacatgagttccaattttctctatggttcaattcctcaggaactttcatcactgtcaagtctccaaacactcatttttgacaacaacatgttggctgacacgtttcctcattggcttgattcacttcaagccttaactgtgttaagtttgaagaataacaagttcaatggatctctaccaaaatcgcttggtaatgtggagaatttgagaaccctttcactttctcataatcacttttatggggcggtgcctgatttgagccgtttgacgaatcttcaagtgcttgaattggatgataatgcttttggaccgcagtttcctcagctcggtaacaagttggttatacgggttctaagaaaaaatagcttcaggtctggtattcctgctgaattgagttcatactatcagcttgagcgattggatatttcatcaaattcatttgtggggccttttcagccaggattgttgtcacttccttctattacttatctgaatatttctgggaacaaattaaccgggatgcttttcgagaatctttcttgcaattctgagcttgatgtagtggatttatcctcaaatcttttgactgggagcttacctagatgtttagtgtcaaattccagcgatagcactgtcctgtatgctagaaattgtctagacaccgcgaatcaaaatcagcagccgcagcccttttgccacactgaagctttagctgtgggaatattacctgagacaaagaagcacaaacaagtatctacggtagttctttcccttggcatagtaggggggactcttggaggagtagcacttgttttgctagttttctttattgttagaagaggaaatgacagaagcaaaaccaagaatcctccaacaagattaatatcagaaaatgctgcttctggttacacatctaagttgctttctgatgcaaggtatatatctcaaacaaagaagttgggagcagttggcctgccaacttatcgaagtttctcattggaagagattgaatcagctacaaactattttgacagagcttctttaatgggtgaagattcttatgggaagatgtacagaggtcagctgaagaatggctcacttgttgctattcggtgtgtagaaatgaaaaagagacacagcactcaaaactttgtgcaacacatagagctgatatccaaacttaggcatcgccatctagtcagcgctgttggacactgttttgaatgttctttagatgattcaagtgtcagcaaagtatttcttgtcttcgaatatgtaccaaatggcacgctcaggaattggatctctgatgagcatgctagaaaatccttgagttggactcaacacataggagctgcaattggagtggcaaaaggaatccagtttttgcatacagggattgtccctggtgtatattccaatgatctgaagatagaagatgttttattggatcagaatcttgttgcaaaaatcagcagttaccacctgcctttgttatctaacatgggaaaggttcggtgtggaaattcttccagtggattaagaaattctagcaatagtaaaagtgtaaagcaggaagataagtctgatatatacaactttggagtgatactactcgaacttattctaggaaggcaaataaagacagtaaatgatgcagatgcttttagggatctgttgcaagcaagcttaggaggtgatgaagagggtaggaggggcgttgttgatccagcatttcgcaaggcatgcttggatcaatcattgaagacaatgatggagatttgtgtgaggtgcctggttaaagagcccgcagataggccttctatagaggatgttttgtggaacttgcagtttgcatctcaagtacaagatgcatggagaggggattctcaaagtagtgaagggtcaccaggctcagaatctcgagggctacccttccattagtgtcaaaccacaggttttcactttttttattttgtatatttcactgtaagcctaaaaggttaatgcttgcagttgcagatacagcagcatcagaatagtataagttctttatgttggaacacctttgctaaaaaatctgctgagcttccaatgaaaaactatgttgtccgagctttgcaccatgcagatttttttttgtttttaagtacatgcacccgtgcacatactatgtgagattacgtatatgaatcataagatgtcattaattaaaggtc

SEQ ID NO: 2329 - DNA, 1839 bp, Glycine max
  misc_feature (2)..(5): n is a, c, g, or t
  misc_feature (7)..(11): n is a, c, g, or t
tnnnngnnnnntcattgttgagctacgttttgcccttttttttttttttttgatgcttctgcaaggaaaagcccctctactttccataaaacacataacattcacaacatcagagctgtcagaaaagatatgaatcaaggcaaagtagcatttgttgcacatgatatctaggcatttcaaccttgatctaagggcaaaatccttttgttgtaaccgaagaactcagaaccccaaggggaatttcaatcagtagttgaccttctcttgaatagattgtctctggagagccattcgctcgaaattactcaaatagcacccatcagttaaatttaccaagttccatcttcttcttgatagccctttgaccgtgatagatgaatgaatctagtattccagaaacggtgaaaatacctccaactatggcacaaacattagtaagaaaatgtaagaatgagacattttcttccgtaaaagtaaccttaattggagagaggtcatagaaaaagaaaactccgggaagggactgcagacggcccatgtctccagtcctgaagtgttctgtaacagagaactggtttgactggatagtatgcccactcacatcagtgtatactgtaggcacaaccttaataaaatactgatacatcccacttggtgtttcttgtgtccaatgcacgttgtcaagaggattaacaacaccagggaaatactctccgaaagttaatctgttgatgtggtgacttaaattaaaagaatccttttgaaaagccagcaggtcatgtacatgtacaccagattgctgaaagcttttcccaggtgcaaaatgaaagttccctgcaaccttatttacttccaagaaaccatacacattgcatccttcaccttcttcatccttgattctttgtaagaatccttctcttttgcactggtcaattaaatcaggatttgaaagtgcccaacctttcttacggtatgcttcacgaacatcctcacaggaattacaacaatcatcatctgacacttcagaaccataacaggaaccacaataagtctcattgtgctcgagcctgcctccatgcctctgcaatggcttttcaatcttgggagcaccaattccttcttgccttgtttctatcacattgccacgagagtctaatctcttcttgattatatcgtgtttaacatctagacgctgctctccgctgatgtccatggcatcaagactgagtatggaacatggaagcgcaggaaacgtaacatcaaaattgatacgcagcgtttcggctctggaagtgtcgacgacaagcttggtctcggtgacagcgtgaagatacaaccggagctcggagtagaagagcaagagcatgagaatggaggaagcgagagtgatgacaccgccggagagcgtgcggctgtagaaatcctcgttgattttagggtaggcgtctaggttgcggagcttgcttattatgctctccatgattattggatggatccaaaaccaaagatttaagatgatgtaataagaagcagaaattaagaaacctaacttttattaaccatttgtgtgattgtttttgaaatcggaaacaccttattcaatccaattttttttgctgtgataggatctatcagattgaattcaatttttttttctctgaatcgacaatgcgactctgataatcctttcttctattttaactccgagtcagcttgtttgcttttttttttgtgtgtgtgtgtgtgtcgtgtcgtctcttctttgttgattcaggatcttttcatcagctcactttctctcttcatctgtcaactaaatggatgatactcacaatctga

SEQ ID NO: 2330 - DNA, 1588 bp, Glycine max
  misc_feature (1582)..(1582): n is a, c, g, or t
acctatcaagttaatttgcgtctatattcattttggcatcgaggttgaatctcatcggagagagaaaaaccataaccatgtctggaagaggaaagggaggcaagggtctcggaaagggaggagcgaaacgacaccgtaaggttctgagggataacattcagggcataacgaagcccgcaattcgccgtctcgcgagacgtggcggcgtgaagcgtatcaatccgtcaaactcccaagaaacccttcagaaccttcctcactctttctctcttcctttttttttctttttttttctataaacctaacctaaccaaaaaacccttttcattattcttcattcatttattcttattcatcttttcattcactcactctcactcatggctgaagatgggaacaacaacgatgtacccttacacaaattcaaagacagcaatccaaaccctgaagagttcgatgcaaagggttacagcctcagcggaaaaatcatgctttcagcaataatccttcttttcttcgtcgtcgttttgatgttgtgccttcatatctacgcgcgctggtacctccggcgtgctcgccgccgccagctccggcgccaacgcgagctccgccgcacccagcttgtcttttacaacgacgacgccacccccgcagccgtgtcacgtggcctcgacgccgccatccttgccacgctccccgtcttcaccttcgacccggaaaaaaccgggccggagtgcgctgtttgcttgtcggagttcgaacccggtgaaacgggtcgggtcttgcccaaatgtaatcacagtttccacatagaatgtattgacatgtggttccattctcatgacacgtgtcctctttgtcgcgccccggttgaacgcgcgccggaaccggaagttgttgttataacagtacccgatccggtttccgaaaccggttcaggcgaaaatgagaaccgaaccggttcttcttcttcttcctcttcggttggattgagtaagcctaagccttcgttggttggtgtgacaattgaggtgcctccgagggacgagaattttcaaaacgagttgcaaccgagttgcgactcatcctcctcgtttcggtcgccgatgagtcgcatgctgtcgtttacgaggatgctcggcagggaaaagaaggggaacgtgtcgccgtcgtcgtgcggcggcggcgattgtagctccgccgcggagcgaggtgagcgagaggagactcagtgagtcggtgactcgggtgctgacgtggcacttgttggaagcggaaaaacttgggttgttggcgcgtggcggtgtgtaatagtgacgtttctggattttaatgtaggcggtgagcggcgcgtgagttaggtggcgcgagatactgacgtagaatggttttgggatgaacataaatgatgtacttattcgttgatatatatattttttctttatttgtttcttatcttcgggttccaaaaatagttaaatagaatacgaaaattgctaattgtaatgcttgcttacatagaaatgaaaccaattttaaagaataaaatattttttaaaaaagaaacaaaaaagggcggccnccgcct

SEQ ID NO: 2331 - DNA, 1128 bp, Glycine max
ttttttttttttttttaaccaaggaaaaaatagattaaagaatatttggagatacaaaatctaaatggcgacttgagttgatattttctttatattctaacaaaatttagctatcctatcagctcaataattggctttgcatagattgtaaagtgtaacaaataacttccacacatgtacaaatgtgtcgtcagaccatacttcccataagaacccataaattgtctctgaatgaagatactccaagaaaaaatgaaatagccatgacagtttctttgttcatgagtactctgcatgatatccaagactagttcaggtaagcatagtatgcttcacaacatgctgagagtgatttaagggtccaaagtagtcgcaggaggtggaaggtgacttcctggccttgacgcccatcctttgcgactcctgtattcctctatagcctggagtctaagtctctcttgagaagcattcttgaatgccttaggaggaacagctaactttggtggggcttgtacaatatctccaaattttattttttcttgtccagggaagtccattttttcttcattggattttttgtgcttcttcttttttgcttcgaaatactttttcttacgttcctttctttttaactgggagcttgttttatccacttccatttcaaacctgagatctttaacctccttcctctttctttttttctttttcttgtcaacaccaccactttccatacgcttttcttcactcctatccagaagttgaggtgccttcaattgtccattagagatcccctgtttgacatctacagtttcaacatcacctgtgtcctttaaggcagtcttattttgggcatgcccaccaacgtttttcttgtcatttgaaaacccaatcgccccagttgggttttgtgtgaaagagatgatttgacgaagtttggagggcaaagcgtcatgtttagaagcatcaggtggaggagggaggccagtgtagccaccatgagcagccctgtagtttttctctcttcttctttttccctttcctcccattactctctcttgccaaacccttaattctctttctttttattcttcaaaacaacccccctcccgtcgtcccctcgccgcccta

SEQ ID NO: 2332 - DNA, 1067 bp, Glycine max
atttttttttttttttttttttttttttttttagcaacaattcaacaactagtatttctcacaatgaaacaactatctgccagagctagaatatgaccactggtgtgctttacaaaaaaatgcactagtcatgacaagtttgtgaggtataactgctatctgctaacatacacaacaatgtaaccaccaatttcatcttggcggttcattttaaactttatggtacttgtatttttgtcctaaattgaatctattgacatgctggtcaaaaccattgagtactacggtccttactgctgcaactgcttgctccaatgaagcgtcaatctgctttcgttcctctacactgaatttttgtagaagataagctcttaaatccatagttccaggaggatttccaattccgactgcaagtcgaggaaaagcactgcaaccatccaaatggcccattacatttttcaatccattgtgatgtccatgtccgcctttaggttgaagccttaaaacaccatttggaaggcttgtctcatcaaaaactagtagaatatgacgcaagggtacttgataatatgcagcaagtggcccaaccgattccccactgaaattcatgtatgtttggggctttgccagcaaaatcggtacttcaccaatagaacctattccaatgagggcctttgactgtattgtgttcatctgaatcccttctgctcgagaaaggctatcaattatttcaaatccaacattgtgccttgtgccatggtatttgttaccaggattgcccaagccaataatgagccaaggagtatattccactttagctccattttttgtctgtgaaaccgaacaacgaacagaaaaacatgttttttgaactgaagaaggaggataatgaaggttcccgggatagcttaaacaaaagctaggggcagatactgcatgcaacattgatcttaataaataatcggaaccgccacgagctgttgctgcttgctctttcctcttccacgctcactccataaacccaaaggaaatggcggtttgggggattcaatgaatgaatgattttt

SEQ ID NO: 2333 - DNA, 3240 bp, Glycine max
  misc_feature (38)..(38): n is a, c, g, or t
ggaattgttataggcttccttatagggcgaattgggtnccgggcccccccttcgaggttcagtacgtagccccccccccccggttttttgttattcagagacttgatgcagtcaggcgttagaccaaatgagtatacattttccggagttctaaatgcatgtgccgaccatgctgctgaacacctgggaaaggaggttcatcggtacatgatgcgcacagggtatggtccgttttcatttgctataagtgcccttgttcatatgtactcaaagtgtgggaacactagagttgcaagaaaggtgttcaacgagatgcatcagccagatttggtatcatggacttctctaattgttgggtatgctcagaatggtcaaccagaggaagcacttcatttcttcaaattactactccaatcaggtaccaagcctgatcaaataaagggttagaatatttccattcaataagggagaagcatggattgatgcatactgcagatcattatgcatgtgttattgatttattggaacgatttggccggttcaaagaggcagagaatatcattgataacatgcacataaagcctgataaattcctttgggcatccttacttggaggatgtagaatacatggaaccttgaactggctaaaagagcaccaaaagcattatatgagatagagccagagaatccagctacctatatcactctgtaatatctatgctaatgctggtctatggaccaaggtagccaaagttagaaaggatatggacaatagggggatagtgaagaagccaggtaagagctggattgaaattaaaagacaagtgcatgtgttcttagtaggagatacatcccacccaaaaacaagtgatatgcatgaattcctaggagaactctcaaagaaaattaaggaagaaggctatgttcctggcacaaactttgtgctacatgatgtggaggaggagcagaaagagcaaaatcttttttaccacggtgagaagcttgctgttgcctttggaataatttcaactcccacaggaactccaatcaaggtttttaaaaatttaagaacttgtgtagactgtcacaccaccatcaaatatatatcaaagattgttcaaagaaaaataatagtgagagattcaaataggtttcattgttttgaggatggaagctgctcgtgtaaagactattggtagcactccacttcaacagacatgccaagcattgagtgaattgctgtctttgatccatgattctgacagaatatgcctttgacagtatttgcattggtcagattctttttcctcctttccctatcatttaaatggtgttgctttcaagcgaaattgttagattccccactgcaaccagatatgaaatgttcaataaagattgagatctacattatgcaggaatgaccattgagacgtctataaaaatggaatcttagaagtattttttacagatatattatttatctatggattatgtaataacaataatggtgggggctgtgtattcaaaattacagtactgaccacaggcttgcattaggcttggcatcctttgtttccgagttactgagatggaggtaaattattctgaactgacgcctgctaatatctgcagtggaggatcaaggacagttccattatacagagttggtttgacttaaaatccaaacagcatcaagcgcagctagattcttggattttggtatcacgatcataacaataaagaacttaaaggattttagccccgcattcggtaggggagatcaattatagactgactagaaccaattgatatttatagatggacatatgtacaaacagatatttagttgttcctgtccttcccaatgttaattataagctataaatatagtgatcctttttaattttgatgctattgatcgaataggggactatgaaaaatgggaaagttgttgcagtcaagaaattaatttcaggaaattccagcaacatagatgatgaatttgaaagtgaagtaacgcttataagtaatgttcatcatagaaatcttgttcgtcttcttggttgttgcagtaaaggccaagaaagaatccttgtttacgaatacatggcaaatgccagcctagacaaattattatttggtaactatttaacatgttatttgtgtaagttttactttcttaatcctcttttctcctttaatattttgagcatataaatttgggaaataggacaacgaaaaggctccctcaactggaaacaacgccgtgatataattttgggcacagcaaggggattgacttatctacatgaagaatttcatgtttctatcacacatagagatattaagagtgccaatatcctattggatgaacaacttcagcccagaatttctgattttgggttggtgaagctccttccaggagacaaatctcatattaccacaagatttgctgggacattgtaagtaaaaaaactgcaaatgatcctcagcctgaaaatttaaaatagcaatatatactgccctcacatgcaaaatagtctcatttctcataatttctttataatatatgtggtataaatgttatgcacttgtcagaggatacatagcacctgagtatgcactccatggtcaattatcagaaaaggctgatacatacagctatggaattgtagtcttagaaatcataagtggtcaaaagagtaccaatgtgaaggttcttgatgatgatggcatggaagttgtatgaaagaggcatgcacttggagttagtggacaaaagcttagacccttatagctatgatgcagaagaaatgaagaaagtgataggcattgctttgctgtgcactcaagcattggctgcaatgaggccaaacatgtctgaagtagtagtcctacttagtagcaatgacttacttgagcatatgagaccttccatgcctatcattattgagtcgaatttaaggccccaaagagatatctcttcttcaactgcttcctctacgactaatgcaactatctccaattcaatagtacccgctcgatgattaaatatatgatgtaaaattattttttttttttgtccagttcattattaaggatgattattgttaaatcttacttatttttaatagcaaattatattgctgactttttctcaaaaaaaaaaaaaaaaaaattctggcagccccgggggatcactagttctaagggccccccccaccgccggtggagcctccc

SEQ ID NO: 2334 - DNA, 1772 bp, Glycine max
atatggcaacaaatcaaactgttttaaataaaattttttttttaaagaaaaaagaaacaaacattttattgggaaagaaaaacagatgtgtttgtgatctatactataatgggaaggtcaccaaaagaagtcatttgcatctttacacaaccatcaagcagatcgtattttcgttttaaacattttacaaattggtcttgggtttgacacttccagttccagctacgcgccttgtcactgaccgcatggttacaaattcttctgcagccgatgggtgtattcccaccgtgctatcaaactgtgccttggtagctccacacttcaacgcaacagcaataccctgcataatttcaggtgcatcaggtccacacattgaggctccgagaaccttatctgtctcagcatcaacaacaagcttcataacagttttttcttgtcgcccagagatggtatttttcataggattgaaggttgatgtaaaaaccaacagatccccattggtttgctctattgcctgctcctcactgagaccaactacagaaagtggtggaatgctgaacactgcatagggaatattactgtagtctggcttgattgtttgcccaccaaatacagttttagcaaagtacgatgcttccatcaaggccaccggagttagattcattcggtttgtgacatcacccacagcccatatgctaggtatgcttgtgcgggaatactcatccacctttattgctccagtgttgtcaagctcaacacctacagtttctaaattcagcctcttagaattaggagccctaccagtggcaaacagtacagcatccgcaatcagctcttcaccatgatctgtaataactttaatgccgtcctctgttttgatcaactgtgtcaaattggtccttggatgcaaattaattcccctgccttcaagatttcttgccactgcagctctcatttcatcatcaaaacctctcagtggaagttcctttctgaaaactagatcaactgtggaacccatgccacgccatatagatgcaaactcaactgcaatataacctcctccaagaaccacagcatgttttggaagatcctctaaacttagtgcctcgtctgatgttatacccaactcctgtcctggaatatttggacgttgagccctgctgccagttgcaatcaatatgtgctttgctgtgtaggacaatttagtgccatccaattgtgtcacctcaacttcatttggaccaactatctttccctcgccttcaaataatttaaccccccaattggataacatccgcttgtaaagtccatttaatctgtttatttcatctgtcttcttttgcaagagcttcttccaattgaagtcaactttctcactcaactcccacccataattcctggcatcctcaagatcacctccaaaagatgctccatagaccaaaatctttttgggaacacaaccacgaataacacacgttccaccgactcctccaattgtttctgaactaattggatgaaatggaagctcacaaatccccaccttagctccaaaattggatgaaaatctagcggcacgaacgccaccacttccagccccaataataaacaagtcgaagtcaaaattcgacacttcttctccaccaccttgagccaattcagcttcaccatcgataagcatcttcctagccatcgcaatcgaacaatccgaactaaatctgcgtcgtctcgtaatagcagtaattaggtttgcgaaagaagaaacgaaaaaaatt

SEQ ID NO: 2335 - DNA, 1060 bp, Glycine max
tttaagtgtcaaatgtataaacaaaagctttcctcaatcttcttcttttaacatcttttaatggccaaattgtatatttattccacatattataagtcatgtctttctgcacatgagcaaatcttcccaaaaaagatcacttgtaggctcataggacatcaaatgacccatcaggactttgatattagtgtccgaacaatccatgctactactgtcaagtgtacaacttacatagaaatatcataaaaatgggtgcaatgaggagagagcacaattagctttacaaaaaattatagcccaacaaagtatcaagtaattgcagagctcttcattaactcttgctttcacactttttgtgtatgcatttcatcctggagtcttccttccctattccttcaatcaaataaaatacaaactgatttccagaacctgtatatcatccctccataatcaatttccttgacagtgaaaaatctttcaaggtcctcgataactgcgaaaacataaacaaccctgaggctgatcatgagggatcatacctccaccctttgaagtgtcaatagcttccaacatggtcaccacttcatccatctctggcctcttgtcaggattcgcatcccagcatcttttcatcacattggccagagcgctaggacaacatcgcggaatctctggcctcaaattctgtcgtacgacagctgatgtcacttctgagaaactaaggtcaggatatggcatgtcacagcagtatatctcccataagcatatgccgaaactgtacacatcacactttctattgtatggattaccatttagaacctcaggagccatgtaaccaagggttccagtttcacctgtcatgtcatgaggattggaggcctcaatacgagctactccaagttcagctattttcaaggttcgtgtcttgtccagaagcatattttctgttttaacatctctgtggcccatcttctttgtgtggagatcgctcaaccctcttgcaaggtcaagagccagttgaacaaccactttaaaagccagcttccttcttcggttttta

SEQ ID NO: 2336 - DNA, 937 bp, Glycine max
ttttttttttttactataaaaagtaatcgtttaaccacaaatatgggttcatctgcgtgtagtcgtgtacaagagcatttgtgtgtgcagaaacatatacagtgttgttaacagaattattatacaacgttatacacaccttatgaacaatatagaaaccaatgaagtcaaatgtcacgtgttctccaaaaatcaaaattaccacaaatatcttactttaacgagaatacaaattgacaaaaaatgaaattacaggagagctttacagaggtttgaacatacatttatttttccatggatgtcgtaagtttcactatctggtttccctttttacgggtaagaaaccctaatgactagcaggatgtcagaactttgtggatttcgctattaccaatcatcatcaaggctggcttggtggaaacataaaacagtacatataaatatgaagaatgatacaagctcaatgagcatcgcgcctgtctcaatcatatgagcgtgcttgagaatgataggaatggctaagctcccaacagctgatgctccagtcaaaaattttgcagcatctatccaaccaccaccatcacgggtcattagaaattgagtggatccacctccaaagaataagcaaggcataggaaccagcacatacatcagagctgataacattggccaccaattgttatatattgcacatgccagaatctgaagcaaaatgctagctgaaaacataaaagccaacccagcaaggacgtgtactgtcatcgccatgcctgagaagggaccttatgtcgctcgccggctcgctcgctcgcctctcccgattgcaaataccgaacaaagattttctccggcggaattttgaccctccctttttccttccactttcgagctattttccgttatagaacgggggcacgaaacaattaagaaaataaat

SEQ ID NO: 2337 - DNA, 1376 bp, Glycine max
  misc_feature (1323)..(1323): n is a, c, g, or t
  misc_feature (1328)..(1334): n is a, c, g, or t
  misc_feature (1336)..(1342): n is a, c, g, or t
  misc_feature (1345)..(1345): n is a, c, g, or t
  misc_feature (1347)..(1349): n is a, c, g, or t
  misc_feature (1351)..(1352): n is a, c, g, or t
tcgagtcagtacgtaggccccccccccccagatgaccaagatgctgaatattttggaggactacatgaactatagaaaatataggtattttacacttgatggatcatctactattcaggaccgcagagacatggtcagagactttcagcataggagtgatatttttgtgttcttactgagtacaagagctggtggattgggtatcaacttgacagctgctgacacagtcatattttatgagagcgattggaatccaacattggatctacaggcaatggacagagctcatcgtttgggtcagacaaaagatgttactgtttaccgacttatatgtaaagagacagttgaagagaagattcttcttagagctagtcagaaaagtactgtgcagaaccttgtcatgactggtggttctgtcggtggagatcttttagctcctgaggatgttgtatcattgcttctagatgatgttcaattggaacagaaattaaaggaaatccctcttcaggtaaaggataagcaaaagaggaaacaacctatgagaggtattcgggtaaatgaagacggtgatgcatcaatggaagatctaacaagctctgtagcccagggtacctcagataatgatctttccatggatccagagggttcaaagtctagtaataaaaagagaaaagctttctcagataagccaacttcaaggccaatgaattcccaaaagatgagtgaatttagtactacgcctatggacgatgaattggatgttgttgatccagtgggtcagaaacccaagagacccaagaggataaagaagaatgtgaatgaaaagtttgaagatgcttttactgggattgctgccctgatcccagagcagacccaatttccacctccaccaagcgattttagtgccgggggttctaaagcagaatcaggccaagacaactgaagacatagtgattcttaaccactacaaaaactttggagttactattctcagccctatggattgactttttttgtggagactgctaagttggctctctggtttatcaacagtttctagttccctatttcttggttatcctctcactgcaaatagtggctgcaaagacaggagaagctgtatatcctagattgtatatagtagtccttaatgatagatattagattctcctcccttccacagtttgggggggcgggggctttgtagtttgtacagattgagccatccttacttgagtcgattttttatgttccacaagcaatatttataacaaatgatgagtaatatacggtagtcttgctactcgtattaagtctgttgcntgacnnnnnnnannnnnnnaanannnannaaaaaaaaaaaaaaaaaaaaaaaa

SEQ ID NO: 2338 - DNA, 1003 bp, Glycine max
aattcggctcgagctttggtcccgattctggcatctttcttagagatccctaactcacttgtctcttctcccacccttaaatccttccctctcctctcccgcaatcaattcatctctcacaacacaaaaattgttaaattcccaatccaatagtgttattagtccataaaaggaaaaaataaaataaaaatgaatgtgttggattctaatgtggaggctctagccttcaactacttgagcttcggcttgctcacagccctcaacaacttgtggacctggctcgctctcttaaccgccgccttcagcttctggaagattcgctccacgggctgtctcaagcccgagcccaagcccgaggcccaagtccaggcccaaccttccatcaggcccgaccgggttgcggatttgttaacggtggagaaaacggagccgacgcaacaagatgcagtgttggttcctttttctccatcgttattgcaaggagaaaacggcgcgaggaaggggaagcttaccgtttattacgagaaggacatggacatgcaatgcacgtgcggcgagcgtgaggggttgttaacggcgtgggaagagaaagaggggaccgaaacggagtggtggaagaggtgggagaggttgttgcggttgagaaacggggagaacgagaacgggtggtacacgtggcaggacttgacagagcttaacggcaacgtcgttaggttttgggactgtgggttaagtggttctttcgtcagggaatcgtggtacaactccaattccaactccagctgtatccatgtctggtaaaaaataatcatgatagcgtgttggattttaactattaagctctctccttcaagactttggagagattgttgagatttgagaatttgtatatatggtattttggtagtggatttgcaatttttgatgatattataaattagagcaataaagatcatcattgttatcgtttacacatttgggtttaatatttgacacgcagatt

SEQ ID NO: 2339 - DNA, 1739 bp, Glycine max
gattcataaacccacaagacacaagacagaacacagagcacacttgtccattctccaaaacaaaatgaagagcctcctcttctctctcttcctcttcctcttcttagcctcctccgccgtcgccaccgtccccgcccacaacatcacccgcatgctggccgcacaccccggcttctccaccttcaaccactacctctccgtcacccacctggccgaagagatcaaccgccgccagaccatcaccgtcctggccctcgacaatgccgccatgtcctccctcctcgacaagcacctctccctccccaccatcaaaaacgtcctctccctccacatcctcgtcgactacttcggcgccaaaaagctccaccagatcaacaacagcaccaccctcgtctcctccatgttccaggccaccggctccgcctccggcaccgccggctacgtcaacatcaccaacctcaaggccggcaaggtcggcttcgccgccgaagacaacgacggctccctccactccttctacgtcaaatccgtcaaggaaatgccctactacatctccgtcctccaaatcagcgccgccattagctccgccgacgccgaggcacccaccgccgccccctccgccatcgacctgatctccattatgtccaaacaaggctgcaaggccttcgcggaccttctaagaggctccaaggcccttccatctttcaaggaaaacgttgacggcggcttaacggttttctgccccaccgacagcgccgtcagcggtttcgcgccaaagtacaagaacctgaccgaagctcagaaggtttcacttctgttgtaccacgcgactcccgtgtacgagtcactgcagatgctcaagtccagcaacggaataatgaacactctggccacagagggagccaacaagtacgacttcacggtgcagagtgaaggggaagacgtcagcctcaagaccaaagtcaacacagccagcatagtggggacattgatagatcaggatccattcgtggcatataagataaacagggtattgatgcccagagagctcttcaaggccagcgacgcggcggatgcacctgcccagtcgccaaagcccgccaagaagaagaacaagaacaagaacaacagccatgcggcggatgcaccggcggacggaccatccgacgacgacgctgattcggaagatcagaaggctgcggatgaagacagcaatggagtaagcggattgcacgtgagattcttcatggtcttcttcagtttaattatggcttttttggctctatgaaacacccacatggattatggagtgtcgctactatacacttgtttcaattaagattcttttctttctttaatatatgtcaaggaaataaaacgctgccaccgacatgtaggaggccatgtgtacttttttttattataggttttgtatttgttgtttgtctgttttccgaattattttattggcctctttttttcagtgtgggtagatccggtttgtgctacctgccagctatgggatgtgtgcatataaacacttttcaactcattagttttttatgtcaaaaaaaaaaaatcatgttttctttatttatatgtttaacagcattttcctctaactgcatcatagaattttaaaaatatggcctacccatcgatcaaacttgtaccttatgcagtggcagagcattttaatcccaaggagataaaaaaaaaaaaaaaaaaaaaaaactcag

SEQ ID NO: 2340 - DNA, 1684 bp, Glycine max
taatacaagagagagtagaaaaatcaaacttctctgctttcaaacaaaatgaacaacctcttctttctcttcttcttcctcttcttagcctccgccgccgccagcgtccccgcccacaacatcacccgcatgcttgccaaacaccccggcttctccaccttcaaccactacctctccctcacccacctcgccgaagagatcaaccgccgccagaccatcaccgtcctggccctcgacaatgccgccatgtcctccctcctcgacaagcacctctccctccccaccatcaaaaacgtcctctccctccacgtcctcgtcgactacttcggcgccaaaaagctccaccagatcaacaacagcaccaccctcgtctcctccatgttccaggccaccggctcagcctccggcaccgccggctacgtcaacatcaccaacctcaaggccggcaaggtcggcttcgccgccgaagacaacgacggctccctccactccttctacgtcaaatccgtccaggaaatgccctactacatctccgtcctccaaatcagcgccgccataagctccgccgacgccgaggcccccaccgccgcaccctccgccatcgacctgatctccattatgtccaaacaaggctgcaaggcattcgcggaccttttaagaggctccaaagcgcttccggctttcaaggaaaacgttgacgggggcttaacggttttctgccccaccgacagcgccatcagcggtttcgcgccaaagtacaagaacctcacagaagctcagaaggtttcgcttctgttgtaccacgcgactcccgtatacgagtccctgcagatgctgaaatcgagcaacggaatcatgaacactctggccacagagggagcgaacaagtacgacttcacagtgaagagtgaaggggaagacgtgagtctgaagactaaagtcaacaccgcaagcatagtagggacattgatagatcaagatccattcgtggcatataagataaacagggtgttgatgccgagagagttgttcaaggccagcgacgccctagaccaagcacctgcggaatcccctaagcctgccaagaagaagaagaatgctaagaagggaagcgaagattccgatgcggcggatgcaccggcggacggaccatccgacgactcggaagatcagaaggctgccgatcaggacagcaacggagtcagcggattgcacgtgagattggtcatggtcttgttcggtttaattatgggttttttggttctatgatatcatgtcgctagtatacagctcaaagcctcaaagattcttttctttttctctatatgtcaaccaaataaaacggtgccaccgacatctgtacctatttattgtttctttgttttcagtgtgggtagatccggtttgtgctacctgccagctgggatctgcatgtgtgcatataaacacttttcaattcattagatttagatattaattaatattgccctctcatgttttattggtattctttttttttatgctgcctacttgttttaatttccacggtcaattagtagttcataataatcaatgtttttcggactccatcaatatattttaattttgtaagacattaagtgcagattttgtatcgtagtaggacattggcttaaggtttgaactaaaaaaaaaaaaaaaaaag

SEQ ID NO: 2341 - DNA, 1764 bp, Glycine max
ttttttttttttttttttttttttttttgtcaaaaccaaaacatgctattagtatatcatatcattacctaatacagagattttattacaaaatatgatattttaaataaagagaaacactaacaagctaagctaatatgcaagccaaacgttacaacaaaaaagtcctactggttttgtatccaccagaacaacaaccatggatccaacaatgtccattacacgcaatccatgttaaattgttcattattcgtactcaaaatgccacctacaaacaaaaactcaaaatagtcacaaagccaaaaacctgttgactcacgttgacctctatctcttatctcttaagtcttaactgaaatttcacaaaagcaattctttattgaaaatccaactgaacttaacgccatgatgcttcttcatcttacgcgctcgctcatcagcgcgctcttgcaacctcctaatcctcggcgccaacccacacacgaaatcctgcgcccgcttcccctcagccatcaatccttcaagcttctccaatctccaccgttcaacgagaaactccaagatgtctgcgtagtcgttggcggtgtacacgcctatgcgctgcgccacagcggagtagtgctcgaatagcctggggtcatccccatcgtacataaggtgcgccggcatcgtgatcttcttctccatcatgttccctatggccaccattgccccggtggggtccacttccagaagcttctccacgattcttgagtacgcgttctcgtgccgcttctcgtccgctgcgatggtcccgcataggcgcgccagcactggatccccgccctccttcgcgagccgagccgtgttcccgtgcgccacaaatgttgctcgctcttggaatgacgtgtacacaaaccccaaatatgggttgttgtctgtcccagggtccatgccagctgaaatgaggtaatgtacggtcttttcgaccttagccatgtcaaccctcccagagagatacaaataagttctgagcagatccccgtgtctgttttcctcggcggtccaggcccgggtccacacggcccacgggctcgggctcgtgccgctgtcatctttcactccatcaaggttgttgatcatggtctggtaagtgggaagcgcgtcctcggtgaccatatcacccaccagcaccacaaagtactcatcaggtaactctttagtgcgttcgcgaagctccttcacctgatggctgaactcttcatgcggaagggaggggtcagggaggaagttttgtggctgccagcattgctccacgggcttcagcagcggtaggacccactccgaggcccatccctccaaggacttgaaaatttctttcttttctggaggcattgagtgggccttccgggctttgaacggcgccgcggaaaccgcagcgtttaacggcggaagaaggtggcggtggtgggcttttctagaagaacacggaagttgtggaagggtttgggtggtgatggagtggcaggttcgtatctgcatggttttgattacgtgtctattgtacttgactagtgttgtttgagtggaactgtggagaggttggagatatttgtaaagggtgtgactagtgattagcccttggtttgttgataatttacggaaatgccatgttgggtatttaagttatgtagtaatatttaccaaattagttgttggatggttgaagtttatgcgaatttatgtggaaatttggcccgatacctgcgaaaatgtgtgtttaga

SEQ ID NO: 2342 - DNA, 1094 bp, Glycine max
ttgtttttccacgcgtccgcccggccgcgagaggacgacagaaggggatgactttagtttcttccagccgagacagaaaatttgaacatatgttccttttttgttacaacgttgttgtttccaacggtacaacggtagatgatgggaacgctatctacgcaatttcgttccatcaaacgcccaaatccaaaccctaaactatccaaatcgtcatctcctacaaaatcagaaattaaattcatcgctaaaccaaaaccaaaatcagagtcagagtcagagtcatggtctgtttatctcatcctctccaccaaccatcctatcaaaacctacgttggaattacaaacaatttccctcgccgtttgaagcagcataacggtgaacttaaaggtggtgcaaaggcatcccgtgctggaagaccttggatttgtgcatgcataatttgtggttttacagaccgaagtgaagctagtgtatttgaatcaaaatggaaaactttctcaaggagagctccccgcaaaaatcaaaatgacaatctctccaagcaaagtgaagattcatcattaccactgctgcgacacagacaagcggctctgaatagagtgaaaggttcactcgactgcgctcacttagaaattatttggcatttggatccattgtgatccaactgccacaatgtatgtgttttgattatgtaattgtaataagttcaaatagcaaaacataggccataagagaaatattaagaacacattttgtgttattagttaaaatttattgaaaattataaaattataagtggatttcattaagtaaaaagtgagatcctccaaattttataattttttataataaagaatattaaaaagagtgcgtagctagcatttttctatatttgatagtactagcaaattgtaccagacattgattggttcttgtagtaaggtctttgtatagtatataagtgacgaaaggttataatttaaaaccagctattgggtatgtggagcatggactcatgaagggagaatattgtagtattgtcccatatgcattgcttggttcttgaagtaaggaatgaaacgttaatgtaccc

SEQ ID NO: 2343 - DNA, 946 bp, Glycine max
  misc_feature (13)..(17): n is a, c, g, or t
tttgttttttttnnnnntttttttttttttttttttttttttttttttttttttttttttttttttttttttttttttgttgtgacaagaaaagagattcatattcatttaagaaaaccacgcaccatacaataaatgaactctctaacgccaaaactaaagaaagtagtttaaagcaccaaaacaacattgttgtagctcttgaggtaaatctgagaaagaccctaagggatgcagctggctagcttctctgtaacatgggattttaaaccaccttttcagaattcacactgtcttcaacatcccaaagaaattaataaagaaatcttgcagcatctccattaattaatgtagcctttcttgctaggataaactcattttttctagtacgtgtccctgggagcactgcatttaaaacattccattctgctagcaaagttgtgctcattgcatcctgatctgctgcatatccaatcaccagatttccatccaggtcttccactgccaccaaaagctctggagcgcaagatgtcagaactgttatagcctcctccagccaagtcatccttgaaagcaccacacttgaagcagcttgagcggctagcaaagttgtgtgcaccacagttagcagcagcacagtaccagtcgccggggcgaacatctgagccagttaaaccaaatgaggaccctcctcttcctccaaaaccaccaaaatcaacaactctatctccatattttgagtccccacatcgctggcatgagtctctcctctgaaagttcaggtgctggcacgacctgcaattccagtctcctggcctgctcatattttacttctctgcaaaattactcaagataatacagtgagttgaagtattagagatgcagaaactgaagaggatttgctgatggcacgacgttctcttctcgcagccgtcggacgcgtggg

SEQ ID NO: 2344 - DNA, 1687 bp, Glycine max
cggctcgaggtacgtaccgacatgactccaacctgatggggttaaacactgcttctgcgtaggattcgatgccgctactccttcttcagtttctacaactgagtttcatatctcctttctattgatgtttatgctgaagactgaataaaagtctgagaaagctgcttactacaaaccaacaagattaactaagaaatcatcttttgggacgatgcaaactgtttatcttaaagagcacgaaggaaatgcgcacaattttgtgggcacgttgtcttctgcagcttcagcaccctggtggagtgcttttggatctcaatctgttcatcagggagagtcttgtggccaagtgaaacccttttcattggagctgccaaactgcatagaccaacttgctgccactaagccactagcaagaggagctgaccaagtgttgggtaaagggcacataactcagtttacaatctttccagatgattgtaaaatgtcagatgatgcgcaaaagcttcagacaaccatgtcactgcagtcatcgcttactgatccacagtctcgttttgagatagggtttagtctgcccacgatatgtgcaaaatatccttatacggatcaattttatggactcttctcagcttatgcacctcaaatttcgggacgtataatgctgccacttaacatgacatctgatgatgaaccaatttacgtaaatgctaagcagtaccatggaatcattagacgtcggcagtcccgtgccaaagctgtacttgatcacaaattgactaaacgtcgcaagccctatatgcacgaatcacgccatctccatgcaatgcggcgaccaagaggatgtgggggtcgcttcttgaacactaagaattctgttgacggaaatggtaaaattggaaatgaagtgcataaaactgttggtgaacaattgcagtctagtggctctcagagttctgaattccttcaatctgaggttggaacttttaattcatcaaaagagactaatggaagcagtccaaatatttctggttcagaggtgactagcatgtattcgcggggaggtcttgacagcttttctctcaatcatcttggatctgctgtccactcttttgcagacatgatagatggtgggcgcggtatgatcatacccaccaaatgggttgcagcagcaggtaactgctgcaaccttaaagtttgatttgcaaagaatcaagggtgggcttgctgtagcattgcaccaggcccatcctcgatgaggccagatgaagaagcttcgtttcagttgcgtgtgctgactgtgacaagtttcgctcggtaagatcgtcctcacatctggtctaggcaatccatccttggctcatactttggcaatccatccttggctcattgtaactgaaggcaactcatccttggcttgatgtacttgcagtaatttgtctttctgcacaggaatgttgttggcatggtacaaactaatgacttgatatcctgatgcagaagacaactatgtttctgtctttgtgtgaaaatgaaagcatgaaactctagttatgtgtgcttcgaataatgtctaaacgtggtgttgtattttgtatttctgacttcgaggaacaatgtattatagaaccttgttctgtggtctttgttagaaaaaataaagcattggtgtgtttttctcctgttgagc

SEQ ID NO: 2345 - DNA, 2094 bp, Glycine max
  misc_feature (2)..(6): n is a, c, g, or t
tnnnnngtgcaacacgtgagaatctatatctctgaagatgcatacatgtgaagacttaataagtttcatgttggatcatgataatgatactcaaatgctacaatgaaagcaaagagtagaatctgtcacattcatagatacaactacttacaattgctacagctcttaaggcaaccaagaatttcgggctcctaataattaacagccttcagagttaacaacctattctttgttgcgagaagagcgttccttcctttggccaccaagaatacgagaaatttgcaaacctctgctgaatgcttggttgaacagcatacgggtttgaaattctgaaacaaatggaaaccaagccagaaaagcaacaggagtgaacaatagcaaacccatgacaatctcataacctcgagcaagagttttcactgatccccaaaacccagcccggcgtactacaggttttaatgcttgagcaatctgcagcattccccaaccagttggcatgaaagcaagaatgcaaacaacaatgtcctgcactgtcatatgcggaagagcaatcaaaatgacaagaatcgagacaaaagtgaggaatatcattcccttgattagtcggaagacaagttgaaaatttgcactgaatttacgcctcccaacagataccgtcttcatcacaaacaatattacgaatatcaccaaccatgaaatgccatagaccagaaaactttttgtgcctttcttcgtaatatttaagtgatataccagaccatactggtagataaaaaatctcaatgataacagtatctccactataattccccgcattccagaatattggagatgctcttgttcctcttcccaccaagattcccaacttttttcaggcagtacacctataccccctcgattactaatccatttattccaatcggtccaatcatcaacaattttttgccattcaaacccagaaggattgaacaagaagggagcaaacagccaggtacccaccataaaccacattgatgcggtaatcaagatatatgcaacagtacttctgtaagaatgaccaaaaatttcatatacaacaagtaatatcatgagctcaatacccttgacaaagtggctacgagagtaaagtctatagttgtcagcaaatttagcatggaaaaccacaaatcctcgaccagtgggtctatatttcgcacctccatgaagtaatgttcttccaaaataatgagtttttgtcccaagtgaaaatgtgaagaatactggggcaagctgcagttgcattaatatgaactcactaagtgcagttcggaaacccctctccaaaccgatttccatcaacatgggcaaggccatcaaaaccccaatttgaacaaatgactgagaagcaagagccacttgaagaggcttattgtctcgaatggctttctgagtgctcagaccttcttcgagcccactgagaacaagatagaggcgaccatagaggaatacatatacagtgagaacagttataagagtgctgaaataaaatccaactgtggtgaaataacaggacaacattctgaagaagtcaaaacggtgtccaagtcggtatacgtctcgacttagtgtttgctctccattcccattagctatttttgcttcaaacatagaaatctgattgagacccacatctcttcccttccctacttgtatgtactcatggtgagtaacatttccttcacggagtgtagagttgaagccagcaaaaatatcttcacttagattgataaccttggaggctttactcacaccccctctcgtcaggtgaaaaagcctatcaaagacatcaggatgaccataatggaaacgaaccttcaaaggattagccaacaatctctgaccaattgtcacgaaacttgtctcctgatttgacatgaaccatgcaagggaagaaacacttccagtaaatatatgctccctaagtccaagaatactagggaaccgaacaccatcatgcttcttaagaaattcttgcaacaaatttctcattttcaaagcttcttccatgtagttatcctggttcatatctattgtttgcaatccccggacgcgtgg

SEQ ID NO: 2346 - DNA, 1821 bp, Glycine max
ttttttttttttttttttataagtatggaatgttatattgatgaattgccacaaaattaatataataacaacgcaaaaatccaactctagtataaaatgcgctcaaagcatagacttgaataaataaatataaatatgtacaatgcgaagctctttttgccccccatcctcctccctcaccagtcatcaccaagaaaatttgtcgaaaacccagtttcatacctcaacatgaaaagtcatggacaagttttaagaggtcatctaataaagttttattctagtatcaatggtactcctgcaaatggggcataactcaagatcttgtccgcaatcacagcatgtctgatgcccgcaaccgaaggccatatccttaggatcggtgaggcaaatgggacaaacctgattatcagaagcagaagttgcaggagggtttgtgctaacatcatgtctgctagatggtgcactgggacgagaactatattgacgggaagttttgggggaattgaaagatgctgcaccatatagaggcggtgggagaggaatccggtctatatctttccctctacaagcacccaatatattaagctctagtgttgccttgtactgggagggtatttccatcaaggcagcgagtgcaaactccgtttcctttctggaccgatccatgttctttgacattatttctgtgaaattcacgaactggaaattatcaaatgctcgggcagggatgttatcatcaaattgtttcatcatatcccacggcccatctccaactccaactaatatgattgacaagggatattcactagctttcacaatagcttctacagttttcttttcttgtgcactcaactgcccatgctcagtgtcaacacttctcgtcacctgcccatcagctataatcactaacacatggtattggcctccactttgctcaactatggtgattgccatctcaatgactggggcaaatgatgttggtcctgcaagctttaattgagggaccaactccctgtaccgttccaacacttcttcaaatccacgacaaaatctctcatccggatagaaactaaaaacttcctggtcatgtgttgatgcatctccaaaaccaaaacagggaattaagttatcctcatcaaaggaagacaatgttttcccaatgatagatatagcttgttcatatggattttgttcatgaccaatgtgatgcaggcatctcctttgaaatgaccttccacctgtccactcattgctcttcgtaaaatcaatcccaacaatcagatttgaagactctaagccagcttttgccagagcatcagttacctggtccaagctcttataatcatcacctatccttgaatacttcctatccaagctctttccttgttctggagcacgaccaccaccatagctctgaggtgaatacccataatgccccacagacccattatcttggctttgtgggaaatgaggttgctgataccgaggaaaaaaatttgacgaatgttgcttagaacgcctccgttttgaaattgatccacccataaattctttatcctaaagaaaaccttgaagggcctgagagagagtgaggcagtagtgggagttgaagagcattaaggtggtaggtgggcgtgtcagtagtatcagtgtggcagtgattgagaaatgataagaataagaatgggatatgttttgatgttgttgttgttcaattgatgttgatgaattgaacggtgaaggttgtttcctcgaagtttctctctctctctctcactttcactttccttgtcccccttctgtcgtcttctcgcagccgta

SEQ ID NO: 2347 - DNA, 1332 bp, Glycine max
cccccgatcaccgaacaaaccaagcgtgtgtgtatcttaagacaaagtctgacatcaatctcttttcatttgtttaatcagctacgtaggccccccccccccaaaaacacagcacaacacaactcgttccatttcagtcggcaattctggaaaaagtcaaatcattctggaattttcattcatttgagagaaaagagaaaaacaagtgttctttgaatctgttgaaggtggtgatttgatttgatttgaataattcacataaccaattcatctattcattatctctccgatctttcaatggattctgacttctggacctcgcgtcttgccgccgctaaacgccaatacacgcttcagcatcaccatccaaactctcacttagatcggttgggaatcgatgattttgatatggaagaagaggtgagacccgatttcccttgcccctattgttatgaagactttgacatcgcgtctttgtgttctcatcttgaagatgaacattcttgtgaatcaagagtcacgatttgtcctatatgctccgataaagttgcacggaacatgttaagtcacataacgctgcaacatgggcatttattaaagttacagagaaggcgcaggttaagaagagttgctattccaaacagtcagacattgtcccttttgggtcgagatcttcgtgaggctcatctacaggtgcttcttggtggtggaggtggtggtggataccggtcaaatagtgtagctgcagccgtatctaatgctgctgctactgatccattcctatcctcatttattttgaacttccctgcttgtgaagctgaagaaatttcaaaatctgtggtaacaagtgctgagaattcttctgccaaaaatgcgacgcctgaacatatttggaaatcaagttttggtccctccttgagtactgaagagcgcgagaaacggatgagacaagctgctgggagatctggttttgtgcaggaactgtttctttcaactttgttaggtgaataatggaagctgtaaggtgctttcagaagaataatcaacacgagatccatcgttaaggatcttgaatgaaggatacctctagtgggattcgttggttatctgacaatccatgttatagactaattttggtatattgtcacagctgcacctttgacatatagtgctgaatctgatcatagttatccttttatcccacccttgtaagttgtaagcatcttaactggagatgtattactatctgaaaacaaaaaaatagaagttttcttgcttatggaaagacctattttattatattggcatattatgattcccttgactccagag

SEQ ID NO: 2348 - DNA, 1473 bp, Glycine max
ccacgcggccgcatgacctgcactgtgggccccccccccccggttagatgatacagtgatttgggcatcggcgaatccaacccaactgcgagcaatcaattgttggtgtgagaaggagggcgaactaaagattcgattttggggtgaagagaagcgaagcgaagcaatgagacgaaaccattctaactcgggcaattaccggaatccatgtttaactatgcaccagccttgggcttctctcctcgtttacgggatcaagcgcgtcgagggcaggtcatggcccgctccaatcacaggtcgtctttggattcatgctgccagcaaagtcccagaggagtctacaatcaaagcaatggaatacttctacaaggagatttatgcactcaatggcatcactgatatccaatttcctcagcactaccctgtttctaggcttttgggatgtgttgaagttgttggctgcttaacacgtgatgagctagcatgctgggagatggttcctgaaggggtgcgggtggaagcacaaactgattattgctggctgtgcgaacgaccacagaaattgttgattccttttgagatgcgggggtaccaaggtgtttataacctggaaaagaagatttatgaagctgcagttagaggtctgtctccagttaatagtccgttgccggtgaaatttccgcttccagatccacaaaacccattttcattgaagccaggttccatctctgcgcttactcctaacttaaaagcaactgaagtggataaatcatcaagtataagtctggccatagctggggcacaagcagcagccactcagttctcaaagaaggatcagaattcccatagtactgctcagaacaatgcacctactaacatgaatgctaataatgaggacacagaagttgcaacatcttataatctaagatcacaaggcaggtctatggaaaagggcaatatatcatccaccaagttaagtaagacatttgatgatctgacattgccatcatatcacgaagagaaaagcagtagaaataggagtgagggaagcagtaagcagaatcgatctcctggtgcagaagcagatttgagacagtttcctcaaccaccgtctaagatttttgctgctgcgttgaaaggcctgaggcactgatcgtgcaaggagtctgaccacttggagtctgaatgtgtatttgtagcataacgaagtgtaacttacgaagctgagataaagcttggaagtggtttgctctcatgaaattgttttgatgttttatagtctctaaactattataattttatgtcatttctcggtgtctgagtgattgagcttaggttcatgtatcattagtagtagaagattgtagtctgtagacaatggggtgatggattgcatccaagcattcagactcgtgctgcatgatgttacaaatgaatccgcgttagtatccatctagaacacatattgccatc

SEQ ID NO: 2349 - DNA, 2848 bp, Glycine max
tgaactagcctacaggcttctgggctctggcaagggtgagtgtttgttccattcctttcctctttagtttggttcgggtgacaaaacaaaacacaatggtgtgttgatcactctgtcttctctttctctctttccatttgatgtctctccccaccaaacggtcgagcaccgctggttcctccctgtcgccgccacctcctatgaaaaaggccaagtccctcctcctccgctcctcctccgacgaccacgacgccgttttggacccttcctccatgcctctcgacgacgatctccccaatgcccgcgccgccaatctcgcccgcaagaaagccaccccgccccaacccgccaagaagctcctcatcaagctccacaaagctaaaccaacattgcccacaaatttcgaggaggatacatgggcaaaactaaagtctgccatttgtgctatatttttgaagcaacctccacgcgtccctttggagaagctttatcaggctgtgaatgatctctgcctttataaaatgggtggaaatctttatcaacgaattgaaaaggagtgtgaagcacatatatctgcagcactgcagtctttggttggccaaagcccggatttggttgtttttctgtctctagttgagagatgttggcaggatctttgtgaccaaatgttgatgatccgtggtatagccttgtttctggataggacatatgtgaagcaaactgcaaatgtccggtcattatgggacatgggcttacaacttttccgcaaacatctttcattgtctccggaagtagaacacaaaactgttacaggtcttctacgaatgattgaaagtgaaagaaaaggtgaagcagtggatagaactcttctaaaccatcttttgaagatgtttactgctctgggaatttatgcagaaagctttgagaagccattccttgaatgcacatctgaattttatgctgctgaaggcgtgaaatacatgcagcaatcagatgttccagattacttgaagcatgtggagataagattgcaagaagaacatgaaagatgtttgatctacttggatgcaagtactaggaagccattgatagcaacggcagaaaagcaacttcttgaacgtcatatacctgccattcttgataagggcttcgcaatgcttatggatgggaatcgtattgaagacctccagagaatgtacttactcttttcaagggtcaatgccctcgagtcactgaggctggccattagttcatacatcaggagaactggtcagggcattgttttggacgaggagaaagataaggatatggtttcatcccttttggaatttaaggcttctcttgacacaacatgggaagaaagcttttccaagaatgaagcattctgtaacaccatcaaagattcgtttgagcatctcatcaatcttcgtcagaaccggcctgcagagttgattgccaagtttttggatgagaaacttcgtgcaggtaacaaaggcacttcagaagaagagttggagggtacacttgataaagtcctggttttattcaggttcattcagggcaaggatgtgtttgaggcattttataagaaagatcttgcaaaaagactactgttaggaaagagtgcttctattgatgcagagaaatctatgatctccaagttgaagaccgagtgtggcagccagttcacaaacaaactagaagggatgtttaaggacattgaattatcaaaagaaataaacgagtccttcaagcagtcatcccaggctaggacaaaactcccatccgggattgaaatgagtgttcatgttttgacaactgggtactggccgacgtatccacccatggatgttagacttcctcatgaattgaatgtttaccaggatattttcaaagagttctatctaagtaaatatagtggaaggcgtctgatgtggcaaaattcattaggtcactgtgtcttaaaggcagagtttcctaaagggaaaaaagagttggctgtctccctatttcagactgttgttctgatgttattcaatgatgctgagaaactaagctttcaagatatcaaggactctactggtatagaggacaaggaactgagaaggactctgcaatcacttgcatgtggaaaagttcgtgtcctacaaaagttgccaaagggtagagatgtggaggatgatgactcatttgtttttaatgaagggtttacagctcctctttatcgtataaaggtgaatgcaattcagttgaaggagacagtagaggagaacacaagcaccactgaaagagttttccaagaccgtcaatatcaggttgatgctgctattgtgaggataatgaagactaggaaagtgcttagtcacacgcttcttattactgaactcttccaacagctcaaatttccaataaaaccagctgacttgaagaaaaggatcgaaagcctgattgatagggagtatctggagagagacaagaacaaccctcaaatatacaattaccttgcataatttattttaccttaaaagtttattttcttaaatgacatgggtaaagctagatgtttactcctttgtcatatatgtacagtaacaacagattctccccacccctctatttttcttttcctttcatttatggaccattgtactgtaattgtaaagcatattatcctcccccttgaatttcttttcattagttgagaattcaaaattgttcccaaaagtgatcgagaaattagaaaggaattggtgattaacaaggtaggtttcttctcaaaaaaaaaaaaaaaaaaaaaaaaaaaaaaaaaaaaaaaaaaaaaaaagggcgaacgttctaaaagaaacct

SEQ ID NO: 2350 - DNA, 1647 bp, Glycine max
ttttttttttttttttctttttttttagggaactaatcgaatcattccattgatattcatgtgaaaaaacacacacacacacacacaaaacataaaagttaactacaataacaacttacccgataatttattcaagttatacatcattttaatatttttgaaataaaataacccacgtaaaaaaatatttttaagatctagaaattacttccaccagagtgtcgaaatcctgtgcagcttgcccctcaggcctacctgcatcttccacagtcttcttcaccttaagagcattgtctctaatcttcttcccctcttgatgcaccaaaatcaaatccaagcttttcaccaatccattttttgtgaacaccttaccttccattatgacaccaatctcccaaacatcttctatcactcttgcagccacaacttgatccccaaagaatggcttgcagatcataggaacaccactggaaacactctcaataacagagttagctccacagtgagtcacaaagactcctacagaatcatgtgccaaaacttgtgtctgtggagcccaagacactattttcccatgctttttggttctctcaacaaatccatttggcaaaagaccaattagaccttccttcagtgaccaagaaatggaaatccactttcttcgagtgcctctgccactgccacaagctcgtgtggaggaggtgccaccacagtcccaaagcaaacataagccactgatttagaattcttcgtatccaaccatgacaagcatccacttgaatctgtgtcagatggtggcaataacgtggaaggaagtggaacaacataaagcaaagattgcaacttggatctcatgtcttgaacaaacaaaggtggctccaactcctcaaagaaattcataactactaccttagcttgaggtagcaccttacctagtgaatttagttcccttgcaaaaactgtttctttttctcccacatcgagcagatcctgtggcatgtcttcaacacgcagcttcgacaacccgggaaggaaatccaaggttgtgttcccagcatggtttgcacagtgctgacgtatcaattcagtgtagaaatatagagagagtgagcatgaattgggaagccaaagtgcaatccaaggaacattgagggtctgagccacaaagagagaagaggttacaaaagcatctgcaacgatgcatgtgactctcttctttgtctctgcttccgcaagttctatacctttgtgcaagttctcaggaccagtttggagaaaaagattcaacttttcagttgggtttttgcctaggacgtgaccctctgggattccatcgcttatgctataggccttgatgttatttgggatgtggggttttgggaaaaggattgcattggatttgtctgtgccaatgaatgagaatgaacaatttggaagggaatgagctagtttgaggacaaggtttaagagaggcataaggtggctgccaaaggggaaagcaaagactgctacgtgtttgttttgatgatccatttgaggtttggtacactttgcaacaaggtgaaggttaagatagagatagatgaaggcagatggctgattaatgttgaaattgtggtccccttctgtcgtcttctcgcagccgta

SEQ ID NO: 2351 - DNA, 1700 bp, Glycine max
tcactttcccccctcccagttcccaacttttctgtaattaaacaacacgacgacgtaaataccaaaataaatatcaagccacaacacctaaaaaaaaacccagtatgaaaaggacatgctgtggggaagcaaagagaaatgtgatgcacatcaaagccccccccagaagataacaatgcaactgtgaatctgcactggccaatgtgttaacgatagtacataagctgctgtctcgatgaattaccggtatatccatcatacatggcttgagatgccccagagtttatgcccatggaagcaggagctaggccatgttgtccagtcatttgcagaagagcttgacctgaaagaccagatacagcagcctgactcaaggccagttggcgctgataagccaacaactcagcaggagaatacccttggttcatccctgcagtgggaagtatttgatatggttgagcaggaggaggtagtgggtttgaagctgttccaggtggagttggtttactaccccacgaacacttcatattcttcccacgtacaagtcttccattagccatctgaatggccagagcagcttcgtcatgagtgttgtatctgataaatccaaaacccttatccctctgaactcgaacctcctcaatcaccccagcccccagtgcgtggaactgacaatgaagttcagcttgtgttacatcatgaggaaggttgccaacataaactgtggtgtatgaaggattgttttcaggagcatcctcattgttattatcttgacctccatctgaagatccatttgtaagcacaacagcattttggctgtcattgttcttctcttcattggagctgccaccagcacccttagttgcccagttgcatcgtatttgcctatttcccagccacttacctgtcatatcatttatggcactttgggcatcctgatgatcacggaaagaaacaaaaccatatccttttgaccgaccagttttgtgatcccacataacccttgcatcagaacaactaggatagactgagaagcaagcaaataaagttgcatcagtaacctctggactcaaatcaccgacaaatatattgaagtgccctgtcgtatcctccctactgctattggcatatgcccaattcaccttaagtgcttgaccataaagttgccgtccatgcaatgtcattattgcaagggctgcagatgctcgatcgtggtagtccacaaaaccatacgaggacttttcttttcttatgagcttgcagccagcaagaggaccagcactctgaaaaacttctgcaagaagtttatcggtgacatttacatgaatatttcctacataaacactacggcatgcagacgtatcaaaaccaggaggcaaatttccacttggaacaggctccatctgagacatagcagcggcgagcatgccagggtggtacatctgctgctgttgaagcaaagcttgctgcatgagggcttgttgttgttgctgcaacttaagcctctgttgcatattcctctcttaatcccgcgattcagagagattccgtgttcggagacagaagaagacgagacaaggcggtgaatgacgaatgctgtgttgtgtttggttttggttttggattttgcagtctcgaacgattctcaatcaatcctcccacctcattctcccccgcgggcgtcttctcgcagccgtgaa

SEQ ID NO: 2352 - DNA, 1970 bp, Glycine max
tcagctacgtaggcccccccccaatattgatactctgctgcttttaatttggaagagagacaaaccagcaagagtggagatggcgacgtcgacgtgcttcctgtgtccgtctacggcgagtttgaaaggcagggccagattcagaatcagaatcagatgcagcagcagcgtgtcggtcaatattcgaagggagcccgaacctgtaacgacgctggtgaaagcgtttgctcccgccacggtggcgaatctaggtccaggcttcgacttcctaggctgcgccgtggacggactcggagacattgtgtcggtgaaggttgacccacaggttcaccctggcgagatatgcatatccgacatcagcggccacgccccaaacaagctcagcaaaaaccctctctggaactgcgccggcatcgccgccattgaagtcatgaaaatgctctccattcgatccgtcggcctctccctctccctggagaagggcctgcctttgggaagcggtctgggatccagcgccgccagcgccgccgcggccgccgtggcggtgaacgagctgtttgggaagaaattaagcgtggaggagctggttctggcatcactgaaatcggaagagaaggtgtcggggtatcacgcggacaacgtggcgccatcgataatggggggttttgtgctgatcgggagctactcgccgctggagttgatgccgttgaagtttccggcagagaaggagctgtatttcgtgctggtgacgcctgagttcgaggccccgacgaagaagatgcgggcagcgctgcctacggagatcgggatgccgcaccacgtgtggaactgcagccaggcaggtgctctggtggcgtcggtgctgcagggcgacgtggttgggttggggaaggcattgtcctctgacaagatcgttgagccaaggcgtgcccccttgattcctggcatggaggctgtcaagagggctgccattcaggccggtgcttttggctgtaccatcagcggcgccggccctaccgccgtcgccgtcattgacgacgagcaaactggacacctcattgccaaacacatgattgacgcttttctccatgttggcaatttgaaggcttctgcaaatgtcaagcagcttgatcgccttggtgctagacgcattccaaattgaaccttctcttctctatctctatgagaggcttgtagatttcaagaaccggatttcttccaacttgctcgtaacactctaagtgctgaccggtcacatgtatttgaaatttgatctgatcaatgaagcagcattctagtgtggaggtctgaataacaagagaaacattaaacccaagctgggagctctgtttgggtggtggaaatttaaatagatgaataattatgaaagacctagatcaggtcagtgttatggtgaactctgaagcatgttttagattttctttgctttgtttttatcatatttttatcttgctacttgagttgacaaagctcaaaaagaagtcatttttagtattttcttgtttcattatgctagttaatcttagcttttgaatagcatgtattgttccttaatatttctctttatcatttcactgtcaatgttttctaattctttcttggttaaagtctaagagtttatgtggatggaggctttcatcacggatttcaattcgaaagctcgttcctaggatatatgtatggttgctcaaagaaccattgctttatgatgaactgaagatcgatcattgtttatttattaccgcgttttcctttctcctgttttctttgaataagtttgaaaaagaatctgtgcactttttcctgcccttgtttgtattaaagattttgttgaacttactgtatttgaactttgaaggaaggaaaaaggtatatatgtaaacattatctaattttatctttgttaaactaggtcatcttctaacgaataagtagtcatcacattaaaa

SEQ ID NO: 2353 - DNA, 1471 bp, Glycine max
atttctcaaaataacaagtactgttctatagtatagccatccatactatgactttttttttttttgttatgttaaaatgccatatattctgacaattgagatccatagagtaaacattccaactcaattcaatgaacaagacatgccgaacacttcaaaaagtatgaataatcgagagaataaaatcattgcttacaacaaacagaaagatattagtttgattcagcagaacagctaatttagactccaaacatcaagtccatgatcttggacaccaatgattttgttggggaagcaatggttcctccagtctgccgtgcagttgagttgccattctgcagatagtaaggtcgagaaggagctttcaatgtgctcacttctgagtttctggcagaggctagaggtaacggcataaatccctgattcttaagcctttcatttaaagcttggcgttgcatgggatccaacagtttcacaccaacaattagtactccattaatttgcattccattcttgttgagagctttatgggcatcagatcgattctgatacaaaatgtgcacccagttagcatctctaggaccaggaacatgtttcaaaatttcaccgcatttttcaaactcccttaacaccatgttagtatcaccgggggaaaatccatacacagttacccattcttcctcattgagattccctgctggcaaagaatttctttgaacctcaggccttgccacttccagcggtggaggaagagttatcagagcaccaggctgaaccacaccctcaactggcgaacttcttcccttctcatcttgttccccaacactctttgcagttgtaggtgaccaccaactcaaacccggcgagccctgttggttttgttgtacccctctcaaagcataagatgtgctggcctcagatttgcttttcagtggagttgaaaactccttatttgaagtttggatgggagttctagtgtctgacttagcctcaggggatatttgataatctagtatgcctgattcaggagaaaaatcggatctgtcttccaaggtgaaaacaggaggcggaggaaggtctgaactaccaaagttctcacgccatagtgaagatactgcagctgcttgacctggactcgaaaattttcctctacgggcagaaacaggtgaagccaaatcctggaaaaataaagaatgcctgctggatcttggagttctttgcactgtggtgctcatgttatttattcaagggaacggaattactacctaatcctgaagggtggtattaaatgtgatcgattgggatcacagacgttgagttgattgagattgaaattttttaggttttagaattttccctcccaaaccaaaacgctgaagttcggcaaagagaccagtgccaattcgcggggcctacgtagctgatgtattttgtaataactagctcctatttaaaattttcggacgcgtgg

SEQ ID NO: 2354 - DNA, 879 bp, Glycine max
  misc_feature (3)..(17): n is a, c, g, or t
ttnnnnnnnnnnnnnnnttttttttttttttttagtaataaactataacatcattttattagacatactaaaaagaagaagtacaagaaccatgatagctagtaagcatttaaaggaaggtaatcctaaacctagcttactatagcaacctagctaaaccatacaaacttatttttatttatcatagctgttttatttaaacacatatacttatgataacatgcttaaacacatacacaatcacacaactttaattaagtaaaaaccctaacatagcatgcaaatggatatcacccccatgcatcacatggaaacatgtttagttaggtggagatgaaggtgttgtatgaaggtaaggagaagcaggcatgtctacaggaggatacggaaatgaagaaaccgcatcagggcttattggccatggaagccctggaacgaatggtgttggaagtggaaaacgtggaaatggaaaagcagcacgtggaaatggaaaagaaggacgtggaaatggaaaaccaaatgggaatggaagaatgggagggatgatttggtttttgtcaaatctttcttctttcttttccacgttatagttcttgcttgttggatcatctacttgtacttgatgatcatgtttttcatcatgccctctatttgcagtgccaatattcatcatcacttctttctcgtctggtgaagtagtggtggtactcatgagttgtcttgcactagttggaacaacaacattgttgatcactgcaaccaaacagaacaaaagcataagattaaaggtcattgtgagagatctaaggaaaaccagttagagagaaaatctagagggggtggaaattaaagaggcttctgtaagtaagttctgttgtt

SEQ ID NO: 2355 - DNA, 1379 bp, Glycine max
  misc_feature (45)..(50): n is a, c, g, or t
  misc_feature (69)..(73): n is a, c, g, or t
ggatatccccgtggtgaatctatcccatatatctttccaaacacnnnnnnggttgtgaatcgtgataannnnntccttaatctccatcgaaagaaaagaaatttctttttttctctttttcaaaaacagtatggatatcaaatgtaaatgaagatcgttctcttccctgaactaataaaagtagaattcaaggaaaaggattacagctattgccaaaacaaataaattatctgtacatgtatgaggaagaacccccctcacacattgggtatctagcatgctcaacaaatggtggaacgatctcttaattgaaatgcacgttagcgttgatgtcctctcacatacacatttaccttatatccactgagaatcttagtgcagtattcgcatcagaaggaatttcggttgagaagaaggaagaacacaactatttgaaggcagaggtcctagtatctcactagctgactaaattgtgacaacagtaacatccaatttgctcaagaaaaccacatgaaatcatggttagcttaaattcgcaccctgggaatcattcattaagttcttgtatgtgttgagagcgactttttcctggtggaataaaaatcaaatcctcccatcctgaattcctttcactcatctccatttttctcagtacatcttccaagctaccaactgctatatgttgagaaacaccaggtcctcttgatgccctggaaactttggacagttcctgctcaatatcctccttagagaaatacacagggcagtaacgcttcttcttcttcttcacaaccaaaagctctgactgaaaaacaggaactccatcgaaacctcccttgttggctggtttaagctccaaagcattccttatttgaacaggatcgggtaagaatcggaaggcaatgccttcaaccttcaacatgtatacctggtcaagagtaattggaacaaccctagccttgcttcgaagctctctactccgtgatcgaacctgagcgaggaaggcttcggcgtcctcttggcgaaagcaaagcaatccaatggacttggctccatcagcgtcagagataagaacgaactcattgttggaattgctgacggtgtaaacagaggtgccgacgagggacttagccacgtgcagggagcccagagtagaagtggcggcgagggcgtgtttggggaatagaagattatgatgagcttgagctagggctcgtttcgtgtcatccaaacgagtcgcgaggtcagaccctaagcggacgcagtgttgatggatgaagctggaaaatgacagaagcgggtttgagtgtccgcgcgactccatctaactctaagccttcgtcttcaccccggggggggggcctacgtagctgactcga

SEQ ID NO: 2356 - DNA, 1270 bp, Glycine max
  misc_feature (666)..(666): n is a, c, g, or t
  misc_feature (689)..(689): n is a, c, g, or t
  misc_feature (714)..(714): n is a, c, g, or t
  misc_feature (736)..(737): n is a, c, g, or t
  misc_feature (742)..(742): n is a, c, g, or t
acgtgatcaataactaaattgatattccgtagagctttcattctgtgtgaacactctagttgctaacagatgcattaagttgtaggtatttaattgtccccagttgagagaggtttccttggagttttcttgccaagagaatgatagtacggatctcaaaactatgattgaaggtttgggaagaagttgtctgagattgcaaaacatacatatagcttcaatatggctttcacactctgccgtgcttgctcttacagctgctcagttgagggggctgcgaatgctttctctcgttcttggatccgaaatcactgatgcatctgttgctgccattgcctcaagctatccaaatcttgaattgcttgatctcagtggatctggtgttagtgacagtggcattagtatgatttgcaatgtgttccctgatacattgacaagactccttcttgctctttgccctaatgtgacttcaagtggtattcaatttgctacgtttcagttgccacaccttggaattatggactgtggcatgaccatatgtgatcctaatatgcaaaatccaactgcggatgaaaacaactgcaaattgcaggaaacatctgccgctaatgtacactttaccaaccaaaagctaatcatcaagcatagccgtttaaagaaactcantttatggggttgcactggcttanatgccctatacttgaactgcccacnactcattgatctgaatctaaanncttgntcaaatttgcatcctgggagactgttgctccagtgccccaatttggaaaatgttcatgcatcaggttgtcaggatatgttaataggggccatccaaagtcaggtccatgatgcttctgctgatatggaaaaccattcaccttctaaacgtctacctgatggttccaaaaggatccgggttccacatttactcagtgaagagtcccctgaacctgaaaaaaaacgaaggaggatcgagagacagctttgtaatgtacttctggactgaaatttgtattccctcttaacactgagtctaatgtatacatgtgcgatgtcgtaccttatttaaattccagatgcatttatgcatccctagttaccaaacaggtcatagcctttctagttaggctctcaaattggcaccctagaactgtcttcttattagaggtgttcatgttaaacatatttgttgtatgatatttggatgactgtctcattttttaataaaatttaatatttttttatggaggcaaaaaaaaaaaaaaaa

SEQ ID NO: 2357 - DNA, 833 bp, Glycine max
ttttttttttttcgcgaaattagagaagagtgagataaataacaaatttaatagcacacagattaactcctaattaagttcacttcgcactacatttatacaagagaaggaatgaaacgaaagtgtccgcactccacacaatgaagctattagaagaaagacataagcactcaatcaaggtagttgatgagcacaagcagcaaaacaaagagcaagaactccacagaagcagcattagcacgaacagaagttgcagcagcagagaaacttccagtggtagtgttggtggtcagaacaagaaccatccaatcatcctcagaaccaagccctgcccctgtgtacttggaattgttgagaaactgtgcgtagctaccagaatgagtgtaattggagagcacaatggttggttccaatttggagacacaaacgggaagaatgactccatctgtagtgctgttgaagttaatgtcacatttatctatatgcttctgcaagtttgggattttgaggttcccacttccaggaacagatgaagggtagtattgattcacgttttcacagggcatgttatctatttcttctgcaacctcatcagccaaacatgttgcctttgaaacttggttcaggggtgccaggttccgtgtctgcctgtagctgttgattcccttgaatacactgtcctccttatcactacacagcactggattagaaaagactaggaaagcacagaagagtgcaagaaggaagatgcaaagtttgaaaacgtccaccatggtgagattgaatctcaaaggaaaacacccattgatgaattaaactctgaattaagagat

SEQ ID NO: 2358 - DNA, 860 bp, Glycine max
ttttaagatgtacacagtacgctgatgagtttcttaaaccatacaaggtgagtgtcatttgagaaattcgagaagagttagataaataacaagttaacatcacacaaattaactcctaattaagttcacttcggtctagatttacacaaaagagaaggggggaatgaaactaaagtgtccacaaaatgaagctcagaagaaagagcaaaacactcaatcaaggtagttgatgagcacaaacaacgaaacaaagagcaagaagtccacagaagcagcataagcacgaacagaagttgcagcagcagagaaacttccagtggtagtgttggtggtgagaacaagaaccatccaatcatcctcagaaccaagccctgctccagtgtacttggaattgttgagaaactgtgcgtaacgatcagaatgagtgtaattagagagcacaatggttggttccagcttggagacacaaacggggagaatgaccccatcagtggtggtgttgaagttaatgtcacatttatttatgtgcttctgcaagtttgggattttgaggttcccactaccaggaacagatgaagggtagtattggttcacgttttcacagggcatcttctctatttcttctgcaacttcatcagccaaacatgttgccttcgaaacttggctcaggggtaccaggctccgtgtttgcctgtagctgttgattcccttgaatacactgtcctccttatcactacacagcactggattagaaaagactaggaaagcacagatcgacgcaagaaggaagatgcaaagtttgaaggcgtccaccatggtgagtttgaatcccaaatgaaaacacctattgatgattcatc

SEQ ID NO: 2359 - DNA, 490 bp, Glycine max
agatttgagacagacctcgcctgcgaatatgttcgggcgtcgcaggtttctttcctttcctatggtcatcggagcagtcatcattggtgttgtttctgggaaggcaatatttggacccccacttgatgagtattggaaaaagaagcaacaggaagaggcagctgctgcttctaaggagaatgactctacctcaacttagttcacaacacaatcatcatattttttctctttttctttggactttttagacgagaattgaaagaccacatttgaatttaatcttggacgggtcactgcactagcttttgctagcaatggtttttgaagcagagtgaagtctttactgttctagtatagggggttagttttggttctcttcccctgtcttttaaatcgagctagatttgtagaaaattcactgtacaaccgatttgttgcctacaatttacaagcattaacattattgcacttgcgaaaaaaaaaaaaaaaa

SEQ ID NO: 2360 - DNA, 1863 bp, Glycine max
ttacgggctgcgagagacgacagatggggagcgcccaccggaattgaatagaaatagaatcgtcgattttctctttctctgactctagggtttcattattttcttctgtagatccatctatctagcttcggagctgcaaatggacgtcgcagtcactgccttccggtcaccgctgatcatcctccgaagaccggtcaacgagtctgcctcagctcggttcggttccacttttgggttttccagaaagcaacggttcagttcagtatgtatccccaaacacaagcacaagcaaggtcgtagaagagggtttgtagttagagcttctgcatcctcatctccggagtcggatgatgccaagattgctcctcttcagtttgaatcctcaattgggcagttcctttctcagattttgaaagatcatccgcatcttgtgcctgctgccgttgaccagcagctccagcaactccaaactgaccgcgatgctcatcaacaaaacgaacaaccttctgcttcaaccactgatttagttttgtacaggagaattgctgaggtgaaggctaatgaaaggaggaaagctctggaagagatcttgtatgcattggtagtgcagaagttcatggatgctaatatttctttgataccctctgtaaccccagatctttctggtaaggttgatttgtggccaaatgaagatggtaaacttgagctgcttcactcacacgaagcatatgagatgattcaaaaccacctggctctcattctcggtaacagagctggagatttaacatcaatagctgaaatcagcaaattcagggtagggcaggtctacgcagcatcagtgatgtatggttattttcttagacgagttgaccaaaggttccagttggagaagacaatgaaagttcttccaaatgcaacagaaaaagagaatagtgctcatcaaactacaatggacaatgcaagacccagtattgaagaggacacttctcaagtgatgtctcatcctgaagtatctacctggcctggtggtgatgtccgtcccggtggatttggctatggtgtaaaggcaaccaggttgcgtaactacgtgatgtcctttgatggtgatacactacaaagatatgcaacaattagatccaaagaggctgtcagcatcatcgagaagcacacagaagcattgtttggaagacctgaaattgttgtaacacctgagggggcagtctctaaggatgaaaacatcaaaattagctttggtggtttaaagaagcttgttttagaggctgtgacatttggttcttttctctgggatgttgagagctatgtggactcaaggtaccattttgtgttgaactgagtaaatctttatatgtgtatcctttttagatcccaccaggtgggagggaacctcgtgcattcagttgtccttttgagttctgtttgctctcatacatcacaaggcatagtttatagtgtgttggtactgactgatggagtaaatttgaatgtaacttcggtgttaaaagtccaaatattgtttcactaattaatatgtatatactgtagtggtagtggctctggatttcactaataaagggaagcttattttctagttaaaaaaaaaaaaaaaaaaaaaaacaaaaaagaagaagaaaaaggggggggagggaggggaggggaaaaaaaaaaaaaaaaaaactgtggggggggcgcgggaccaaattgcccggtaggggaggggattaacccgcgcgcagaggcggggtgataaaaggtgggagaggggaaacccggcgggtggcaaaggagagggtgtggggaaagccgctgttggcgggtgggggaagaggaagggcggcggcggtg

SEQ ID NO: 2361 - DNA, 1761 bp, Glycine max
acggctgcgagaagacgacagaaggggacattcaatccctttggtttaatctctctagggttattttctctctcttggattccattcctgcgtcttcatcagagccaatggaagcggcggctacggcaacggcaacagttctcgcaccaccgtcggctttcctcggaagaccctccgtactcgccttccgttccaatcttcgcttctccactaagttaagcacttctgtagctatctccaagcatggtcatgggagacactgtgttggaactagaaggggttttgtagttagagctgcatcatttacaccagagtcatccgaaccgagttccaagattgctccacttaagctggagtctccaattgggcagtttctgtctcagattttgataagtcacccgcatcttgtgccagctgcagtagagcagcagcttgagcaattccaaactgatcttgatggtgataaacaaaagaaagagccttctgcttcaggcaccgacttagttttgtacaggagaattgctgaggttaaggctaaagagaggaaaacagctctagaagagatattgtatgcattggtggtgcaaaagttcatggatgccagtatttctctgataccctccttaactccaaaccattctggtcaggttgattcatggccaagtgaagatggaaaactggaggagcttcactcaccggaagcctatgagatgatccaaaaccacttggctctcattttgggcaaccgtttaggggattcaacatctgttgctcagatcagcaaaatcagggtaggacaggtttatgcagcttcaataatgtacgggtactttctcaagcgagttgtgcaaaggttccagctggagaggacaatgaagattcttcctaatgcaacagaagagaatagcattcaacaaactgttgtagatgattcaagaatcagaggcggagagggccattctcatgttatgtcccatcctgaagtttctactttgcctggtggtggcatcagctctgggggatttggctatggttcaaaagtgtccaggttgcgtacctatgtgatgtcctttgatagcgagactttacagagatatgcaacaataagatccaaagaggctctcagcatcattgagaagcacaccgaagcattgtttggaagacctgaaattgttgtaacaccgcagggggtaattgattcttccacagatgataacatcaaaattagctttggtggtttgaagagacttgttttagaagctattacttttggttcttttctctgggatgttgagagctacgtcgactcaaggtaccattttgtcctgaactgagccctgctcactcccatgcaccccaaggcaaagtctgtacggactgaaagtacaaatatttttcacctgtttgatcagtgacattagaattggttttcactattgagaggatatcttaaaattagatatttgcacatttgtttgtccttcgttatcgtgatttttgttggagtattaagtgtgaaacagatatagaccaaaattcaaattacaaatgactgttgttggagcactttataataagtatggctgatgtaaaggaaaagtggctgactacaagatttctttgttagatgtatattttatcaattttttgaccaatggatggatatacacatttcatgaccacgacagtgaaaagttgcgagaatgttaatattaacaaaaaaaaaaaaaaaactcgagactagttctctctccctcgtgc

SEQ ID NO: 2362 - DNA, 1123 bp, Glycine max
acgagacattttaatctctctagggttcttttctctctcttagtttccattcaatccctgcgtcttcatcagagctgccaatggaagcggcggcgacggcaacggcgactgttctcacacccccgtcggctccgcccaggccgtcggttttcctcggaagaccctccgcactcgcattccgttccaatcttcgcttctccactaagttgagcacttcagtgtcgttctccaagcaaggtcacgcgagacacagagttggaagtaaaaggggttttgtagttagagctgcatcatttacaccagagtcatctgaaccaacttccaagattgctccacttaagctggagtctccaatcgggcagtttctctctcagattttgataagtcacccgcatcttgtgcctgccgcagtagagcagcaacttgagcaattccaaactgattgtgatggcgataaacaaaagaaagagccttctgcttcaggcaccgacttagttttatacaggagaattgctgaggttaaggctaaagagaggagaacagctctagaagagatattgtatgcattggtggtgcaaaagttcatggatgccaatatttctctgataccctccttaactccaaaccactctggtcaggttgattcatggccaagtgaagatggaaaactggaggagcttcactcaccggaagcctatgagatgatccaaaaccacttggctctcattttgggcaaccgtttaggggattcaacatctgttgctcagatcagcaaaatcagagtaggacaggtctatgcagcttcgataatgtacgggtactttctcaagcgggttgtccaaaggttccagctggagaagacaatgaagattcttcctaatggagcagaagagaatagcattcaacatactgttgtagatgattcaagaatcagtggtggagatggccgttctcatgttatgtcccatcctgaagtttctactttgcctggtggtggcatcagctcagggggatttggttatggttcaaaagtgtgcaggttgcggacctatgggatgggcttgggtgggggggcgttgcgggggtgtgcggcggtgggatccgggcggggtggtgggggggg

SEQ ID NO: 2363 - DNA, 1744 bp, Glycine max
caaataataggtcaatgtttagacaaagcaaacggggctttttttttttttttttttttttttttttttttttacaaattaaaaactctcttactcaactcgaaatttttgctacaaaatgaactgcaaaaagaattcccacaaatagggatatatataaaaagggaaaaaaatgaaaagaattccaagaaaaataaaaaaaacaaccgagacaccaactcctaatgaccttaagggacctacaattactagacctaagaccctaccctttttgacctgcatatgtctaccctttttttcctcacttctcattacaatcttcccctaactgctaaaataagatcatcatcatctattgctcctattcccccagtccaaccctgtacaaaaaccaatgaaccaaagaaatgaaatatcaaaagaaataacataagacatgactctagagggcagcaatgaaagagaaatttccaacaaaggatcaatcctccttcacatcacatgtactccagggtaaggctgctgttagtgtttggaatgagttcaggtgaggcagctgaattgattgcaaaaccagatttgtcaaatcccctgcatctcatttccaggaccttcttatgagaattggagtgcacggatgggcaaaaagttggacttgcagcaggccggtactcggggaagagccggccggacttgtaacgaacaccacaagcattgcatagtgtttttggtcccattggccctgccctccactgtggtgtcttggttatctcacaatgcatgcatttcctaacaggttgtgaggcattttgattgttatcagctggaactaatggaagtggcagcttcactttctttttcttcttaggctcctcagaagcttgttttggcatcttgggaacaagttgagactcagcaaaattctcagaatctgaagatgacttggatgatatgacattaggctgcatgttctccccaacaaaagaagaggcaggggaaatgaggttcatggcaggcctaggattgaaggttgctggacgtggacgcttgctgcgtgtacgtccacatggcacagggatgtaaatctctggactgcttagtggaaaagtcttgccaccagagcaagaactgctactttcaaggacagaaactgggcttgatgtgtgaaattgggtgtttactgagtcctccttggtggtacatgatggctcttccactttgttcattgttaggctccccccacaaaaggaatcctccacaaaattggacaaccattccaattggacaatgtcttcatacggaaccgagagctccgccgagaggtccgaagcggtgttgccggaaaacaccgagtcggaggtaggaaacgagtcggactcagcgggccagatgctcgccagcgagttgcagttgccggcagcggctaccgacggtaaggtggcggcgccgccgtcaacgtcctcgacgggaaaatcgagaaggtcgtcgatgtggtcaaagaagctgccgcagtctatctcgtccatgaagtttggtccaaccattttctcgacaattgaaaatttcctgaagaagggtgaaggtgcaatctttttaaggtagaaaagctccactacacacaggcaatgataaactgagtaaggaatggagaggtttgagattgagagagggtgggttattgaaagttctccgcgggggagggtgaagaaggcttaaatgggaagtggggggttatgaagggaga

SEQ ID NO: 2364 - DNA, 2598 bp, Glycine max
  misc_feature (20)..(21): n is a, c, g, or t
cccggctgaggaattctttnntttttttttttttctttttttttttttttttttttttttttttttttaaaaataagataagatgtatctgctaaattaattaaaaacaaaaatcgtttagaactacgagtcactcaagcaaaattcctatatgttctgagcaaatcaaatctcgtgagtttttctttttttttcttcccctatcacattgtgtttcggcaaatacaagctttcatatgactgcaaattacaagttgcccccttaaatataaaagggtaataaatcatctactacagtagtagccatctaacctcaaaattttagaactcaaccagcaaatgttgcctcaactctattctcctgctcgccgagaaccgacactgcctccttttcacctattaattctaccattaccagtctacatctctgactataaaaacgttgcaggtagatgattcaaaccggcctaacatgtatgccaggttaatcatagctcatcatgaccttcagtttgctcagttaccgtctcttcgcttgtgccttctgaactgttaacggatgaatcacttgaagaggaactatcagctgagttagaatcagaattctctgtattctgctcactgctttcggtttcattttttacgggcttctgaaccttaggtttgggcttgggaattctattaatactggcaaccttggtttgcagatcaagcaccttcagatatacttcttcagatgtaaatgctggcttactgaatccagaagtctttgtttgctcagcttctttctcatccaaccaattcttcaatttttcagaactttttatgacctcgtctactcgttcttgtggaagccaagacttctttgctttccactcctcaacaatctgtttcaactcatcaatgtatttattagcatgctcaactgctgctggccgagctgtaagctcttttaacctgaagaaaattggatctccaacagcttttaactgatctagacgctcttgaaactctgtggcattggcatcttcaccatctgtatacaaccaatcttgcacctgatcaagcttctcaatgaaggactggcgttcctcacttgtagaaactttttcaaactcctcaagagtttcaatcttttccttagttgtatatatatatccttctaaattattttttaactcagctgttctttttctgtctgcatcttttttatctagtacttgtagttttcttttggcttcagcaagaaaatcttgtgatagagacattccaaatccagttatcttctctacaatctttaatggtaccctaaaggtccgctttttcagctttttctctgtagcaggctcagcagcagcttgctcctctgaactaatgttggatgtcttattaatcccactatcagtttgcacgctttcgttgttttcttcagaactattacccgcagcagattcagctgaaacatttgatgaaacggttgaattctctatggtcaaattctttctaggaacttccacccactctgttatttcaataacagcatcagcccgatccagtgaaagaattccacttctactaagagaaaaatgtatgtttgtcttgatgggggatgacagattccgagatgagtatttctcacttgcatctgtcaaaccagatatctggtatcgagcaatttcaggagaggtaacaccaggaggcaaatgattctcactttcataagcaagtgaaacttcaaaatccttgttatgattaatggatctaaacatcttactcgggaccttcggcgggcggcctacaagtatctgcctagagctttcgtcttttaaaagatcagggccattcaactcaaccacaaatccatataaggaaccatcaatcattcctagtttgcggttcaatttgattccatcacttaaatttgcagcatgcagagctgcgccaagaactattgcttcatcagcatcaagatgcctatcaagttcttttctcctgaggaattcttgaagcttagcctgtaattttggcactctggtggcacctccaatcaactccactgcatatatttgttccaatgacaggccagaattctcaagcacctctttcacaggtaagagcgatttttcccaaatgtcttcacaaagctcttcaaatttctcacgggttattgtgctcctgaagtcgacgtcatcatgaagcgattcaactgaaataggagctgctgtgttagcactaagtatctctttagtccttttaacctgtttcttcaacttagccatagccttggggaacttcctgacatcgattccacctccaacctgcgcattgaactgatccgcaaaatactccaccaaccgcagctccatgtgctggccaccgagctccggatcccagcgcacgtccttcacctgaaactgattcaccgacacgctcttcccgtactccttccccttgtacgccgagaagtacacgagcgccgcgtgggtgctgctcgcgcccatgtcgtagaagatcacgtgccgagactcgttcgagaagtccttgtcgatcccgtactgcagcgccgcgccggaatgctcgtttatcagagacaacacg

SEQ ID NO: 2365 - DNA, 1681 bp, Glycine max
cggccgcccttttttttttttttttaattttttttttttggaagtgtgaaattgtgaggattaagtaacgcaaaattaggtaaaaaaagttagtttaaggttgtaaacattgtatagctcctaacttcaagggatcattctaagtaatttttacacgcgaaaaatttaagctactataaaataggaaccttgaagagataaaagcataactatttgcagtagcacctaagaagaaagtccctcataacgtacaaaaagatcaagagtgcttcggtctgtacatgatgagccactgatagacagtgattgtggctatgctaaatagcctattctcccccttaaatcagtcactcagctcacattggatgcaacctcgtgaacttcttcatatgtgctagtctcctcattaaaggagtaccattgccccgatgctgctgagtaatagagccttgtatttggatcataataatagcccaaattgctgctgtaatagtacccagaagattcatcatacacgtaatcgctttgagatgctccaccctcaggaccagaatttatggcatctgaagaagattgactaactgcattattttcatccgtagatggcttactggtatcatgctcgtcatcatcagcaaacatatcataatttgcctgggctaacttctcatatccttctgcttcacgatcaaaaacctcttgcttttcatgataaacattgtattcaccattctccatcagcttcatagcatcctcagttagctggtcaaatacaatcttagtctcagcagacatttttgcctttctatcactgttaccttttaaccttcttaaggcttgcaagaccgtttccccaggttcaagaacatttgcaatgcgcctcttcatgattccaatatctttagaagaaaggtctggggggccctcatcttcatcatttgttgctacagagcttaatgcagcatattttggatcaacttcaacattatcaagccatgcatccttaatctcgttctctcttacatattcaacaaaatttcctgcagcatcaaaataaccttcttccctttctttctctaggttgaaaggctcaatttgaatcccatcatcaacaaaattctcattatcctcatatgtcacttcagcagccgataaatcgtttgtgatacctccagcactctccctaaggagttcagcagtaatttgatttctgagttttgcccgctctttggcagccgcaattttaggattcatcaagtcaacttcaccctcctcaacatttgctttgtccaccactacttcatctcctggcttcactttctttccctttagaaaccttctgagtttttcccgctctttggcagcattggtagcagttttagcattcaccaagtcaacttcttcaccctcctcaacatttgctttgtccaccaccacttcatctcctggcttcactttctttccctttggaaacctaaccctttttgctggtggctttttggagaattcgtcgtcgtcttcttccataaaggggcgtttagcgctactgcgagatgattctgccgccattgaagaagaagaagcagtttaacgctttgagcttcttcacagagacatagaacaaaagagatttcccccttctctttcaacctcttcttgggggggggggactacgtaggct

SEQ ID NO: 2366 - DNA, 683 bp, Glycine max
  misc_feature (615)..(615): n is a, c, g, or t
  misc_feature (618)..(618): n is a, c, g, or t
tgttggtgaagcttgccagaaatatggcagcatctttatgcatcctcagggtctttatataagtttgaaagagaagggaaagatccgtgaagtgctaaggaattggcctgagaagaacattcaagtcatagttgtaactgatggagaacggatcctgggtcttggggatcttggttgtcaggggatgggaataccagtgggaaaactttctttatatacagcacttggaggagtgcgcccttcagcttgtttgcctattaccattgatgtgggtacaaacaatgagaagctgctgaatgatgaattatacattgggctaaagcaaagacgagcaactgggcaggaatatgctgaacttatgcacgaatttatgacagcagtcaagcaaacttatggggaaaaagttctaattcagtttgaagacttctgcaaaccacaatgcttttgatctgcttgagaaatatagatctacacatctggtctttaatgatgatattcagggaacagcatccgtgggtcttgctggacttgttgcagctctgaagttggttgggggtaacttaactgatcacagattcttattcctttgtgctggaaaggctagcactggcatancanaactcatagcacttgaaacatcaaaacagacaaatgctccacttggagaaatacgcaaaaatatt

SEQ ID NO: 2367 - DNA, 1663 bp, Glycine max
tgttggtgaagcttgccagaaatatggcagcatctttatgcatcctcagggtctttatataagtttgaaagagaagggaaagatccgtgaagtactaaggaattggcctgcggcgaccattgccccccccccccccaactgatggagaacggatcctgggtcttggggatcttggttgtcaggggatgggaataccagtgggaaaactttctttatatacagcacttggaggagtccgcccttcagcttgtttacccattacaattgatgtgggcacaaacaatgagaagctgctgaatgatgaattatacattgggctaaagcaaagacgagcaactgggcaggaatatgctgaacttatgcacgaatttatgacagcagtcaagcaaacttatggggaaaaggttctaattcagtttgaagactttgcaaaccacaatgcttttgatctgcttgagaaatatagatctacacatctggtctttaatgatgatattcagggaacagcatccgtggttcttgctggacttgttgcagctctgaagttggttgggggtaacttagctgatcacagattcttattccttggtgctggagaggctggcactggcatagcagaactcatagcacttgaaacatcaaaacagacaaatgctccactggaggaagtgcgcaagaatatttggttggtggactcaaagggattgattgtcagttcccgcaaagattcgctccaacattttaagaagccctgggctcatgagcatgaacctgttaaaaatcttctagatgctgttaataaaattaagccaacagtgttgattggaacatcgggacaaggaagaacttttactaaagaagtgattgaggcaatggcttctattaacaagagacctattattctttctctttccaaccctacgtcacagtcagaatgcactgctgaagaagcttacaagtggagccagggacgtgccatttttgcaagtgggagtccatttccccctgttgagtacgagggcaaagtgtttgtgcctggccaggccaataatgcatacatattccctggatttggtctcggtttaataatgtctgggaccattcgagtgcatgatgacctgcttctggctgcctctgaggctttggctgcacaagtgagccaagagaactttgataagggactcatatacccaccattcaccaacatcagaaagatttcagcacacatagctgccaatgttgctgctaaggcttatgaacttggcttggccactcgccttcctcaacctaaagatttagtgaagtttgcagagagctgtatgtataccccagcctacagaagctaccgatgaaaagtgataataataaataggcgcttttttctttttcatttatcatgatatcatttcattgtcaattttttaattttttaccttctttatgttcctgttatgttttttgtaagttatttgtattgggtgggttagtaggttaggacggtggtggtagtgaagtggtacttggaccaaaaggtagcttgaaaatttgtgtttcgctataaatgttgtgacagtaatctaaattagaaaaggaagcatttctaaagtccgcatacataaaataaagaaaatcacaaaaagatctatcttttaaaaaaaaaaaa

SEQ ID NO: 2368 - DNA, 1117 bp, Glycine max
atgggattgattgtcagttcccgcaaagattcgctccaacattttaagaagccctgggctcatgagcatgaacctgttagaaatcttgtagatgctgttaatgtatgatttcttatctttctgttcattacaccacacatacacagcagaaggttacaatgttcatacatggtcaatgttatcttctcagaaaattaagccaacagtgttgattggaacatcgggacaaggaagaacatttactaaagaggtgattgaggcaatggcttctattaacgagagacctattattctttctctttccaaccctacgtcacagtcagaatgcactgctgaagaagcttacaagtggagccagggacgtgccatttttgcaagtgggagcccatttcctcctgttgagtatgaggggaaagtgtttgtgcctggccaggccaataatgcatacatatttcctggatttggtcttggtttaataatgtctgggaccattcgagtgcatgatgacctgcttctggctgcctctgaggctttggctgcacaagtgagccaagagaactttgataagggactcatatacccaccattcaccaacataagaaagatttcagcacacatagctgccaatgttgctgctaaggcttatgagcttggcttggccactcgccttcctcaacctaaagatttggtgaagtttgcagagagctgtatgtataccccatcctaccgaagctaccggtgaagcgataataaatagcctatttttctttttccttttcgttttatcattttattgtcaattatttaatttttttaccttctttatgttgctgttctgttcttgtaagttatttgttgggttagtaggttaggacggtggtagttggactaaaaaggtagcttgaaaatttgtgttctgctataaatgttatgtgacagtaatctaaattagaaaaggaagcatttctaaagtccgcatagtatataaaattcttgaaaagttgttgaaaaaaaaaaatatttctcgacaaaaaaaaaaaaaactgtagatatcttattaacacctttctttgttgtaataataaaaaaaaaatctaattaacaccttaaaaaaaaa

SEQ ID NO: 2369 - DNA, 1425 bp, Glycine max
  misc_feature (2)..(2): n is a, c, g, or t
anacaagcaaatgagtcacttaattaattattttttttttttttttgatagaaataactttactgagaccttcaatgcactagtaggaaaaatcatccaaacgggaaaagggaaaagggaaaatcacaacgaacatgcacttgtaggccacatcatgacctgcatatatgcacgattcttatttagacacttgatgtagatgatgatcactagctagtgatcgatcaacaaaaataaggagacacttaaaatgacaagcctgacccacttaacttttcttccataatttgcgataacttttcacccatttcaggggaaaggtagttcacccaatctcccatttcagcctttcggaacaagtactttctctcaaagttcctagcaaatgttccagatttatttgcctccaattccttcatcttctcgaagctgcatagcttgattatgctctcaatagtcccatcaccttcttcctccgaagtgaaaggacatcctaagaactccgctattcttttcacatgaaaattgacatcttttttaagatcctcgtacttcaagaacaaaaccttactaggcctagctatactctccttccaataacccaacatttggtcccaagttggaccaaaccctattattcctttgcaatacttttcaaaagcttcccctagttcaaattcaggtaaatgttctggcttaattttgttgaggaaaatccaagtagacacaaaagtgtcaagtgggttcctacatatataaattattctactattggactccttgatggacttggccaatgcatggaatggaatatgtgtaccaaaaagtcttggctcagtcatgttggataggtttggaacatggctaggggcattaccataaacggtgtattctatgaaaggcacaagttcatgaggattagaagtaagcaaaggatgtgatgacattgatgtagtgatactatgagtatggcgattgacaatggcaaaggtgagagctttcagccaagtggtacctgattttggaattgtggccacaataacatcactgtctttagcttggaagtgcttctgaaaagtgattattgcttggatttccaatggctggcaccaaaatccttgaaatagatatatataacgtgttctccaacctctctccctaggaagagagagtatcaactccttacattcttgacttagcttgtcttcttctattgttatttcctcccctttctcggattcattttcttctctgaagcatgtgacatttgttggagccattagagtgctaatggtcgatctctagtaaggaatcatgctaccgacagatcaaacactggatgaaagcgatggacgactcaaagctttctttctgtttcgagcgcacaaattatttcattgtgaaaaattaaaagaaatcatcatc

SEQ ID NO: 2370 - DNA, 1031 bp, Glycine max
ttttttttttttttttttctttttttttttttttaaccaaaggctgagatataacaatatacaacactctagtcaggtgggtacacataggacactgagaagttcacaaagtactgtgccgttacaaacaaactcaaatgtgaactaaactcgctaggcactggacactggctatgaactaaaagcttatattggtgccaaaaattcagtgcacttagtttccactacaaatagccaaaccagatatatcatgagcctcagcaacagagtgcagatcagtccaggaatatgacctccaaggaggatttcgtgcggttgaagaagacggttgaggcagcgatgacctattaatgacgcgcggatgaagaggaggaagagggcatggaggagatattgaagtggagctactaccctcttcactacagctcagagtgagacaagatgttcctcctcgacctatgtttgtgggtcgctttgatattccaccaatatttgcgcaactgcgactcctctcaattgaggagttacgagctattaagttcttgcgtttcttggcataaggatcctctggcttcacaatctcttccatagaacttgcagctgcagcatctgctaagcttgtgaaggacctggatttgccactatagaacttggatatgcctttcttgacgggtaaatcttcctctagatcgttgatggtatctaaagggcctttgaaggagctctgaacctcaacttcgccggcgtcttcccggtcggaggaatcttccgacgaggtgctgttccttccgatggaggagtcggagctggagtcggaatcatccgccggaaaatcccgatcacagatcgcgacacagtgggcgaaggaggaccgtccgatcgtaactcctcctccgttattctccatagcaaacggcatcgttttggcagagacgatagaagaatgaagaaagggaagggatcagtgtgaaatgaaatgaaagacgcaacgcaacagcagagagcggggggggcctacgtagctgactcga

SEQ ID NO: 2371 - DNA, 1191 bp, Glycine max
ttttcttttttttatctaataaacaaccataatcctgatcgtgaaaatcttcgggtttcttttaccataatcacgcataaatacacaacactggatccttaaaacaatcagttgatagcagctgcaaccaaaaccccccgcaataaaaatatatatcccctaacagctacactaagactccaacaaaatgcgggaacccattcgggaattctatgttcatgacataaactttaaggctaaatagtgcttcggaatttgcctgcaagcaactttatttcatggttcaacaaacagaatttcaattgtcgtcagttctgcaatccacacaatttgctgtagtacgaggtgtcattagaaatatttgactaaaagagccattaccatggaatgcagaaggtagtgttcatgcatgcattgcaaaatcagaacattttacatagaagtaaagcagatgattgcgatccgggcaaatgtaatcaagtaaatctttcaactgtgtttaagcttcaatgcccagccaatcagaagtgtgctaaactgtaaactagaatccaggaaagcaggaaaagagttatagaagcaaatagcccctcttgaaggagggctccatgaccgccaaactcttcctcatcaacctttaacattactgcatagtaactatatataatcccagtggataacgctaaaaagaggataaaccatatgcctccaaccaaaggtatggaaccccaaaggaatccacacgcaaggccaagcacttgtctaatccaatgcaatacgtctcccaattgatccttgtcccaggaagcttcgggatcaaacaatttggcgaattttgaaggcgtgaggtgaccgttctggtgcggttgttgatggttgagtttaacggatttaccttctttcatagtgggaaacgaagcaacaaataaatattaaaaaaaacaacgagtgatggggagtgaactacttcacacaaagtttgggtttttgaatcgttattggtggatggctgatgattagggtaagaattgttgagaaacggcgacactggagggtagaaaaaggaaattagggttttggattaaaagtgaaaaggcaatctgaattaaaattaaaaactgcaggtcttggtggttcgatctggcatctgatctacagtgtctctctgtatttttctcaatctcaacaacc

SEQ ID NO: 2372 - DNA, 1262 bp, Glycine max
tttttgatctaaatctgcaaactagaatgaatttgttatctagtaaacaaaccataatcatgatcgtgaaaatcttcgggtttcttttaccataatcacgcataaatacacaacactggatccttaaaacaatcagttgatagcagctgtaaccaaaatcccccgcaataaaatatatatcccctaacagctacactaagactccaacaaaatgcgggaacccactcgggaattctatgtttatgacataaacatcaaggataaatggtccttcagaatttgcccgcaagcaactttatttcacggttcaacaaacagaaattcgattgtcgtcagttctgcaatccacacagtttgctgtagtacggggtgtcattggaaacgtttgactaaaagaggccattaccatggaatgcagaaggtagtgttcatgcatgcattgcaaaatcagaacattttacatagaagtaaagcagatgattgcgattcaggcaaatgtaatcaagtaaatctttcaactgtgttgaagcttcaatgcccagccaatcagaagtgtgctaaactgtaaactaaaatccaggaaagcaggaaaagagttatggaagcaaatagcccctcttgaaggagggctccatgaccgccaaactcttcctcatcaacctttagtattactgcatagtaactatatataattccagtggataacgctaaaaagaggataaaccatatgcctccaaccaaaggtatggaaccccaaaggaatccacacgcaaggccgagcacttgtctaatccaatgcaatacgtctcccaattgatccttgtcccaggatgcttctggatcaaacaatttggcgaattttgaaggcgagaggtgaccgttctggtgcggttgttgatggttgagtttaactgatttaccttctttcatagtgggaaacgaagcaacaaataaaattcaaaacaagcgagtgagtaatggggaatgaactacttcacacaaagtttgggtttttgaatcgttattggtgaatggttgacgattagggtaagacttgttgagaaacggcgacgctggagggtggaaaaaagaaaattagggttttgaattaaaagtgaaaagggaatctgaatgaaaattaaaaattgcaggtcttggtggttcgatctggcatctgatctacagtgcctctctgtatttttctcaatctcaacaaccacggatgaggtcacctgttgttcccttttcttctcgcagccgta

SEQ ID NO: 2373 - DNA, 1087 bp, Glycine max
ttttttttttttttttggagcaatcgattgctttcttaatccaaggaacaaaaagtgccaaccattccaaagtagaatgtaagagcatcttaatacatggtataatcatcactcttaaagctactttagacccaattcacagtccatggtgctacctcattgggttaccctccctaccccatccctctctttttctctacataatttgcgctccaactctctctcattttctcttcatcctcatagcagcagtaaagccatggtgtgtaatgcaatatgaagtccaaatgacccaatcatcacctgttcttgatggccagaagtgatgggtaaggggcgtatggtagcagaatcaacttcaccagtaggaagaggaactgcagggttgctgttaatgaagggcatgccaccacctttatccggcactaacggaattgtcactggcgaacctgcttgtgcttgtgcttgtggtgcaggaccaggtgaagaagcttcttgtccaggacgaaaaggccacggaaacgaaggagaagatggcacctctccaccagaagaaggagctggtgttgccactggagaatgttctggagccattgctgaagaagctacctctatggctagcttttgagaatcttggcatgccttgagtgacccattgtggaaggtaaagtagaaaaaaccaggccgagatggatgccatgtgaaggggttgctgagaagagtggcttgagtgatgttacagagcttgaaggctttctcgttcttgaaaatgtagaggttgtagtgttgcttgtgcttgaaaatgatggagtcaccgatggaaactgtggggctcttccactcggaagatccatctactagtattgtggttgaatgtgaaagcttgaagagtgaaggtaggagaaagagaaagagaatggggaagtgcattgtggcgaacgtggtttgttttttgaaggaaaattgcaaagagaagggtgaagaattagaggagggtttgtaggctgtgttgtatttatgtcgacaattatggaatagcaaaagaaaagggttgtggttactagttttcttagtatattaacgaatg

SEQ ID NO: 2374 - DNA, 1103 bp, Glycine max
caagaatgataaattaaataatataagcttggttaaatttgcttaaggaatgataactcagcacttccttttgtttttttagctgcaaggtttcaccacttttataaagcattttttcaatactaaaaaaatttacaatgacatagtaccagactagtaaaaaacaaagaactagtagttaacaagataccatttgcatattcagcagttataaagctactttaattttactcaataacacatttaaaaaagaggaagcactgcacttcaaacttcaacttagttcatttaggttagctgcggtggccatggatgccgccactccgccaggttcagcaaccacttccgccgcatctctctgccatggaaactgcacctctgcagtatacacagcctcagcatcttcttttgtcaccgccttgtccacggggagcttctccgccgcatccgttaagatatcggaaagtttcgtcatgtcttggactcgcatgacgtgactgttgaaagtagctgcttcttgtgcggtttcacccaccccaccggacctcaccttattctctccggtggccctaatctccgcgacgccaatcgcatcggcgtcattttggtccactggtttatccccgatcgatattgccgccgcttccagagcttctccgatggttatggggtcgccatctatggcagccgaaccgataccggcggacaccaccggcgcagcgtgaggctccgcggcggtggagacaccgaaaacgtcgccgcattcggtgggttcaccgtctgcttgtggcttcttggtttggccatgactcattggtttttgttttggaaaaaaaggtttggtgtaagcgtagaagtgttaattggcgggcccgctacatgcccaagagtatttggaatgttttggatggtgcatgctgaacacgtgttggttttgcagagacaaaagttgaaggtggcctttagttctacgtccaccttaggagatacttgagttacttgctgtggtgtactagtacacgtggcttttagtggtgcgtgtataaaaacggtggatatataactgccctggactctcgcttgctatgaagtataagcttgtt

SEQ ID NO: 2375 - DNA, 2002 bp, Glycine max
  misc_feature (116)..(121): n is a, c, g, or t
  misc_feature (137)..(143): n is a, c, g, or t
gatcacagtaccaagaggcactaaacatatgttgtgcctcactcaaacgcctttgaatgatgaatcttgattgcaatgatttaatgtaatggagatctgtttgaaatagtataccnnnnnncaaatttgttgtgggnnnnnnntgattttaagacaactattccttgtttttccaggggcattttataaaggacaagaactcagcatgtgttgtattctacaaacagatttttaatgtcaacatgtgttgtattctacaattaacataatcagacgacataaaagcacgaaaaataagatataaaaataggcatcactgcagcacgtctattagaaaagcatctcatgccaatgtgagcaatcaaagcataaacaatgaaagaagcagatatggtcctttcacttatatttatggggccaacattagactacacacattcaagaacaaagataattccgaacattggaaagttcattcggtaatccgacagatagtcagacaggaaccgttggtggtggaagttttgtcaaaggcaggtgaatgcgatagttcatggattgtgccatcttccaactgcatcaacgcctctttacacggaatttatttttttaatcaaaatcctttctaagaggtatgctggtttcacatgtaaggttctcgcaaagctgttggcagcactaattcagattgaacttcacttaaaggagagaaatagtattcaaccatgtcctctgatatatcttttaatctaggtgggtcccactttggtgcaaaatctctatcaaccattcgtgcccgaacaccctcaaagaaatcagaggagacatgctttgaaataccacgtagggacatgcgatactcacgtacaagacatttatcaagtgtttcaaatctaccttcacgtatagattgtaaagtaactttcaaactcaacggggaggcttctcttattctccttagagtagtcgagtaccattcgtcattagactcagcagcctctttctccaaagcttcaataatttcctccacagtttcgtgactgaaacatctatcaatagtatcaatcctgtgaaggacactgctcctatctggataaacaagatcaccatactgtgcgagggatgactccacaacagaaggttcgtctgtgattagtttaccaagacgttcttcaagcaaagagagccttgcatttagtgaataatgagtagcaaggcggcaggcaatcatttcaacaccattaagcttatctcctgtaagggccaagtattcccctaagtagccaggtagacgagacaaaacataagaagctcctgcatctgggtggaaacctatttgagcttctgggtgagaaaaaacagttttatcagttaccacacggaacattcctggtagagaaattccagatccacatcccattgttattccatccaaaatggcaacatgtggtttaagatatgtcccttgaagatatacaaatgaatataatgttttgaaaaactgttcagcttcgtcagtatttccttcattgagtgagtgatacagcctaacaacatctgcaccagaacagaaagctctgccactacccttcatcaaaacaaagccaatatcagagttttcttcccaggaatcatacagcctcttcaaccgagcaaccattgaagcattgagcgagttcagcgaagacggcctgttgagaatagctgctcgtgatttcgctcttccttcgactaaaatctgttcctgagaatcgtcgtcgtggtgctttgcgtaattcggttgagcggagaaagctcgacggtgagaacagagagtgcgaagtgaggacctagtttgttgaggtagcagagctttgaatctctgcatctttggttctagttcttttcgcggtttttgcgtgcagagaaggtgtttgatgtttgtactctgtagtgttactctgagtcagaaatgaagctcgagcgatgaaattgaagaacgtctttccctcggcgcccgcgt

SEQ ID NO: 2376 - DNA, 1810 bp, Glycine max
ttttttttttttttttctttttttttttttggtaaacaggaccctaccagagatgcatttttttatagactaacatgaaacaagggattactatacaaaagtttcagctatcatctaaagaaaagttttaatagctgtagctgcaactgcacgatgaagatatccaaacaaaaaaattggagaacttacattttaaccatttaggtagccgtaaaatgcacttttttaaaggcctaattctatattaacagtatgggggtaaactctatgaaagggccactaaaattcttcctgagactagtagcaatatgtccattatttaccatccttatatcccgagaaagggaaaccctatgtatggcttggtcttctcttcccagaatctgttcttagcctttttacagggtttgcccagccaactgacccaccagatccatttggttgttgagatggctggccagcccacccttgtgcatgggaaccctgttgagttaacctagcttctttggggactgaagatggacctggagttctcatgctagatggtgaaacaggaccagttttaggtttcacagcagatttctccctgtcatttcttctcttcttgcatacaacaagttcacccggatgcgcgagcagtgaagaatcttcctgctgttgctccctggtgctgctgcccccaccgcttccagttcttgattccctctgtggcaaatggactttaattctgttgttttcaccactagaagctgatccacgttgcagtgacctctgtgaagggtatgactcggtttccatctcatttatcagcctgtgcctcttgctttggctaacagccgcttgccttggggatgttactgtaccagcagcagcttgactggagaaagaaagtgcacttcttgcatctcggaagtccgtatcaggaaatgcgattttcaagatctcaaaaaagagatcatgaaccttccttgcttcagttcttacctcatgtgaaaaaccataaaaatgcattgcactcttcaacatgaactgcacatcaaatacaagctccgttgctccattatactcaaatttatcaatccgctgatcaatctttcgcagatctaacaggctatttacagacccagaattttcaatcctcttccacaaatccgttaacaaaggaacaatctcatggccttccttgtctattctcctttggagcttgctaattacatttttgcaccttctctggataatttcagtcatcttagtgccatgtgctgaagatccgcttgaattgataggttttccttcccagctttctctggagtgttcaccgccatcttgtgaaggcacagacatgcaattcaaacggcttgactttggagatccatgtaatttggatgtattagctactctccttgaaggtaaggttcgcttattttttaacgatggtgagttttgttcatgcctgctggcattggagtcaccaaataatttggattctgggtcagtcctcagttgcgcttgatatttgtggtctgcttggactgccaaatgagatgccatttcactaccagatttttcttcaggtctttcagtggcatgacggggtcgaacacgaagactgcgtttacgtttaatcttcggtttctgcaaaacttgttcatcctcaccttcatcacgatcatgaatccaacttccagacaattgatggtccatgtgagaatcaccagataccgcaatttccccttcggggggggggggcctcacccgttgcgcaatggagcttggccgagcatctaatgcagagagggaaccaaatttc

SEQ ID NO: 2377 - DNA, 1482 bp, Glycine max
aagcagaactaagagaattataataatttcagactaacaaatatgtgattcgaacagttttaaagactcgggtatatttagctgaaactgttgctaacacaaatacttcaacaacaaacctttgataaacctcatgaattatgtagttgggtctctgcccattattctttggaaaatcttaacaagaaatctacattaaaatatcacaaaattttctcgatgaagtcctacgtttacacaaatctgatccatcagatgatatcctcaatcgtgcttgtatttctgaacttatctgttggagcctgacagaacatcaaacagtccacagcaactcaaccaggaagtctttcgcaccacaggtggaactgatgctaaaggcggctgattatcagagcattctggagtatcagaatctttaacatgttctgcaccaataatagattcggggataggactctgagacactgatgctgatacttcactgtcaaattcccttggcttaggttcctccaaacttattgttctaacattctcatcaaaggaggaatgttctttatcatcattatcaacgctttgtacctcaggtacagaggcctctgctttaactggagcagcagaagattccgcaaccaaatcaccagtctcctcagccagcacattttcagtaatcgacgccattttggcgtgcaaagagtccatggatttaaccaactcatcaaatgcaaccgtctcatttactgaattatgggactcatcctttgagttctttaaggttccaatttcatcacttgaacttgaacttgaacttgaactgctggagttcccattcgcattcccattatcagattccttggcggactcaacatgtccaacactcacatctttgctctcagaaccctcagatttcatatcccactctatcacaacaataccttctttacctccttctgtttcatcaatcctattagcatcaccagggacttcttcaaagtccttggaagcagcagcagcatgagatggttgagcagctgaagggtccctctcctcctcctcttcattgaatgcaagatcatgttcaccatgtgttggtgaaccaccatcactccctttctcatcttgagacttcacctcatcattgccttgagggttggtggttgaagggtggttggtgttaatttcagtttccttttccttctttttcttggcagctttcctcttcttagcacctgatggcatgattaaggctagggactaaaatagagggcagccacaaatggtgggatgttgtcctctctctctctctctctctctctctctcacttttttagagtgggcaacacaacacaaaggatatggaagtgttgttgtacaaggcaagttgcacaaaaggagaagtaggtagaagaggacggggaagatggagagagatcttgtgtttgaaaattaattgttcatggggggggccctacgtagctgactcga

SEQ ID NO: 2378 - DNA, 1050 bp, Glycine max
tctcatcctacaatgcaatgaacacttagctagattaggggccaacgataccatctcttcttcattgttaaggcaaaatctaagtagccttcttgatttgcaagagtgcattgaaaagttggttcaactacccttaactcaagaagcacttcttcaagaacgccaagagaaatgggtggatgatctcttggatggatctctaaggctccttgatgcttgtaccgcaaccaaagatgccttacttcacaccaaggagtgcactcgtgagcttcaatcaactattagaagaagaagaggtggtgaagtggaactcgcggtagaggttaagaaattcttgacctcaaggaaggtggtgcgaaaggccatattcaaagccttggagaatctgaagggtaataataatgcaaataagggaaaccttgccatcactaattacaaagactaccaaaccatggcattggtaaacttgttaaaagaagctgaagtggtcactttttccacgtttgagtcattgctgaatttcttttctgggtccacacaagcaaaacgaattagcagctgggctttggtttcaaagctgatgcacaacaaaagggtagctacaggctacgcacaaggagcagatgagaatgagtttgcaaaagtggatgctgcattgcagttatttgcctttaacatgtcaaccaagtcaaatgatgatatcagtgatttgcaaaagaagctagagaacttggggacttgcatacaagatcttgaagaaggacttgagtcactgtttaggcgtttgattaaaatcagagttgcacttctcaacatccttaatcactagctgaagaatctaaactggagaggtcaaatttttgtaatggcatagatattattgtcttgggtacaattgtagatattaacgtacttgttatgttcatgatttgataaatatatcactcaatatattgttcatatattaaaaaaaaaaaaaaaatttcttccagagttcatgacttatttgcatggaataagttttcaaaaactgatccactttctgttaaa

SEQ ID NO: 2379 - DNA, 1579 bp, Glycine max
gtgaattaataacttgatatcgagctctgcatcaatatggtgtgaaatcaaagttgctccttcttttgttgcgaatttcttgccttatattaaaacttaccattcgacataccacagtgctacattaaaaacctctactactacatcataattgttcaaacaacgatgaacctataaagttgttttcaaatgggcttctggacggttgaaagatcccagattgctgaaatttagattgaatttggtatgtttcctcatacttgttcatctcgaactatgtttcccgcgcctaagttactgagagtgatgacatcatgattagaatgctcctcctctactgtttgcttggatggcaatgtatgctttttagtaattgaatttgatgactcgtagtcattgcttttaccccacaccacaagatacagtcctaaaataattacaatagctccaaccaccctcccaaggtacattatttcagccagaaagaaggagcccatgatagccacaatgaccatgcagagagggttaaaagttgttacaaagaccgggcctctatctttcatcactgctccttggatgtaataagccattcccgagcaaactatgccactgtaaacagcagcaagcagttttgtatcccattgaagagaccaagcagaaagattcttcctttccataaccagtgccactacgccaccttcaactgttcccaataggcatatccatgctgtaagagagagctcagcagggtaggcttcaatggtaatagcttggagaatcatgaaacaagcgcaactaaagcagccaattgtgatcatcactgatccctttattgcatgctgaagattcaccccaccattttgctggttgtgggtactacttgcgtgtgttccaaaaagatcaagtattgggccctttatcagggtcatgaccatggcacctacaacagtggctaaagtccctaccacctttgcttgactgcgtatactttttagttttaccttctcaagcctaagaatccaagccatgacaaaggtaatggcagggaggacattgtacatggaaacagcaaaggttgctgtggtgtacttcatgcccaaaaaatacaaattttggtcaataacaggctctagcaagctgagaatcattatcttcatgaagattgaaaatgtcatcttcggccttactttcttctccaagatcagtgcaaaaggggccatgacaacaaaggcaaaaacatgacggtacacgacaaatacatagttactcattcccttgttcagtgcagctttggatagaatatccataccagcatatccaaactgtaagaacactacacctatgaatggcttcagtctgttaaagagtttttgtttatcaccagccatcttgtttcagctcggaactaacctatttcttgaggcacaagaataagatagcacactggtgcaccacagaaagctcgtgtttatataggggccggagggttgtggtgtataattaatgcaattagtacttagagacttagtagtatatatactatacattatatttatacccacaaatagcagctcgagcc

SEQ ID NO: 2380 - DNA, 1333 bp, Glycine max
  misc_feature (11)..(12): n is a, c, g, or t
gtccttcccgnngggctccttgacagatctcttcgcgcgttttttttttttttttttgaaggcgaagaaccatttttactgttattatttcatacatggtacttttacactcaaaaggaaaattgtgatctagtcactaaatatatttcatttaggtatatgataacctttaatcatgatgtttatcatcatccacatcgtttatgacttcttcagtattattatcctgttccatgaaatcttttgcatcgtcaccatcggctggagctgcatcctccggtccatttttgctcgcatcggcggaccctgtggcattagccacattttgttgcttatccatcatcccagacaaggctagagtcggagaccattcaagaacatcatcaatgatgttagataccctcttctggtaccttgctctggcagcttcatcgggtgcatgatgcctcagcaataatatgaacagcacagctaccccagcatagaaaagtcttgttgtccacttgggcttttcctcttcatctttcttaggccaaaatctgaacaactcccgcagtgttgcttcctcggcaaggatgttagggaaaaaccagattcgctttccaagaataatatataaagcgccaaatattgtacctcttatcaagagtagagagaggatgaggaaaaggatcccggcacatgagtaaagtatcaatagcttgcagcgatgagggtacacaggaaataagcaaatagccaacgttaacacaggccagaagaatgagaggagtgtctgccagagtggatggcgttttacaaacgtccatgcaaaaaaagcatcattttcagaaaatacttgttcagggaaaatttctaaatgtgcaggccaggtagacagctttttcttcccaggacgaacagtttttacaacacgatcacagcgcactaaaagattttttgcaagtagaatgttggcaatctcctctgtttccaaaatcctatctaattctagaacatctttgagctccggatggctttttaagaagctcacgaaatccttccctctaaaatactcaacacgcgtctcctgtagaacagcccatcttgaaaccaattctttatggtctctaaccttctcagcaaacacccggaacacatctttcttgacagcttgtttccttggaggggcgtcggaggtgggatctagggcggaggaccgtcgcaccctcttcttgtcagctgcgcttcccgaagacttcttcattttctctttctctgctaccctacgctctctctctctttcttctatctttctaacatcttattaactaactcatgtgaatcttgagat

SEQ ID NO: 2381 - DNA, 1974 bp, Glycine max
  misc_feature (1965)..(1967): n is a, c, g, or t
ggaattcgccacgaggcttattcaccaatttattctatatgcaatcaaatttccaaaacccaagtttgaaaccttgataatcagctgcgccggccccccccccccccgaagaaggtgcacaattcgaccttctccactataatttgcaatgacatatatcaaacagtgataccaactaggagtgacatgcagcaaattcacactgcaaaattcacaattaagagtttcattgttgaaggtggaagagaatttccatgaagaaaaaccaacaacaacaatgaaagaaatactacaatgatcaacagcacgaaagaaactgattttccactaaaacaagaaggtctttcttcaagtgatcatgagaaggcaaaggctccatcgagctcatcatcatcacaatggctaaaactgaaggatccaaggattgttcgagtatcaagagcctttggaggaaaagacaggcatagcaaggtatgcacaataagaggactaagagatagaagagtgaggctttcagtccctacagcaattcacctctatgatctccaagataggcttggactcaaccaaccaagcaaggttgttgattggttgctcaatgcagcaaaacatgaaattgatgaattgccaccacttccaattcctccaggtaacttcacccttggttatccctctcttgtttcttgtaatgaagttagcacctctcgtgaaggttcaggccaaaacactttattatggaaaccaaagccaggagaaataatggttagtgatcatgataaggcaaattggatgaatagaagagaaggagatgatgatgatgataataatcataataatagtaatggtgataaacaaggaagcaataataattgtcatggtggtgcacttgttttgccaaataatctcttgccaacaagaccaaaccatccttcttttttgggtttgatgaacactatgccatcacttggttaccaatgggaacctaattcttcagctgctgatgttaatgttcaatggcaaaaccatggattttttaaccaaacagatgtacacagcatcgatgtggttccatttccgtcaacactggctctatcaactgggaatagtactagtactactactacttctcagattttggtgtgtcctcctcctccgggagcaacaacacagccatattttccttcttcacattttgcaacaatggagatgaatgcaaggcaaatcaaccactatcagatgctgagttcaagttctcatcaaaatctcttggcaaattctctcaatcatccatcatcacagcaactcatgagccaatccgggaaagcaccattcagcttgcgaattaggcctaaacttttccattctcctaatagcagtgaaagccattcccaaaaagatcaggatttcccttccaagtgatgcacaaatagagcaaaataaagttgtcaaaattcttcttctcctcacaaattatgcatggattgatatcttgagggctgtgtgggaattagttgcaagacatattattcaacgttttggggtttgaataaacattccgtttttgtcaaagttatgtttggttttatgattttccattcagtttgatctatatggatatgccatgcaaaggtctacaaaagaatggttttcttttcaagggtaagagctttttcctgaagtgatgatgtgattgctacactaaagagaacgcatgctcagataagttcacactctcttctatgcattgagaaaggttggaaggtggaataataatattatcattttgatagtgcgttttggatttgtttttgttttggttaagtaaacatcttatgtgtttgaatgagacagaatttctcagagtcctatgttatatactatttgttagttattaattacttttttttattaaaaaaaaaaaaaaaaattctttaattgtgtttgtatatattccatgcatgagannnaacatgc

SEQ ID NO: 2382 - DNA, 1390 bp, Glycine max
gtctgaggggggacattagtagataagaagcggagacggaggaattgtaaacgatattctcgtagcagggtagttgctctgttagagggctatatcttgaagccatacgtttgcaatcataacgaaagataaagaggttcggatgagtaagagtgctttcgatctaggagcaagagcattagacagcattcgggctggacatgccttatatggcaacattgatcagcactagcaggtgtcagactgtttaaatagaagatggcgtgctaacatctctggtattcctaaagcagaaatgctttcacatgcaagtagctctagaagctttgcatcacataatatcagcattgcatttaaaggatcctgcaaatggtgaaagcttgatgtactcccaatcaagtcttatggcttcagcttgttggcatctctcttccctcagtgcccaaaaatttagcaagtgcttcagatattaccacagtagatgaagcaggttcagcactttcaattttaatttcagcatccagcttcactcgtttagcctgtgactcctttgtaggtccaagtgggataatgtgtttagctagcaactgattcatcttgaacatgtcggtgcagtctgtctcaaataccaaacgcagtgcatcatcacaaattatctttcttttgttaccaggatcttggaggttgtttttctttatgtatgcccacagctgcctcacaatctcagttcttggcattgccggctcaccaacaactgcctgaagttcaggagaaacaccacaaactttgtttagaccaccagcgccacctcttcttttggctccagtttgaacactttctttgggcacttgaggaggggcaacagtgtgagcattttgaggaggaaaggtctcaactttgcacggtggaggagcgcgggggtgctgctggaagttgatctcgtcatggagggcaaaatgggaaggaaagtgggtggtcggaaagtgcggttgggggtgaggggcaaaatagtctttgtgaagtggaggagggtgaggaacaaatgcctgtggctgtgaccggagaagatggtcgatctggtctctgatgaaactggccttgtgagagaggtctaaccctagtttggcctccagctgctgaacgacaccgttaaccgtagttatggagtttgggtcagagtgacgcagtagagactccacccctttcgctatatcctggtccgtcaccattctccttcttcttctctcttcaccaccttcatataccaacagaaaaaacggctgcttataccttctctcttcttcttctgtctctatctttgagtttctctctctttataacaccgaaatcacaaaaatgccctttgttccgatttcgaaatgttggaaat

SEQ ID NO: 2383 - DNA, 1687 bp, Glycine max
gggaaaacattttcccccgggaaccccttttcccctgttttccccaagggggcaatttaccccccctaaagggaacaaaaattgggggttaggggcccccttttttttttttttttgggggtttttgggccttttttttttttttttttttttttttttttttttttttttcttttttttttttttttttttttttttttttttttttttttggatcacaggcagagatatattttgcattttatttcactattgggggttgcatgagtagcattatgcaatttctacatcaaagaaccactttgttgtgaaactaagaatgaaatacaaggttttgtaagaatttttgtcaggcttcaacccatattcacattctaccctctgtagaaaaaccaaaaggagttttcagtgagaaagaaacagaagctgtccatggctgctgagaggaacaagaatttgattcatcaacatgattaagctgggacaaaatttcacttcccatttcctagctttcatactctggacttgaatctcccaagatagacggtgctgcatccaacctcgttaaaacttcaggaatcccggccgtgttccttattataagtatctcctcatcgagataagaaatcatgaagagtctctgaaagcttccacttagaggaactttcagcccactagcaacaggatcgcgtataggggcaggaagttgttgtaaagcattagctgcctgcccaagtgcccctttaagctgttctggtactctctcttcaataattgttggtgtcacgaaaaccccttcaacatactcttctttcattctaagtggcccctccacagataatttggttgagagaatgactttgttttctatcgagtttaataatctcatgttcgcagtaatcttcgcatttccatccttaataacaaaatccatttttgacaaattagccaaagttgaaggaaagatttcaaatataaacctagcagcaaacaagcctggacttccagaaccaaaccactcaaagttccatcgcccctccaagaagggtgacgttgtggggcgaggtgttggattgagccgctcaagaccagttatcctttcattcacatcaatcttttgccattcagtagtcttcccagagaccaaggcctcgaaaccccctgcatctttaaaagcgagaagaagcgattctttggcggaaagtcgttccatttctttggcatacgcagcaggagcaccctgaacggcttgctgaaccatggctctgcatccccatctcttatttgagccaactctttggggcgaagaaagtgtcagccaagaacaataagaagaagaagaagaagaagaagagaatttggaagaggaagaagggatgcatgtggcgattggggaaacacaagcatgggaagaagctgaagcagccattgacattgtttgaaatgaaatgagtgaatgaatgaatgaatgaatggtgtgtctctttaattaagagtttaagactaatggtagtgcttcttcaatttgtcatcactcaagaatcgtgagttgaaaaaacaatagtaaaatactgataagcaacacgaatggaatgggcgaatcgcaccggttttttactggaaagttttcgactttaccttcctttgtcctaatcccggccgggcccctccgtggctgccgcgtttg

SEQ ID NO: 2384 - DNA, 697 bp, Glycine max
  misc_feature (18)..(18): n is a, c, g, or t
aagggctccaacagcagncactctcccttcgggttcgaccgattgacaatggagccaaggcagctaggtggtcaggccctgataaggtgtgtaagcagccagccaagaaaccagtccaagcactacttagtagctccgtgtggattagttttctaccaactgcagctgcagcagcaggaccaccagtcttggcagcagtttgaaaggttgcaaaagctgctggtgcaatagttggttggattaagatcatagcaagagcagaaagtattacaagcgtccgagctgttattacctttggttttgggaaagccccggttttgatttgattgagagaatgggattcgagtgtggagggatctgaagaagaggaaaaggatggaaaattaatggggtggttggaagaagcgagaaagggagtggaagaggaaaaaggagatggatttgcatgctggcaacaaattgaggagagccgcttcaagtgagagtgagaacgtgttgacggagagaaattgaatcttgcagttgcagattcgaatcgagtgagaaatgtaaaagaagggggtgaagacgatgatagaagcctatccatgactgatggcttctatctacaaaaacacaaaggaagaccagaacattcaatatagtttctttccttcaaataaaaccacctattacctaaccttgcctcttttttttt

SEQ ID NO: 2385 - DNA, 1478 bp, Glycine max
ttttttttttttttttggtaaaatcaatcgaaatcttcaaatgaaacagcaacatagttcttggcagtagagtaattgaacctacccgatatatacattcacaaacgtagtcaaataatagacaatcaaaatcttgcataaataatgaccttgctccaaacaatcaaatttctctctaacgtccctacttttttctagacaccaaaacgatgttcataaaaaaggtccctggctgaataaagtttactaatacaggctaaacccaaaaaactggctaatgatgatggcaaatccgagggctattgcaataagagaagaagcccaagtgagtttctcagttattctaggtactctatcttttagtgcctcgctacatgaaccgataaataccgtatagctccccattgcaacaacagttccaagtaagaacatgatgagaaatgcagcaccagccaagcgtgagggtagagcaagggcaggcaacaccatcatcaatgcatctggttgcagtccgtgaactattccagtggcaaaagtagcaaaaccaatcttcttctttcctacaacaggattactatcgcgtgattcatagacactgacatcacattcaccattttctaaggcaacacacggggtaggcacttctgaagcttccttaattcccatagcaccaattactagcagggtaaggccaaccactcgggtgccccaagttcggataatttcaatgtgaagtcgatcttttaagagcaaaaatattaagccaaagataacttgaccggcatcatggccacaaccccaaagggctccaacagcagcactctccattcgggttcggccaattgacaatggagccaaagctgcaaggtggtcaggccctgacagtgtgtgcaagcagccagcaaagaaaccagtccaagcactagttagaagctcagtgcggattagttttccaccaactgcggcagcagcagggccaccagtcttggcagcattttgaaacgtggcaaaagctgccggagcaaaagctggttggattaagagcaaaacaagagaagagagtattgcaaacgttcgagctgttattgcctttggattttggaaattattcggagtgaggggttgggatgggggcacggaggcatgaaaatgaatgagtggagagggggaaaggggtggtagggtttttggaggagaagacgataatggaggtggggtttcatgcttggatgaaattgaggtgaaggaacagcgcgttgatgagaaagggttgaatctgacggagtcaaatcgagggagaagagaaaagggcttgagattggtgttaagggaagaagaacaagaagatagaagcctatccatggcttctatcggaaatgaagagacggcttggtttgggtttatttgattggataaactctctactgtgcacagaaacctaaacacttgctctacacctctttcccccttctagactt

SEQ ID NO: 2386 - DNA, 1353 bp, Glycine max
gcacgagcctgagtttaatgaatttttattgaaagtaaaggatgttgtagagagcaatgaaagcaggagattacccaagattcctaaggggactcgtgattttgctaaagaacaaatgacaattagaaagaaagcttttctaataatagaagaagtttttgagaggcatggcgccactgccttagatactcctgtttttgaattgcgagaaactctcatgggaaaatatggagaagattcgaagttgatttatgatcttgctgaccagggtggggagcttctttctttgaggtatgacttgacagttccatttgctaggtttgtggctatgaatggtctgacatctttcaaaaggtaccaaatagccaaggtttacagaagggataacccatctaagggaagataccgtgaattttatcaatgcgactttgatattgctggtactcctactccatctgaaattatgggtccggactttgaggttgttaggattttgactgaactacttgatgagctggacattggggaatatgagataaagttgaatcatagaaagttactggatagcatgatgcaaatatgtggtgtacctcctgaaaagtttagaacaatatgttcaagcattgacaagttagacaaacagtcttttcaacagataagaaaagaaatggtggaagaaaaaggattaactgctgagacagctgacagaattgaaacttttgttaaagaaaaaggatctcctttagcattattatctaaatttaaacaagagggtagtgatttctcaaaacacaaaggagcttctgaagcattgaaagagctggaaattttatttatagctctggaaaaatcaaaacgcattgataaagtggtttttgacttgagtcttgccagaggtctggattattacactggagttatatttgaagctgtttttaaaggaggcactcaggtatttttcatgtcttttatctgcgctccagccgaaaatgcttcttctttcatctcttgttcatccttccaggggcaacaatgcattctgccagcttaggtatattgtgtgacaccctaaactggtgcacatgtgttcccataattcaacttaattgaatattatcatttaccaaaacttttcgttaatcagaaatatgatttgatatttgtagttcagttcagctcgtgttttattgtatagaaagttcaatcaatcagtaccatatttagtgttgtgatggctgcctcccttccccttttctgtaattaaaaatgttattgaaaaagcttaagaatatgaaaaaataaaattgaaattcttgattctttaaagtgggttaactcctgtaggttttatga

SEQ ID NO: 2387 - DNA, 1147 bp, Glycine max
attgcaaatgtgtggcaaaggacaaattgaagtggaacgggaaatgatttccaacgaagaggaacatgactttaccatttgatcatatcaacaaacctttctataaacaagtcaacatggataaattccatatacagcctacaggattaaattaaatcatattgtaaacaacataaaatcaatattaacatctactggactagtctgcctaaaccgaaggaaacaagaatttccattcctatgttccctattataaaattataaataaatatacacatctatgccaagtgtgttggtctttcaactgaacagaaccgcgcacactgtaattcctcgttcaaccttggttttaccccctagaagttttccgattctggtttttgtgacccttttcatgtgaagcagaaggaatctttgagataattaaagagctctgcaatccttctaatagtcttgacgttggctgaatcctgcgaatggatctacgaggctcagtgttttcagatgttgatttcagtggatttccactgaaagctttttcttcatcaatcttacccagccttccaccaccagcaggcgcaagttttcctttacttgcccttgatgttgatgtctttttagcagggtgagaatcagtcgaagacacaagtgatgaatgcaagattggtccggccccagctccagtgcttccagaatacaatgctctttccacctgattttcactctgagatacattcttaaaatgacttgatgaatccttgatcctttctgcatgacttgtcaaatcattagtacgagagtttgataatgggttttcttttggtgggaccactctacccaaaacactctgcgactttccagacttaaaggtgggcctggagtcagctcctagtttttccttggtatcattttttgaactatttttccacccacgtgatccagtaccttgaggtatcaagaaatttgaaagcttgactgaatcagttccatcattgatcttgcttgtcccatctgcaacataatgcttgcttacttccataaattttcttttcggcccggggcccggcgcacctgactccactcttgatccttctttttgaagaccagtcctcaccattctgtgggcatcagatttcggacgcgtggg

SEQ ID NO: 2388 - DNA, 944 bp, Glycine max
gtggttctttgggaagttcaatgagatgaaatcaatgaaggcaaagtactacctagccgagaagccaagatcatcgttcgcaaagttttgccgggtcaagtattcgagacttgtccatcccaagatggagtcatcgttttttggcaaccagagtcataggaaccttgtgaatgcaggagggtttccagacactgaattctttgcctcattcgccgagatggcgaagagggtgtggcttctacactgcttggccttctcctatgagcctcaggcttcaatcttccaagtggggaaagggtgcagattctctgatgtgtacatggaaagtgtgaatgatgaagtcttcctctattcagaagtggaatcagatccacaagttgctttcacagtagttccagggtttaggattggtaaaactgttttacagtgtcaagtgtacctctcacagcaccaaaccaaggttaaaaaaaaaataacttcaacaaagcaaaggtagttgctgcaagcacttactgaccccacaactcaggtgattgaactggaaggcaattcattattttcttagtgaaaaagaaatttttggagggaaatgaaggggccttgttgtggggactgaactctgcctataggctaactcaccggggcatctttgtccatttgtattttggtcattttgaaaagaaaaagccattggaccgttgcattgggaactgcccttttctttggattttttttttaattttatgccagatttatcaaagagacatccccccaaaattttattattaggccggtgacagggattgtctagctgttatgcatcttttagtaaacactgcattttataatttataatatgtacataatgatatataggtgggaattttataatcctcttttccttttcttttttatattttattttattaatctttgttctgctc

SEQ ID NO: 2389 - DNA, 2195 bp, Glycine max
tcgatcagctacgtaggcccccccccctttttattcactcacacagacacagttcaggaggcacacatgtgacacctgattgttgttctaacaatccgaggaagattgttcgagaatagactagaaaggaaaaaacatggtggtgctgttgtcggaggaggatgaattcgacgaggagcccggcgaggtagtggattcagcgccgccgcagaaggtcggcgaagagagagaattcagtggtttcaagaagaagcttttcaaacccggacagggattggaattccccaacttcgacgacgtcgtaactgttcgctgtgttggaattggaacattgctcgatggaacaacgtttgattccactagggagagggatcaacctaggacgtttgctcttggaaaagatgacattggtgctggtttggaccgtgccattatcactatgaagaaaggggaggtggcattgttcacgttgcccggagatggtggtgatggcgatgtttcgcttgattccgacgactcttcggctgtgcggtttgaggtggagctcgtttcgtggatcacggtggtggatgtttgcaaagatggtggagttgtcaagaaaattctggagaaggggagtggcattgagcgccctggtgatcttgatgaagtgcttgtaaagtatcgggtggtgcttggtgatggcactgttgttgtggagacgctggaaggaggagttgagtttcacatgaaggatggtcatctttttcctatattgccaaaagtaatcatgactatgacaaggggagagaaggctgaattaattctccaaccccagtatgcctttggggagaaggggagagaagctggcagtgggctctgttcaattcctccgaattcagtgctgcatgttaatattgaattggtgtccttcaagcctgtcataaatgttactggtgactccaaggtgattaaaaagattttgaaagaaggggagggtgctttcacagccaatgaaggtgcaaatgttactgtgagcttcacagctatgctagaagatggcactgtatttgagaaaagaggaattggtgaaacactacccttggaattcataactgatgaggaacaagtgattactggtctagaccgagctgtggcaacaatgaagaagggtgagagggcgataattagcatacatcctgattatgcatttggagatgttgaagtgagacgagatattgctattgtgccaccgggctcaaatgtagtctatgacattgagatgatggattttattaaggagaaagcaccatgggaattgaatagtaaggagaaaattgaggtggctgggaggatgaaagaagaaggaaatgtattatttaaagttggcaattatcagcgagcaggaaagaaatatgaaaaggctgctgattttgttgatgaagatggatcctttgggtttgatgagcaaaagcaagctcagacactgaaagtgtcatgctggttgaatagtgcagcttgtagccttaaacttaatgactttcctggagcaatcaagctatgttcacaggtgcttgatgttgaattttgcaatgtgaaagctttttacagacgagcacaagcatatatagaaactggagattatcttttagcagatgtagacatcaagaaagctcttgtggtggacccacaaaacagagatgttaaggtaattcagaagaaattgaagcaacttcaagctgacagtgacaaaaaagatgctaagctatatgaaaacatgcttgcacgtaaaacaaaggacccatctatggctataaagagattgaaggtagagaaagatcagggggaaaatgaagaggttgcaagaatggaaattgacgaagttgctgatagcgcagtgattcaatagttgattcttgttgaacatgtatagattataatataaagcttctattaacaaaatatgtaaactagtagatggaagttgcaaattggattcggatgaaaacctacatgttccaatagagtacatttatgtattccatcaacttgtaatcttgccacatttcagatgaacattatacatactacattcgcatgcaaatcttgtttaattgttagctctttacatttattttggatagttatattgtacctaatgccattaggtggctaacaaaagaaagagtattgttgtgaaaaaaaaaaaaaaaaaa

SEQ ID NO: 2390 - DNA, 1276 bp, Glycine max
cccacgcgtccgtacggctgcgagaagacgacagatagggttttggagttgggtagggtgaattgcaatttcaattaattagaattcaacgtttgcaaattgcatattgttcttctcttcctctcttcctctgactccatgtcgtcgataacgggcatccaggggcaacctcttgaggttacggtggtttcgtgctccaagttgaaggacacagaatggatttcaagacaagatccgtacgtttgtgttgagtatggcagcacaaagttccgaaccagaacctgcacagacggcggaaaaaacccggtattccaagagaagttcatctttcccctcattgaaggccttcgggagctcaatgtccttgtttggaacagcaatactctcaccttcgacgattttataggaagcggaaagattcaattgcacaaggttctctctcaaggcttcgatgactctgcttggccacttcagaccaaaactggcagatacgctggtgaagtaaaagtcatattgcattacgcaattgcaaatcaaaggcataaattagtgtcaggccatgctccatcagcacctccgtatgtggcaacagcaactcctcccgtcccttcttcatattctacttcatacccgccacctccttctgctacttcctacccaccaccaccatcacctccctctgcaactccttaccatacaactggatcttattcttacccaccgccgccgccacctcctacagcttaccctccctattcctcacattcatctccctatccaccatcatcataccccccacagccctcctcgtatcctcctcctcctcccccatcatcatatccccctgcttcagcttatccatatccaccacctgcaggctatccttctggaatataccctccaccaccttactgactgagatcttctaccttctcaaccaaggaaccaacatcaacatgccttgtatgccaaaagggccttcagactccctttcaatgcttgttcaaacgccccgtgctttgaccttttgaggtgtcttgcttgtaaagtgtttattttatacacattcagatccaattaaagggcaccattttttttttccgcaattggatgttcactgaccattttccggttttcttttgtctccgtaaggatgaaatatctatgaatcgtttatcaggttgctcaaaaagtagagttgatcagcgttaatcagattactctatgttgaattcaacacacaatgagcttcatgagcaaaaaaaaaaaaaaaaaa

SEQ ID NO: 2391 - DNA, 570 bp, Glycine max
caccaagtgctgcgtctttaggttgcaacagaaagatatttttcaactgtttaacttaaaaaacatagcagaggattgtaccgaaaaacaaaagcaaaggaagggttggttccagcagcagaaaatctaaatttcatatcagagactgtgtattgaaaatccaaaaatggacctaacatcttgatctatttcctaagcctccctacgcacaaagtacagcttgcccatcacatgaaggatggcaacaaatgctataaagccaatgctcattacaagaaccacatttggggagatcttgagtccaggggcatcatcagtgtaaaattggagcatagttccagctgctcctccagaggccgcaccaccggttgttctccttctcctcatgctggcagtagctgctgcacttcctctcgggggagctgttccacctaaagccattttctgaatgcgaagttccgcttagtgagattcgtcggtgtcgcagattcgagagagggaaactcgccggaaatttagaactccgtttaaacgtgtacaacttgtttcttcttattatcgcgttttttt

SEQ ID NO: 2392 - DNA, 827 bp, Glycine max
tttttttttagccagaagaaaaggttgtaaaaaccattaattcagctatgcgttcatcttgtacaaatcaagggagaaaaaaatgtacaagttaacctggttggcatatatagttacccatcaatctacaccataaattccaacactttccccacctttaagttaagcgactaaaggaaactaaaacatatttcaccaactgcaaaaacaagaagatgcaacagaaagatatttcaacagtttaacttaaaaaatagcagtaccaaaagacaaaaagcaaaggaagggttggttccagcaacaaaaaaatctaaatttcataacagaggtgtattgaaaatccaaaaaattggacctaacatcttgatctattctctaagcctccctacgcacaaagtacagcttgcccatcacatgaaggatggcaacaaatgctatgaagccaatgctcattacaagaacaacatttggggagatcttgagtccaggggcatcatctgtgtaaaattggagcatagttccagctgctcctccagaggccgcaccaccggttgttctccttctcctcatgcttgcagtagccgctgcacttcctcttgggggagctgttccacctaaagccattttctgaatgcgaaattccggtgagtgagattcgtcggtgtcgcagattcgagagaggaaaactcgccggaaatttagaactccgtttaaacgtgtacgacttgttctgctgtcgtcttctcgcagccgtatatctcctcataagcaattcggaaaggtattttctgtcatcagaaaatccggcccgccggctcgagcggccg

SEQ ID NO: 2393 - DNA, 964 bp, Glycine max
  misc_feature (4)..(4): n is a, c, g, or t
  misc_feature (6)..(7): n is a, c, g, or t
  misc_feature (19)..(19): n is a, c, g, or t
gttncnnacgattcctgantttttagagagaaaaaaaaagtaagtacaattggaagaagaagaagcaacattctgttcagttgtcctcgccatcacctacctaaggctttttcctttcacataaaccaaacactaaaagaaaaaaattttaaaaaaaaagagtctaaaaactaggaatttacatgagaaaatccttaaaaaaaactaaaggggtggtgaattctagccaaagatcaattctttctttcatggtttcaacccagattttaaattacggtcgcagtttcatcgggattcttaatatcatgggaaattgtgaacaagactccgaaaacctaaatgttgtcgcggatcgttttctaaaacctcggacttttgaccagaattcagaagccaaaacacccaacatggtggtggtgatgatgatgaagggacttgtccctatcaatcaagccacgaacgtttctgaattcctcaacatggcaagggatggtgatggtgcccttttgatcaaagccatactcttcctctgcctctttgagaagctgcatgaagagagggtggttgatgtaaatcacaggcactacgaacctttgttgctcttctccttgaccaaccttaattgccatgcacccttttgggacccctctgaactcttgttgcttattcttcccttcacgatgatggtgatggtgcagattgaaactcttgcttggactcttctctccaatacccatttttttctgccaccaagaaagaaagaaagacaaaaggaaacaagaaaaaaggaggactttcgtatgtgtgtttgaaaggaagaaaaaggtcacaggaaaacgaagatgagaaaaaaggaccaaggttctgagcctgttgttgccatgtaggaacgggttagggaagagtaactcggagaccttagattgttggacatggctgatgataatgagaaactaaagctccc

SEQ ID NO: 2394 - DNA, 856 bp, Glycine max
tccgtcagctacgtaggacccccccccatcacttattaattgtgttaagaaatttaagtgaggagctagagaatgatgatgaagtctgctatgtgtgcagtggtggttgtagcacttcttcttctggcggaggtggggcccatggctgaggctgtgacatgcaccccaacagagttgagtccgtgtcttccagcaatcacttccggtgctaaaccttccaatgcttgttgcacgaagctgaagcagcaaaaaccatgcttatgtggctacctcaaaaacgctagcttgaagcagtatgttaactctcctaatgcccgaaaaaccgttgcttcttgtgggattccctttccaacttgttaattaattaagccttcttataattaaagtgtgggatatatatatatatatagataaacagtttaatttatacacactttgatcctacaaagcatcttgacacaagcattcaataggatttcaccactttatcgcaacattttaacatgatgcggtaataaagtaaattcttgttgaatatttggataacgatgttatatactcatagtttgtgtgtataaattaaacttatatttattatttactctatatatgtcactctacgtttgtgtgatatattatacagttaagtatttagctatctttgaatatgttaaggatgatcatatcagataaagctctctagagttgaatatgaccagtatacatgttgtatccagggaattatatgtgttaagagctataaataaataaataaataaataaataatgatgttctagagtggcgtatatgtcctctcaaaaaaaaaaaaaaccaaagaaaaagaatggaggaaga

SEQ ID NO: 2395 - DNA, 810 bp, Glycine max
  misc_feature (8)..(8): n is a, c, g, or t
tcctctanacggccgtttttttttttttttttttttttttttttttctacgatcaaataaaaccataacatttaagatgtcaaatggaaacctaacagggaaatactaaattgttgaaaagactacatcaatcaaaacgaacacttcaacaatgctcgttctgtattcaaagtaccacaaaaactaaaagccactatgtcccaggccaaatgtaattgtccaatacacctaagcatgaccttcatacaaaaacctaactttcactttcacttttaaggaagtgagggctaatcaagcgagcaatctctagcatctcaacttgatctttccctgcaaacaccttcttcagcttctcatcacaatttatagtcctcttgtctgtagggtcctgaagattgttgtccttaatgtaagcccaaatccgtttgaggacttgggttcgagccatctcgggagcgccgacgaggtcttccatctcgggggagactttgcggggtttcatgataccacggattttgcgggctggcttagaagactgagaaagggtgcaacaggtaatgcgactggtacgcatcatgcgcaaaccagaagaagcagaaggcctcatcatgaaagtgtgggtttctgatggagggagaacacataaagaagaagaagaagaagaagaagacaagagcccaaaaccaaaagacagagccattattttacgtccacagccaaaacacaaagagaagaagagatagacaacaactcacccagcccctatcctctctctccccggcccgcgccggcctcctaagcggccgccac

SEQ ID NO: 2396 - DNA, 605 bp, Glycine max
tttgttttgtttttttttttaagcaccataaaagttaatccctttaccaactcaaaatctcatcatgtgtaacaataatagagcttacaaaaacaaagcatatccaaaagacaaataagaactaataacttgaagttttaccaaaaattctcactgcaaacacctcaaggatgttcggagcactgttttcaccatactgcgggcagaataaatttttaagtatcatgggggattgcttttctggttttcactgtattttccaacttgttttgttctgtcgagtgtgcaagcaatgtgatacagcaaaaacttctttagtcaggctgtagcagcaattttaaattgtgccgtttatttttccagcttcttcaaactaatgaattgctcaccaagttgcacctcaagggcagcttgagtatcaggtgccaaagttttaacaaaattcttggtgagattgtgcttagacaagatctccaaggccttgacacaaaacttcagtacttcggtccgccttgccggtttacttggcatattagtcaccaattctttcatcagccgagaaagtttatcaaaactggggggggggggcctacgtagctgattct

SEQ ID NO: 2397 - DNA, 1042 bp, Glycine max
ttttttttttttttttttggtagaaaaatccaatcgaagtgcatttagtagttcccttttttttttataggaaaaaagcattagttttactaaggtctaagcactagcataatactgatgtttcatttacatatggttcctaatcactgtaggaaaaaaaaaacacgatagaaatgttacaacaggaagactgatattcaatctagttactagtcaattgccattgcttccgcccccccatttgtgtcctccatcccattcttaagctcctcggttgccattctcatctcctcgactaggctcttctgctcttcctctattgtgttctgcaactcatccaccacatgtaacaacagcgcaaattgcttcttcctgagctccaacaacctcgaaccagccgtgttctcggcgtccaaagcggcaatttcgttctccaactctgaaataaccttcatagtctcggacctcgggggctgcatggcaatcaacttcctaatagcctcgcactcctccttgtgccttctctcaaccttgctctcctcaagctgcttcttgagatcctcaatgtcatcctgcgcctgcaggatctggcgattcatttcctccttcaactcgttgaaattctccttctccctaatgttggcctccacaatcgccttgctcttcagaagaggaatctcgaatgtcgtcagctcctgcagaaaggctctggcgagcttgtcgcattcgttgtagttgttgtcttcgtccttgtccacttcggagacgaacgaggtgaacttcttctgaagcttcttcaagggagggtcgcccctggtggtggtggtgcgcgtgagaagcctgtgcttgatgattacgtcatcttcggagggaccgaaggcgtagttcgccgccacggattcgccacgcgccgaaaccttcctcgtctttcccagcatctcgatcactgctgcaaggcgaaaaggggggaaagtagtgtaacgagtaaggaggtcagaatggtgattcccccctccgggcggcggcgcccagccgtagctga

SEQ ID NO: 2398 - DNA, 1791 bp, Glycine max
tcgagtcagctacgtaggccccccccccgagaaataagtcagaacctaggcaggtcgattgacataacacccgaatccaagtgaaacgaaaaacactcatcatcatggattcagttgcattaaatggcaaaagcaatgataagcctcttcacgttgccatgctcccatggctggccatgggtcacatatacccttacttcgaagtcgccaagattcttgctcaaaagggtcactttgttaccttcataaacagccccaaaaacattgaccgcatgcccaaaaccccgaaacacttagaaccattcatcaaactcgtgaagctacccttgccaaaaatagagcatctcccagaaggcgcagagagcacaatggacattccgtccaaaaaaaactgtttcctcaagaaagcttacgagggcctacaatacgccgtttccaagttgctgaaaacgtcaaaccctgactgggttttgtatgacttcgcagctgcttgggtcataccaatagccaagagctacaacattccttgtgctcactacaacattaccccagctttcaacaaagtctttttcgatccaccaaaggacaaaatgaaggattactcgctcgcaagcatatgtggtcctcccacgtggcttcctttcaccacaacgatccatatcaggccttacgagtttttgagagcatacgaaggtaccaaagacgaggagacaggtgaaagggcttcttttgatctcaacaaggcatattcaagctgtgacctttttcttctaagaacctccagagagcttgaaggagactggttggattatcttgctggtaattacaaggttcctgtggttccagttgggttgcttccaccatccatgcagataagggacgttgaagaggaagacaataaccctgattgggtcagaatcaaggattggttagacacacaagagtcgtcatccgtggtttatattgggtttgggagcgagttgaagctgagtcaggaggacctcactgagttggcacatggcattgagctttcaaatttgcctttcttttgggcattgaagaacctgaaagaaggtgtgcttgagttgccagaagggtttgaagaaagaaccaaggaacgtggcattgtttggaagacttgggcaccccagcttaagatcttggctcatggagcaattggagggtgcatgagtcactgtggctctggctctgtgattgagaaggttcattttgggcacgtgcttgtgactctgccttatttgcttgaccaatgtctgttttcgagggtgctggaggaaaagcaagtggctgttgaggttccaaggagcgagaaagatgggtcttttactagggtcgatgtggctaagacattgagatttgcgattgtggatgaggaagggagtgctctaagagagaatgccaaggagatgggcaaggttttcagttccgaagaacttcataataagtatattcaagatttcattgatgcgcttcagaagtataggattccttccgctagctaagcaggattcatgctttccatttttccccttcttcattagcgtgcttttttatcctgtaataaacaaggttatttcaaccctgattttaaaaaataattagcaaccgcgattttagttggaatgtcaagttaaggtttgttcttgtttctctctgtattttagtttttactctttaaatatttttggaataattcttataaaaaaaaaaaaaaaaaaaaaaaaaaaaaaaaaaaaaaaataaaaaaaaaaaaaaaaaaaaaaaaaaaaa

SEQ ID NO: 2399 - DNA, 1159 bp, Glycine max
attttttttttttttttttaataaaaattactacatatttcatagacaaaggattagttttaaacattgtaatacgaagaaagaagttccataccatactcaagtacaacccatggtaccacgagcaaatgaacagcttagtaaagttagaagagttgacaaaatagttatagataatcagagtgcacataacttaattaagtctaagagcttgagcatgatgtcggatgtgatcatctatgaatgtggctataaagtagtaaaggtggtcataaccaggttggaaacgtaacagtaggggaacgttggcctttttacaagcctcttcaaacttgtgaggcaacagttgatcaggcaaaaatttgtcatcttctccctgatcaatcaaaatggtggaagaaacattgggaaactttgttaccaaacgagtggcatcgtaatcctcccactcagatttattgtcaccaagataatttgagaatgccttctgtccccaaggacaatttataggatttgctattggagcaaaggcagaaactgacttatatttatcctgatttttcaggaagattgttagagcaccatgcccacccatagaatgaccaaatatagaagcttttgatatttcaagctgtggaaaattatcactcagaagctttggcaactccttgacaacatagtcatacatgcgccaattcttccatttctcttgtgtggcattgagataaaatcctgcacctactccaaggtcccagctgtctgcttctccttccacattcaagcctctcggagaagtgtcgggggcaaccaaggcaacaccctcggcggaagcggcacgctgagcacccgacttgaatatgaagttctcgtcggtgcaagtgaggccagagagaaagtacagcacagggaatttgtgagagggagaaggagatggagggaagtagatgtggaagttcatggagcatcccagggtaaggctgaaatgcttgaatctcttgttgtaacctccgaacatcttgccgctgctgatctcggtgggtttggtgtccatctctggttctgattaggggacttccttggagtaggttggttttgggtgagtccccttctgtcgtcttctcgcagccgtaaagatctgcgagtgagagtgaggttttat

SEQ ID NO: 2400 - DNA, 1258 bp, Glycine max
cggctccggcgacgccgcgcacgcgcgttctcattatctttcttttttggttaaataagactattctttaataatagaatacttctatcaaattatactacaatctatgataaatttgtcattagaaaaaaaaattatatatttcatagacaaaaggattagttttaaactaacatggaagaagttccattccaaactcaaatacaaccagggtaccacgagcaacttaacatctgagtggattcagtagagttcacaaaatacttatagatcatcactcatcagagtgcacacaacttaactaagacttaagagcttgagcatgatgtcggatgtgatcatctatgaatgtggctataaaatagtaaaggtgatcataaccaggttggaaacgtagcagtaggggaacattggcttttttgcaagcctgttcaaacttgtgaggcagaagttgatcaggcaaaaatttgtcatcttccccctgatcaatcaaaatggtggaagaaacattgggaaacttcgttaccaaacaagtagcatcgtaatcctcccaatcagatttattgtcaccaagataatttgagaatgccttctgtccccaaggacaatttataggatttgctattggagcaaaggcagaaactgacttatatttatcctgattttttaggtagattgttagagcaccatgcccacccatagaatgaccaaatatagaagcctttgatgtttcaaggtgtggaaaattatcgctcagaagctttggcaactccttgacaacatagtcatacatgcgccaattcttccatttctcttgtgtagcattgagataaaatcctgcacctgctccaaggtcccagctgtctgcttctccttccacattcaagcctcttggagaagtgtcgggggcaaccaaggccactccctcagcggaagcggcgcgttgagcacccgacttgaaaatgaagttctcgtccgtgcatgtgaggccagagagaaagtacaagactgggaatttgtgagagggagaaggagatcgagggaagtagatgtggaagttcatggagcagccgagggtagggctgaaatgtctgaacctcttgttgtagcctccgaacatcttgccgctgctgatctcggtgggttttgtctccatatctggttctgaatagaggacttcctcggactagcttggttttgggtgagtgaaagatctgcgagtgagagactgaggttttacatccaagggggctataat

SEQ ID NO: 2401 - DNA, 1601 bp, Glycine max
ttttttttttttttttttttttttttttttttttttttttttttttttttttttttttttttttttttttttttttttttttttttttttttttttttttttttttttttttttttttttttttttttttttttctaataggtgatatctgattggtttagatagtaaatatctttaaacatgaaaattaaactcatactttatccaattgtgcatcaacatgtttcgcatgacattctctgttacaatactattgaagatgtatcaacaaacattacaaaatcttttaattgttctgtctatacaaaaaaataatattcagaacaaatgaatcagaatcaaccaatataaaattatgtcctaaaatgatgaatgtgttgagccaatagcaattctttgatggtggtggtaatgatggtatgtatggtgatggggtatgtagagatcataaggtgcccaaagaaaatccactgagcaaggcatcttggcatcaagcctagtccatggtttccctttaccactccaatgtagcaaactaactggaccaggatgcagagtcctacaactatttcttacattatcccctccaagaccatgttggttccatctatgttcaatggcctcaacattaccaccgaaagccagcaaaaagggagggagtgaccccaacttgtagatccttctctccttttgaatctccatccacttctcaatcttccttgtgtagtcgcccgctctccatctcaccaaatccatcaccatcaccccagtgttgaaataacaaggccttttcccttggaagacctcagaaaactcagcacttgaccaaaactcataggagaaatatctggtgaagtttgcatgacagtattcaggagcaccaatgacccttgaccctgtcaatgaaaccttccaaagctcttggacatcatcaactactacaacatccgagtccaagtatatgaccctttcaatgcattgatcaagcaaatcagcaaggtaacttcttgcatagttaagagggttgtcaagtgcctccctaattgaaggagatatgagattgccaacaagactttccctgaacacataaactttgaatcccaatgaagggaaggaagtgtgaacaatcctttcaaacacatccttgctctccaatcttgcatctgatgcaatgaaatgaaagaacaggttctgcgggcaggaagtgtgtttcacgacagaatgcactgcagcaatagaccctcttaagtagtgccaatcaatggtcatggcaacatgaacaagtgaaggatcacatactaattgcgcattggttgtgtcaattagagtgcacttccgctggtttctgtattctggggcctctctgaattgcgcaaaaggatcaacttcttcaacctcagtttcataaccatttgttctggcaaatgatcgaattccattggctggaatgagaagcaagcaagctgagaacacaaacacaaagagaattgatctcgagaggaacatcactattcactacccttttcaattcagaccaaaacaaagtttaattgagacaccaaaacccacccggacaggaaaaagagagagagagagagata

SEQ ID NO: 2402 - DNA, 620 bp, Glycine max
  misc_feature (178)..(178): n is a, c, g, or t
agggtggcaagggcctccctaattgaagaagatatgagattgccaacaagactttccctgaacacataccctttgaatcccaatgaagggaaggaagtgtgaacaatcctttcaaacacatccttgctctccaatcttgcatctgatgcaatgaaatgaaagaacaggttctgagggncaggaagtgtgtttcacaacagaatgcactgcagcaatggaccctcttaagtagtgccaatcaatggtcatggcaacatgaacaagtgaaggatcacatactaattgaacattggttgtgtcaattagagtgcacttttgctggtttctgtattctggggcctctctgaattgcacaaaaggatcaacttcttcaacctcagtttcataaccatttgttgtggcaaatgatcgaattccattggctggaaatagaagcaagcaagctgagaacacaaacacaaagagaattgatctagagataaacatcactattaattcacaacccttttcaattcagaccaaaacaaaggtttaattgagacaacaaaatgaatcaagaaaagagagagagagagaattggattcgaccgggggggggggggcctacgtagctgactcga

SEQ ID NO: 2403 - DNA, 759 bp, Glycine max
agcacattaagtacgcccgtctgtttttccaaaaagaccaggataggttaaattttcctaacagcaccccacatgcatagcattgaacaatttataagttataacagaagtgtaattaataacaacggcgagctaacttcaaaattactttcaaacaatccttcgcggcaaaagtaaatataaatgtaggtttacacataaaacacctttgtctgttgaatacaacatctggtccagtcaaagcctctcaagaagcccgtcataccgaatatcaaattttcaaattaacagcttctcaatagcatcctttagttgctgaatttgggatttgagttgacttccttcattagttgttacagaacatgcaatcactggccgtgtgactccacatgctcgcccaagtgcttgttttgatggaacgaatacatagggaacattcttatcctcagcaaggagaggaagatggagaagaatctcaagaggctcagtgtctgcggccatcacaacgaactcagaaatgcctctgttcagtgtcttagtcgcttcattagcacccttttttagttgcttgtagttggcagcttgttgcacaagatccaagattgttattgcgagttgcgcatcggccaaagggtaagcttttgggttcactgtctctcctgtcatttttgtggggggtgccgttgattgcaggggagacaaaaagaggctaactagggttttgaagagaaacgtcggggggggggcctacgtagctga

SEQ ID NO: 2404 - DNA, 1846 bp, Glycine max
ttcattttccaccactgtctaatgttatggatagtttatggtgttaatatttgattgtcatcagagtcatcattaataaacatatatgtggaataagagtcatcaacgtttctccaaaaaatcgattcaaatggaacaagaaaatacatgactaaaatataaacaatttggaggattgacaaatatgtgcacaagcctgacatccaaagttagaaaagtttcagtttttccttcttctcttcaaaaacggcatggcactaaatgctccagtggaggctccactattgttgcgagtattctcctgtttcaagaccgctatatcagaatgatcataactactagcacttgcaaggtcatttggctctatattgaatggccctccaccttgtatcccattttcaggcttttcagcgccagaaaataatatatctgaactacttttatcacgattagtttcatccaaataatcagaaccgtgtggaaagtctgcattataatcgactgtagcagtatcgacattgtcacttgtatcctgcttgacacctgtatcaccatcatctaaacagaatccacctcccattttaaggtagtcatcagaagagtcctgattgccagtaccaggatgacaagtttcaccggcatctgtgcaaaaccaaccacctgactcaagggagtctgtaggcaagttctcctctggaggaaaattcattgcactgcattctttcgccatgctgaaatctgttgcaccatcttcacaagcaccaagaatatgagataaattttcttctattggaccagtctgatttctccgatcaaatgaatcatcagcatcttcatcttcaggctctttgaaagaatagttgacaggttacctcttcctctgccacttctattccgaatcaatgccttaccatcatgttgctcttcttctatctgcagacttggctgtaaattctcaatctcagatgtaccaggtgctgaagagggatcatcattgactttctttttctttgactgttccttagcaacagtatcattcttccttgactgttttatttttgatttccttctaccctcaagatttccctctattccccttgaagtctccaatgtgatatcctcaggttctctcccagtcttcctactcttggagaactcttctgcagaatcatctatcaaatctgaaggctgcttaccagtgattccttttaccgctttcttaattcttttactacgaatttttgcaaatctttcattaaaattgtaaaatgcttccaaccgcaattgagtctcacgcttgttatactcctttaagactggtaggatcaattcatctgctttctggccagtccacccaaatttctcccagcacaattttcgaagaacaagatgatctggctttccccatgtgaatggctcagtggatttatcaacatggggagaatagtaagcagatataacagtatcacttggaaaagaagaaggaatgtgccaattcttgctaacatttctatgcttattgaagaaagtttgttttatttcttggatgtaatctgacaactcattttgctcctgagcatggcagatgttttgcatcaccgcagactctttaacattgcaacttgaggaattcatcttttcctcaatttttgacccctttctttctggaatttgaaccactatttgcattccaaccttccaaggatggtgggatccggtgactcaacccattgccggaatttcaggaggccatcttcctcagggaatgcattcacaacctcaatagcattaacaatgccaaaaaaacatacaccttcagtataatcactcccaagaagctcgagcc

SEQ ID NO: 2405 - DNA, 1331 bp, Glycine max
  misc_feature (17)..(19): n is a, c, g, or t
ttttttttttttttttnnnttttagtaacaaaagaggggcttttctttgtcaataataataaataaaaatgaatcaagtgtaactgtttcaaaaacaaaattttgaaactctgcaagaggcctaattgttacttcacctagtgccattctaaatgccaaaaggcacctattcataatttataagaaatctttttattattattattattttctctatgctctagtggcatcatcatcatcatcgtcatattactcttctccagccttctgcttcaacatagctatgaatttctccctctcctctgaagacattccctgtgttgaacaatctccaactccccattctgccccacgtatgcagtatttgttctcaatttctttacggttcctgaagtgtaacaaatacaagtgttattgtatcttgctaacaatagatgcagaaaaatcatataaaaaaatagtcattattatcatcaagattttaaaattgtagccacagtcacggttttgctgcaatccttaacattgtaaaaaaatgcggacaaatgcaactcatatgccctcaaatgtagtcacaatgtggtcatatagaatcatagatagaaccagtcaaaattgcagtcgcggaccatttttttaaaaccttgattatcattaaccatctataatccatggcagtatcctatggttttgactatgcaaataaaaacataattaaaaaaaaaaatacttctctttattcaacttggatttctcaagcagttccttcatcaagggggatgatttaattctttcatcattctcaacatatttcttctggttttcttcattgagctgtttgagaaagtcaatctgaggtagctgaggaccaggaatagcctctattccagaaattcctgacatgaacccagcatgtgcaggggttgaccagagaagaattgaaagtgaagcagccaaaggaactgatttgtgaagagctttgcataaaggagaaggaaaagaccaagaaattgttgtgtgtgtgtctcttgcagttgtggggggtcccccattttgaaacttcttttgagggggtgatgagttttttcactgaagctggaagtgtgtagtagatgacatctgaatgaaagatggtagtgaagtggaacccatgattggcttctcccttcttctctgttcaacactcagactggtgccgaattggaaaaagccaggaagataagggaaagcgttaatttcaagcctgtttgtataatccaccaatgcaatcatctagccatctaaacaaacctggatctctaatcttttgagactctctcgccccgcattct

SEQ ID NO: 2406 - DNA, 966 bp, Glycine max
  misc_feature (20)..(20): n is a, c, g, or t
ctttttttttttttttttcnttttttttttttttttcttttgtggggttttttttgtcaataataataaataaaaatgaatcaagtgtaactgtttcaaaaacaaaattttgaaactctgcaagaggcctaattgttacttcacctagtgccattctaaatgccaaaaggcacctattcataatttataagaaatctttttattattattattattttctctatgctctagtggcatcatcatcatcatcgtcatattactcttctccagccttctgcttcaacatagctatgaatttctccctctcctctgaagacattccctgtgttgaacaatctccaactccccattctgccccacgtatgcagtatttgttctcaatttctttacggttcttctctttattcaacttggatttctcaagcagttccttcatcaagggggatgatttaattctttcatcattctcaacatatttcttctggttttcttcattgagctgtttgagaaagtcaatctgaggtagctgaggaccaggaatagcctctattccagaaattcctgacatgaacccagcatgtgcaggggttgaccagagaagaattgaaagtgaagcagccaaaggaactgatttgtgaagagctttgcataaaggagaaggaaaagaccaagaaattgttgtgtgtgtgtctcttgcagttgttgtgggtgtcccaatttgaaacttcttttgaggggtgatgagtttttcactgaagctggagtgtgtagtagatgacatctgaatgaaagatggtagtgaagtggaacccatgattggcttctcccttcttctctgttcaacactcagatggaaaaagccagggagataagggagagcgggggcggcacgcctgtttgtatcgctggcctaggcggccatctagccatataggccttcctggatctctaatcttctgagactct

SEQ ID NO: 2407 - DNA, 1193 bp, Glycine max
ttttttttttttttttgaaaggccgtagaaaataatatatttcaaacgtttcaatttaacgcaaaattgtctaaggaacagagttgcaatcaactatatttcaagctgtcttcacaacataaatatccatttccctcggcattaactcaaaattttgggttagggaacaaaaaaatatttgctactaaatactgactaggacaggatagccatgacatctgaggccctcaaggcaatgtagtcagaaccatctttgcccttgaagtcattccctgcatacttggagtacagaactgtattcccgggcacgacagacaatggctttctattaccttcctcatccagaggccccggaccaactgctatcactgttccaatagatggtttttccttggttgcctctgtgagcaacaaccctccagcagttttttcatccgcttctgcaacctttatcaagactctatcatttaagggtttaagatccttgacctcatctgtttcaaggataccaacgatgtcatcgtccttcagaataagatgttttgaaccattgaactccacctcagtccctgcatactttgaatacacaacctgcaaacctgtcttcacactaacatccactttgctcttcccaaccgacttcccatccccaacagcaaccacttcacctccttgaggcttgccttgagcagttgctggcagtaaaatcccacctgcagtcttctcctctgcatccttaattttcaccagtactctatcacccagaggcttaacagtggtgtgcttgggggcgacaacagtggcggctttgacaacgaaagagggaaacgaggtttgtgtcagtgtcccaattctgacgtgcccagcagaaggaaatcgaagcgttgaaggttgaaacctttcaaatgcaggcaagttcctcaatgatgaagtgatttgagaggttgccattggagctgcacaaaaaacttatcaaagtgtgccacctacgctaccttcaacaacagaaaatgtatcataattaatgctattagaatcgtgcattgcatttttttctgagtcactccgacaacagcacaaaattgagattttcgttcaggttatccaattgaattatcttaaatttcccgagaaacaatagttttgctttgctaacaaaaaaacaaagatgaatagagataagagttttcgat

SEQ ID NO: 2408 - DNA, 1051 bp, Glycine max
tttttttttttttttttttttttttttttttttttgaaactatacatatttcaagcgtttcaatttaatgcaaaattgtctaaggaacagagttgcaatcagctacaatttcaagctgtcgtcacaacataagtatccatttccctcgacattaactcaaattttggttacagaacaaaaaaatatttgttactaaatactgattctgactaggacaggatagccatgacatctgaggccctcaaggcaatgtagtcagaaccatctttgcccttgaagtcattccctgcatatctggagtacagaactgtattcccaggcatgacggacaatggctttctgttaccttcctcatccagaggccccggaccaactgctatcactgttccaatagatggtttctccttggttgcctctgtgagcaacaaacctccagcagttttttcctcagcttctgcaacctttatcaagactctatcgttcaagggtttaagatccttgacctcatcagtttcaaggataccaacaatgtcatcgtccttcagaataagatgttttgaaccattgaactctacctcagtccctgcatactttgaatgcacaacttgtgcacctgtcttcacactaacatccactttgcacttcccaaccgacttcccttctccaacagcaaccacttcacccccttgaggcttgccttgagcatttgctggcagtaaaatcccacctgcagtcttctcctctgcatccttaattttcaccagtactctatcacccagaggcttaacagtggtgtgcttgggggcaacaacagtggcggctttgacaacgaaagagggaaacgagggttgcgtgagtgttccaattctgacgtgcccagcagaagaaaatcgaagcgctgaaggttgaaacctttcaaatgcaggcaagttcctcaatgatgcagtgatttgagaggttgccattggagccgcccaaaaaaccaaaactgaaaattaaccttatcagaagtgtgtcacgaaggtaggatagtgggagtaacaatgaaaag

SEQ ID NO: 2409 - DNA, 1642 bp, Glycine max
ctatgaccgccgctcagctacgtaggccccccccccccggaagccaattgccaaacaaaaactcagaaaacacagggaaagaaagagttgagtgatggcggcttgtctgcaactgtggcaatgcaaactagcgagaccctttgactcattaccggtgcgaaggtcaattcctttgagtctgaggtgttcggccgcgccctcttcttccaagccgacgcgctcctacagcatcactctcatccccggcgacggcatcggccccgaaatcatctcggtggccaaagacgttcttgtcctcgccggttatctcgaagggattaaatacgacttccgcgagatgcttatgggtggagctgcattggatgccacgggactccctttaccccatgaaaccctttctgccgctaagcaatctcatgccgttctccttggtgccgtcggaggttataaatgggataggaacgacaaacatctcaagcctgagactggcttgcttcagatacgtaaagagcttggagtatttgcaaatcttagaccggctaccgtatactctccgttagttgatgcttctactttgaagagagaggttgctgaaggggttgatatcatgcttataagagaactcactggaggtatctattttggagaacccaggggctttggcaccaatgataatggtgaagagattggctttaatactgagatttatgctacacatgagatagatcgcatagctcattttgcatttaaggttgctcaaaagcgtcgtcggaaactttgctctgttgacaaagccaatgtactagaggcatcaatgttatggaggaagagatttttggcaatagcacaagaatatcctgatgttgagctctcacacatgtatgttgataatgcctcaatgcaactaatccgcgatccaaaacagtttgacaccatggtgacaaacaacatttttggcgatatattatcagatgaggcttcaatggtcactggaagtattgggatgcttccttctgctagcctgggggcttcgggacctggactttttgaacccatacatggttctgcacctgatattgctggacaggacaaggcaaatccatttgccactgttcttagtgctgctatgcttttgagatatggcctaggagaagaaaaggcagctgaaagaatagagaatgcagtgatggacactttgaacaggggatttcgaactggtgacatatattctgctggaacgaagctggtaggatgcaaacagctaggtgaggagatactgaagtcagttgaatctaacgttcctgctggtgctgctgcagtgtgattttgaaaccaactcgccatagcattttgggttctggtttaggttggaggccactatgactgccaaagccgagaaagtctccctagtctattaagttctggcttccttctgtatcatgtatttcggttaacacacccagcctatgtatgattgaattttagaaagtagcaaggttgtttatcttgtattcttgtacccgggattctagtttcccttgcatgcgaggtcgcttgtaatggtggaataatgattaatggagtttgtcttgttaaaaataaaaaaaaaagatttatcaggttcaaaaaaaaaaaaaaaaaa

SEQ ID NO: 2410 - DNA, 1581 bp, Glycine max
cgctcgccctttccggtctctagctgtaacgccgattatttatttattttaattattatcatctcatctcacccaattcaattcacgtaccttggaatcgattcttagggtttctgactcctttatgtgtttgtctcgcaattgatcatcgcaaccacaatgtccggtcccctcgatcgttttgccagaccttgctttgaggggttttcgggcagtgacgagaagaaggagaggagatctgacttcgagaactccgaggatgaaaggaggaccagaattggatctctcaaaaagaaggcacttaatgcatcctccaaattcaaacacactcttagaaagaagagtagcaggaggaaaagcgatggccgtgttagctccgtttcaattgaggacgttcgcgatttcgaggagctccaggctgtcgacgcctttcgccaatccttgatcatggacgaattgctccccgaagcctttgatgattaccatatgatgttaagatttttgaaagcgaggaagtttgatattgaaaaggcaaagcatatgtggactgacatgctacaatggaggaaggagtttggtgctgatactattgtgcaggattttgagttcaaggagttagatgaagtcgtgaagtattatccacatggccatcatggcgtcgacaaggagggaaggcctgtttatattgaaagacttggaaaggtcgatcctaacaaacttatgcaagttacaactttggatagatatgtgaagtaccatgtgcaggagtttgagaaagcttttgcaatcaagtttcctgcttgctctattgctgccaagaggcacattgattccagcaccacaatcttagatgttcacggagtgggccttaagaactttacaaagtctgcccgggaacttattacccgattgcagaagattgatggtgataattaccctgagactctttgccaaatgtttattataaatgctgggcctggatttaggctgttgtggaacactgtcaagtcttttctcgatcccaaaacaacttctaagattcatgttcttggaaacaagtatcaaagcaaattgcttgaagttatagatgccagtgagttgccagaatttctgggaggtacctgcacttgtgaagatcagggaggttgccttagatctgataaaggcccctggaaaaaccctgattattcaagatggttctcactggtggagcatggcggtcaaaacaagttgtaaaagttcttaacaatgaaagaaaggttattgtgtatgccaagccaggatacccgatggtaaaaggcagtgatacatccactgctgaatcagggtcagaagccgaagatatatcctctccaaaagcgatgaagagttattcacaccttacgttgacccctgttcatgaggaagtgagttttaacttattagagaagttgctatgattctcttattgtgtgcacactctcctgcctagttaaattaggagtgtttgtggatttgattggatcggttttgagaggaaaagtaattgacccaatcccatcaatgttcttattttaccatcccaaaaaaaaaaaaaaaaaa

SEQ ID NO: 2411 - DNA, 1448 bp, Glycine max
ctttctcgtccgcattcctcaggttcttggaaacaagtatcaaagcaaattgcttgaagttatagatgccaggtacttaatggctccattttttatatgtttatattaatctctgcatgttacaatttttgtatttttgtttttcttttccattgactaatgctttgtaattttttgcactgctatcagctacgtgggccccccccccccctatataattgtgcacatgatgaagtgagttgccagaatttctgggaggtacctgcacttgtgaagatcagggaggttgccttagatctgataaaggcccctggaaaaaccctgatatattcaagatggttctcactggtggagcatggcggtcaaaacaagttgtaaaagttcttaacaatgaaagaaaggttattgtgtatgccaagccaggatacccgatggtaaaaggcagtgatacatccactgctgaatcagggtcagaagccgaagatatatcctctccaaaagcgatgaagagttattcacaccttacgttgacccctgttcatgaggaagctaagatagtaggaaaaacaagctatgccagcaacttgtctgggtatgatgaatatgttccaatggtagacatacctgttgatgctggttggaagaagcaagcatctctacagaggtcttacacctctaaaggagcacctcctcctgacactcagaaaactcctgaagggattcaagctcggatgtgggtagcactgtctatcttcttcttgactgtattaactctcttacgccaagttgcataccctgtgaccaagaaatttccagcattatcttccaatgatgataagagtacttcaaaaccacctcctgatacaacaaacatggaagttcttcctccttcatcaactccatcatgtacagaggaaaatctccttccctccatgctgaaaaggttaggtgagcttgaagagaaggttgacacactccaatctaagccatctgagatgccttatgagaaagaggaattgttgaatgctgctgtatgccgggtggatgctttggaagctgagttaattgctactaaaaaggctctatatgatgcattaatgaggcaagaagagctgcttgcttacattgacagacaagaagaagccaagttgcggaaaaagaagttttgctggtgagatttatgaatgggaaagagattctgcagaggatgtctcaaagtgcaggttgttcttaaggaatgttaaccttgcgcatgatgtaactctgaccactgattttcagtatacgagtaaacataatggagaattgtttcaacgtgtgtatattcagaatgctatctttgctggcttgtaaaacacgagcctttttgcttttgttatggtcataccttcatctatccttgttacaatttgtttgcctttgttagtcgaaaagctttttcccctcct

SEQ ID NO: 2412 - DNA, 1444 bp, Glycine max
gaactttacaaagtctgcccgggacctcattatgcggctacgtaggccccccccccctaattaccctgagactctctgccaaatgtttatcataaatgctggaccgggatttaggttgctatggaacactgtcaagtctttccttgatcccaaaacaacttcaaagattcatgttctcggaaacaagtaccaaagcaaattgcttgaaataattgatgccagtgagttgccagaatttctgggaggtacctgtacctgtgcagatcagggtggttgcctcagatctgataaaggaccctggaaaaaccctgaaatattgaagatgattctcagtggtgaagcacggcgagcaaggccagtagtaaaagttctaaatagtgaaggaaaggttattgcctatgccagaccacaatatccaatggtaaaaggcagtgacacatccacagctgaatcagggtcggaagctgaagatatagcttctccaaaagcgatgaagagctactcacacctgaggttgacacctgttcgggaggaagctaaggtagttggaaagtcgagctatgctggtggtggtaacttagctgggtatgatgaatatgtaccaatggtggacaaagctgttgatgctgcctggaagaaccaaacatcactccagaggtctcaaacttcaaaaggaacacctcccctccctgacactacaaacacccctgaagggattcaagctcggattgtggtagctctaactgtcttctttatgacgctgtttactctcttccgttcagtcgcatgccatgtgaccaagaaacttcctgccgtatcatctaatgatgatcagggcacttcagagccaactcttgatgcaacaaaaacaaactatgaagactatcgtcctccttcaccaactccagcatatgtagaggcaaatctcctttcctcaatgatgaaaaggttaggtgagcttgaagtgaaggttgacacactccaatctaagccatcggagatgccttatgagaaagaggaattgctaaatgctgctgtatgtcgggtggatgctttggaagcagagctaattgcaactaaaaaggctctttatgaagcactaatgaggcaagaagagctgcttgcttacattgatagtcaagaaaaagctaggttacggaagaagttttgctggtgagttttggttgctgatagaaagggactctgggagagggtgttttcgaatcatggtgtttctagtgctgaccttgcacatgatgttaaactctgaatactgattcagtttaatgagtaaacttgagaattgtttcaaacttgtgtatagctaatggtggcttctttgccggattaaacacaagccttgtttttgctaacctttgttgttgtatttggtgtggttgtctttgttggttggaaaagcggttgttcttctgatctcaaaaaa

SEQ ID NO: 2413 - DNA, 1559 bp, Glycine max
  misc_feature (1544)..(1544): n is a, c, g, or t
ctctgccaaatgtttatcataaatgctggccctggatttaggttgctatggaacactgtcaagtctttccttgatcccaagacaacttcaaagattcatgtatgtagaaatgctatattgtagctgcctaaggctcttttcatgatggcttatggctgctgacattgcttggtgcctctatggaaatattacttaggttctcggaaacaagtaccaaagcaaattgtttgaaataattgatgccagtgagttgccagaatttctgggaggtacctgtacctgtgcagatcagggtggttgcctcagatctgataaaggaccctggaaaaaccctgaaattttgaagatgattctcagtggtgaagcacggcgagcaaggccagtagtaaaagttctaaacagtgaagggaaggttattgcctatgccagaccacaatatccaatggtaaaaggcagtgacacatccacagctgaatcagggtcagaagctgaagatatagcttctccaaaagtgacgaagagctactcacacctgaggttgacacctgttcgggaggaagctaaggtagttggaaagtcgagctctgctggtggtggtaacttagctgggtatgatgaatatgtaccaatggtggacaaagctgttgatgctgcctggaagaaccaagcatcactccagaggtctcaaacttcaaaaggaaaacctcccctccctgacactcctaacccccctgaagggattcgagctcggattgtggtagctctaactgtcttctttatgacgctgtttactctcttccattcattcgcatgccgtgtgaccaagaaacttcctgccgtatcatctaatgatgatcagggcacttcagagcctactcttgatataacaaaaataaacaatgatgactatcgtcctccttcaccaactccagcatatgcagaggcaaatctcctttcctcaatgatgaaaaggttaggtgagcttgaagtgaaggttgacacactccaatctaagccatctgagatgccttatgagaaagaagaattgctaaatgctgctgtatgtcgggtggatgctttggaagcagagttaattgcaactaaaaaggctctttatgaagcactaatgaggcaagaagagctgcttgcttacattgatagtcaagaagaagctaggttacggaagaagttttgctggtgagttttggttgctgacagaaagagactctgggagagggtgttttcaaatcatggagtttctagtgctgaccttgctcatgatgttaaactctgaatactgatacagtttaatgagtaaactcgacaaatgtttcaaacttgtgtatagctaatggtggtctctttgccggattaaacacaagccttgtttttgctagcattacctttgttgttgtatttggtgtgcttgtctttgttggttggaaaagcggttgttcttccgatctcataacttgcatcgaatattaatctattttgggggctagcgaggggaacaaaggtaaaaaattaatctccaactatanatttttcttgcaaaa

SEQ ID NO: 2414 - DNA, 816 bp, Glycine max
aggcataactcatacgttttcatttttgcaggataaaaatacattaattatcaccaacagaaaattaaggattgttgtgtcatgcacaatacacgtaagttacattctttaacagcttagcataaagctaatacttagtcttgtacaaaatgtctaacgcaatatagcctaagcacgatcaacttagagaaaagatatataacattaatcatcacagtcacgttaatgctactgagcagcatcttcagaaaacctggcatcaaactgagctgaggggtgggtaagagctgaattagcagaaccagctccagagccatgctgcaattcaatcacaagccatcgaactgctttactcatctgttccaaccgaactgcactgatgggaggaagaccagtcatggtagcttgtccaggttttcctgctacaggccttgttgcctcatccaccagacactcggatcctatcctttgcttcacagactccacaaactcctcggcttgatcacatgctactctaaacaattcccacttctgcttaaagttttctagagcagtatcggttgctgttgttttaatggaaccagcattttctttggcttccaacacatttgctgctgcaacaacaaaatcttgataggcattattcagagaatcaactatgctgtccatggtgccgttttcacttacgtgaagtgtggggtgagagtgagggtctttgattgggttttgctgcttctacttccttcgttcttagctcgcgccaacggaaccctaattaaccaaatctgaagtgaaagaaaccccctttctaatttt

SEQ ID NO: 2415 - DNA, 917 bp, Glycine max
taaacactaaaaacacatcactcggggtattcattaagaaatcagaattgccaacacatttgtgctacaccggatataatattattcttagcaaactaaactggggaatatagtaatcggtacatgcagatacattcattatatagaaaacacgtacaatatgttcaaaataaaatcctggctttgacggatggtggagatggatcgtgcttgagttcaacctccctcagccgaagttcaaggcccttaccccctccatttgccaatggatgaattccatgaactggccctgtcatatattctctcgcttttctttcttcctcatagtctatccccatgcgctctgcagaactttggaggaggtgatcatagatctggccatctctagtgagagccatcatgagctgaggtatcccaaatggaagagagtgacccttatcgacctgccagaaatgaaagactttgccataagtggtgcagacagtctccatgtctgggcgctgaatgagagcaggaaccttaggcatgaagaagaggccactcttgacctcgtacaagtgagagtgccacagacgcttctcctggtcggggagtgtcaagtaaaggttttcggagatgatgtattccagccctatgagcctggctttcttctcggggctgtcgtagataaggcactgcctcatctcctcgttctggtgcgcgcaaaaatggtgtgcctccacttgccggctcatgtcatatgagtaaaagtgaaacgcgcagagatgttggtggattttgttgatgggagcgaagttttggatagcagatgtagcagtgtcacggagataggtgccggttgttggttctccatttttgtgggtctccatttttgtgctgggttgaagatagatgtttcagttagttatatagaatat

SEQ ID NO: 2416 - DNA, 1871 bp, Glycine max
tcgagccgcctccgtggccccccccccccggaagaaaaaaaaataccccgagaaattttcataaggaaaaaggaagcagaagtgaagatcgaaacggtgaagaagcctaacagcagcaaagagcgttagagctgatcgcttgagataaggtcaatttgcagttgcacgcttcccaattcgcacacccatatcacatcacatctttctccacacgcaacgcaacctttttataatcaatcatcctcactcgcatttgaagacgcagcaatctttcccgtgaaaagggaccatggaggcaaattcaggtgccagcgaccgaatttcgagaatcgccggccacctccgcccccagagagaggatgatgtttgtttgaagcgtagcgattgccgtgcaaaaggtggggtctccggattcaaggtggccatattgggtgccgcaggaggcatagggcaacctctggcgatgttgatgaagatgaatccactcgtttcacttctccacctctacgatgttgttaacacccctggcgtcacttctgatataagtcacatggacaccggcgctgttgttcgaggatttttggggcagcagcagcttgaggatgcacttataggcatggacttggtgatcatccctgctggtgttcctcgtaaacctggaatgacaagagatgatctcttcaatataaatgctggaattgttaaaacattgtgtgaagcaattgcaaagtgctgtcctaaagccattgtcaatgtgataagcaatccagttaactccacagtcccgattgcagccgaagttttcaaaagagctggtacttacgatcccaagagacttttgggagtcactatgcttgatgttgttagagccaatacgtttgtggcagaagttctgggtgttgatccaagggatgtggatgtcccagttgttgggggacatgctggaatcacaattttacctcttctttctcagattaaacctccttgctctttcaccccaaaagaaattgagtacctgactggtcgcatacaaaacggtggaactgaagttgttgaggccaaagctggagctggttctgcaacactatcaatggcatatgctgctgttaaatttgcagatgcatgccttcatgccctgagaggagatgctggcatcattgaatgtgcatatgttgcttcacaggtgactgaactcccattctttgcatcaaaagtacgacttggccgagttggggtggaggaaattcttcctcttggtcccctgaatgattatgagagggagagtttggaaaaggccaagaaagagttagcagcaagcattgagaagggcatttctttcatcagaaaatgagtagttgatgatagtacgtcccgaaaataaatggttagattgtgctgtgtccattgtgagatcatatagatttataattagttatgtgatatgtatgaatatcgagttctatctagaaacatgtaaatgtaataattggaataccgaattccatttattattccgtctcgagttatccccgtgaagtttgagtttgagtctaaaaatcaattcagatttttgtattatctatagacgaatataaacctgcccaattgagcatgatatttaagttcagtaataaaaatgttaattatcacttcattttcacctaaaaaaaaaaaaaaaaaagaaaaaaaaaaaaaaaaaaaaaaaataaaaacaaaaaagcaaaaaaaaaaataaaaaaaaagtttacacaaaacaaaataaaaataaaaaataaaaaaaaaaaaattggggggggccttttaaaggaccccagttttctttccctgtctttacaaaaaataattttttttttggggaccccaaatttaaa

SEQ ID NO: 2417 - DNA, 2067 bp, Glycine max
tcagctgcgcagcccccccccccgaacgcaaagaaaagaagcactcttgtgttttgtctctctacctctctcactactctatagtattctctcaatttctgttcacattctaccaaaatgagtggcttgagtttcaggggcttcacatacatgctcctcattgcatttctcatttggtccttcaattttgaagcctgcattgcaagaagaggcaagcactggagacaaagcagggatgtctcagcttctgtgtacaagaaaaaaggcaaaaattatggcaatgctcacaacaagtaccatggtggaggatcaaaatcaaagcctccatcatcacacaaaggcacaccaacattaccaaaggctccgccacaacataaaaacactccctcaccaccatatccaacaccaccaagtgatgatacccccacaactccaccaccaaaggcttacaatggtggtggccattcttccgccaccaccttcaatgtgctagattttggagccaagggagatggaaaatctgatgacaccaaggcatttcaagaggcttgggctgaagcttgtaaaattgaatcatcaaccatgctcgtcccagcagactacgcattctttgtagggcccatttcattctcgggcccatactgtaaacccagcatcgtgttccagcttgatggcaccattgttgcaccaacaagccccaaagcttggggcaaaggacttctacagtggttggaattttccaagttggtaggaattaccatccaaggaaatggcatcattgatggaagaggctcagtgtggtggcaagataatcaatatgatgatcctatagatgatgaagaaaagctcattgtccctttgaaccacacaatagggagcccgagccctccactgccgattcaaagtgagatgggaggaaaaatgccatccgtcaagccaactgcattgcggttctatgggagttttaatccaacagttacaggcataacaattcaaaatagtccacaatgccatctcaagtttgacagctgtaatggggtcatggtccataatgtgaccatatcatctcctggggacagtcctaacacagatggaattcaccttcagaactccaaagatgtgttaatatacggcagcaccatggcctgcggagatgactgtatttcgatacaaactggatgctcgaacgtatacgtacacaatgtcaactgtggaccagggcatggaatcagcattggaagtctaggaaaggataacaccagagcctgtgtctccaacattactgtcagggatgtcaacatgcacaacacaatgaatggtgtcagaatcaaaacatggcagggtggatcaggttctgtacaaggagtgctattctcaaacatacaagtttctgaagttgaactcccaattgtgattgatcaattctactgcgacaaaagaacctgcaaaaaccaaacgtcagctgtgtctcttgccggaatcaactatgaaaggataagggggacatacaccgttaagccagttcactttgcctgcagtgataacctaccttgtgtagatgtttctctaacctctgttgagttaaaaccaattcaagaacaataccatctatacaatcctttctgctggcagacttatggtgaattgaaaactccaactgtcccaccaattgattgcctacaaattgggaagccaactaacaatcggattcagacagatcatgatttatgttgatcagatatgaattcaagtgcttagcctgctagataaatatgtatattgtaaaaatcctactatataggaaattttcttcattagggtgatactgatttatcattgtgagaatataccggccctgctattagcaagaggtcgagaatagtataataggcagtcttctagctgtggcatattgcaagagtgtgagatattatacaagttttagcatctatgaataaaatatctttatttatacaatgtcagaaaaaaaaaaaaaaaaaaaaaaaaaaaaaaaaaaaaaaaaaaaaaaaaaaaaaaaaaaaaaaaaaaaaaaaaaaaaaaaaaaaa

SEQ ID NO: 2418 - DNA, 1841 bp, Glycine max
ttttgacattaaaaacttgtaaataatttatgtatataattttcttaaaaaattatcactacatatttttatgttaaaatactcaattattatatttttgagccaaacaagttgctaggtacatattttattttcttctaataaaccaagctcaaactgtataagtaaatcctgagagccataattctttttgcaggccaaacttgagcttttggctttcaagttgattcaactcatttgcatctctagactgctctcaacagttcatctcaggatcctttttctccagaacctttgcttttcctaacacaggatgataatgtcaaaatgcctgtttggattaacgtttgcaagggtaagttgagttaaacttaagtttgcaaactgagtttgcaaaagtaacacaaagtcttttgcaaaactaggtatcaagacaattttcattacaaacacacttttgggtaaccaaacactaccaaaatgagttcactctcccaaaagtacttgtagcatccaaaaatacttcttcaactgataaccaaacatagtcaaagtttgcatttttttttgtcagaaattggtaaaatgtattatatagtatcatgttttttactaacaaaaattacaggagtcattattaaatttcttgagacctcgaaacccgttcaaacattgaatcactaattatagcactacagagggaaaagaaaatttgtgtaacaattctacaaaacctgactactgagtggatggttgactatttccacctacctagaatttgcagatgcaaaatgaagagcttatcaacaatatcaccatgctcactacataccatccaactatcaaaactcactgagacaaaaagacagcaataaccatcaacacccaaaggggtaggtacatcctttttaagcagtaactgcaactttttccttttctttcttagcaggttttggaggcttttcaggcaatacattttgaggtttctcaattccttgaatatcagttatccttaacttagtcaattcctgacgatgtcctttggttcttcggtaattcttccttctctttttcttaaaaataattacctttgcatctagtgcatgctcctcaacaacagcgtgaacagctgcatctggtactatgggtctgccaacaattgtctgactagcagagccaagcaatagtactttgttcaaaatcaacttgtcattcacttcgcaaaacttcaatctttcagtgaaaatgctgtctctgttgcttactttaaactggtgcgaaccaatctgaacaacagcgaaaacaggctcgtaaggcttaaaaacgctatcttcctccttttgaagaggacccaccactctgtacccaatagccgccgcttccgcttccttctcctccgccgtgtatacttttttccctcttgacacagtgacgtcatcatcgtcaacataatcctcttcttcatcgtaatcctcgtcactatcatcttcttcgtcgctgtggtcgtcttttttgtcggaagagaaacaacggaggtgcgggcattgcgcaaaaacagaggcgcgtgcggtgaaagcgtgtggagaagcgttggagttgggaaatggaagcacggcgagtgagcgaagagaggatgcttttcggaagagaaacggtctcgtttgagttaacgctcgcaggcacctcctactcgccatggttgctgctgctactgttgcagtgtctaaaaactagggtttgatctcacacaacacgacgcaggggaaccaccggtacccgcgctcgctacatgctcctcctccacaacacatgggcctggggggcctacgtagctgactcga

SEQ ID NO: 2419 - DNA, 2494 bp, Glycine max
  misc_feature (1704)..(1704): n is a, c, g, or t
gagagagaactagtctcgagttttttttttttttttttgtgacgtccaaccttgtcctggtcgcctgaggtatattattgaaatttcaatatcttgcaatgcaacatttctgttattcaggtaaaacaaaagacaaaattatacagagcctgatatcacttcagtcaaaactccaaagccattggagttgcatagaaatcacagaatctactaatttccgctgctatgaaacaaaaacgttaattattttcctcgtaggtcaacaattcccgttggcataatctgccaaagataatctctgcaaccttttgtattgaatcaacatgattttgtaaatattcaaaatttgagaatcatgtaaggctaagggaattggcataggattgaagaagcagcacagcttgctcagaaatagccctgtttcttgcttgtctcacccaacctgcaacaatttctgcagcttgtgtgcctctcacactttcttctagacaatctgctgcttcagcaagttttccttctgccaaataaacttcaactttattgatcacagattcgatcccatcacctgattgatcgtcttccctaaccttcaaccaggatgctagatgtgccaaagaatgtgccaacatacctccccctcctggtgggaagaagctgaagtgtcttacactaccttttaaggcatcaaacttctgctttaactgcagttgtgtgtctgtgccgttgcttcgtgtttcttcgggaagggatgctagcaccaaatccaaaattgaatctttatctgtgcttccaagataagactgcaaagatgctatttctgtctcaattggaagtcctttagatagtgcatcttccaatgcaagtgctctcaaagcaaaattttgtgtagcatgactttgacgagcttcttcagatcgagcataaaatgccatgcataaggcatttatattaacatttgcttcagccattttttcaatttgagctgccttctcatttgctatggctgcatttaactctgcctttgctaattcctgagtttgtttaaacttcaaatcagtttcaatctccttttgttctagttctgtcttcagtttctcttccatcttttcttgaagtgacttgatcgcacgcgtggcttttgctctctctctttttagctccctgtccaacattgcagcctcctcagcgagcataagttctctggcagctcttttttttttttttttttcatacttttcctttaacactttcttctcttcactaaaaacgcgtgcatctaagtcagcctgccttttctctgcggcatggatggcttgcaagaaatcaagaaccagtttcccattctcagaaatgtaaccatcttttaactcctccattgcaccactaagtgcctcttttccttcaggaaaatggctattctcagtaaagccatgactagatatataagttgcagggcttttttcagatttattccttaactgatactcctcaaggagggtaggtagttgctctatatctttgcctaatgcactctctcttctctctgtttcttgtatttccagttgctcaggttgaatatttttcatcccattttcatctggaactgcactggtctgtgtagatgtggatgtatgatgtccctcttccagtcttggggcattgtctgtctcagtgctttgtattccaataatcccatcagattgngccacagattctttacttggatcatcaaatgttagactactttgaggatgttcaggcaattggttttctttggcagcagcagtaacctcttcagcgatatcagatttgtcttgcacaggaatcggtttatccacttggtcttctactacaatttctggctgtgaaaaatgggcatcaatcttctgctctgtaatctctacagtgggattttcgtggttaaatttctcactaggtgaaattagttggtccgttgaatgttgtacactcttcaagtcttcaatagttgcattgacatgaggttcctgcggaacactataatgctccttcttaagatattgatccaaataaccagtctgataagctgccagaaaagcagcacctaaagctacacttccaatgaaaaactttgatagagtgccattagactcaggtggcttgcccggagacccagaagctgaggaaacccctggttttgatgcagttgagaaattcttttgtaaagatagatgtaaaggtatctggtatacaaaacgtctgggattccttctaagagttgggcgagatgatattagcaaaatggacctgcggaacatggcagtgggaagagggtgtgttgagattgagagtgaggatccagtgggagtgcggagggaaagatgtatttcccaaacccctgatactgatacaacaactacggttacgaccttaatttcgctacacaattcagttcacacaacatttttgccctgctcgttatcggggggggggggcgtcttttgtactgactcga

SEQ ID NO: 2420 - DNA, 2129 bp, Glycine max
tgaaaagccctccctcccatcaagcaggtttcttgtcttccggtttctggtagatcaccacttgggttgggagaaaagaacagacaatggaagcgagttgagagctacctcggttgaacatcatcgaatcgaataatcacttttacacatgacttatccttctattccgatttaagcccctaaacgaactatcgaagccacttcaaaaactactcttagattgcttcgatggtcgatcactacaacaagctggttaaactagcggcgagggctttctacgatgatctaacgagtaaaggagagaatcaacccaaatcgggaaggagtgataacagaggaatcgctgtggtgattctcgacgctctcacaaggcgacaatgggtccgagaagaagacttggcaaaagatctcaaattacacacaaaacagcttcgccgaactctccggttttttgaagaggagaagatcattactcgagaatataggagagagacagcaaaaggagcaaaaatgtatagtgctgctacagctgctacagttgatgttcagctgactggaaaagagggagaagaaaaggtcaagttgcacacgcactcttactgttgtctagattatgcacagatatatgatgtggttaggtacagaatacatcgcatgaaaaagctgctgaaagatgaattggacaacaagaacacaattgaggaatatatctgtacaaaatgtggaaaaagatataatgctctggatgcattgcgattagtatcttttgaagatgatgacttccattgtgaaagttgtaatggaaaacttgaggtagaaaatgacaaatttgttgctcaagaagggggtgatggagatgaaaatgcaagaagacggcgccatgaaaagttaaaagacatgcttcagaagatggaggcacagctgaagcctttgatggaccaactcagccgggtgaaagatttgcctgttccagaatttggcagtcttctagcgtgggaagctcgagctagtgctatggggcgtgcagccaacggagatatgtctggtgattctaaaatgtctcagcttggatataatggagcaccaatgccttatagtggagatactaaggttgtggtggacttcaatgggactgaagacataaaggatgttaagtctgaaactggaagtgcatctctaaaggttttgccaccatggatgattaaatcagggatggttcttacaaaggaacaacgtggagaggcgaaggaggaaataaagatggatgggacttcaacttcctcatcagcacagtacttggacgacaagaaatcaacagttgaccatgatgataagaaaaatatacaggatgagtatattaaagcttattatgctgctttgcttaaacaacaacatgaattggaagctgctagtaaacaagaattgccaaatacactcactgcaaatgatccttctagcagtgcttctaatcgtcaagttggcatgaaatcaaaacttgaggaagatgatgatggtactgaatgggaggaggctccagttgcaggtattggaaatgaaaattacaaggtcgatttgaatgttgaagctgatgatactccagctgatgacgatgaagaagtggactgggaggaaggttgatgaaaagaacagtaaggttcacaaaatataatttttgatggcatatacttatattcaacaaatggcagcagttatatgactgatgtctcctcacaataatgctactattcagttatatttccggcggcctcaacggtgggaaactcgattacaatatatattttttctaccagaagtttaatttggtgtttctgggggaagtaaaatctaatgctttgttgtactactgaatgcgtgctacaatggctttctttgtaaggcatcacttatccaattgaattagtttaccaatgcaataatcgttgccatacacatttaaataatgcatggtaagattttttattttttttttcaaaactggagaagttgtcttatttcattcctggtagccaaaactgtatttagcatgcctgatttgccgcgttagtccggatctcatggtgtataatttaaaaaataaacaccaaatgtgtgaattatttggcgtgagt

SEQ ID NO: 2421 - DNA, 1128 bp, Glycine max
ggagcccaaacggtgaataaagcctaaattaaggcggcacgacggcgcgagaggactatggaatgaagtaactaacccaaacctagtccccttacttggctcgctggttggatttgattcgactcgattctcgctgatgaagaagcatttgatgcacagctatggcgttgccgtgattgtggtgttggctttgagtttgagtttgggtgcatcagcggaacaactcagttcacgagaatgcgagaatctcggtttcaccggactcgccttgtgctccgactgcaacactctctccgagtacgtcaaggacaaagagttggtatcggattgtttcaagtgttgcaccgaagactccaatgatgccactaccaagattacgtactctggagctttgctggaagtctgcatgaggaaacttgttttctatcctgaagttgttggctttattgaagatgaaaaagatcaatttccatcagtaaaggttcaatatgtttttaactctccaccaaagctaattatgctggatgaggtgggtcagcaaaaggaaacaatcagaattgataattggaaacgtgagcatatactacagttcctgagagagaaggtgaagcctctagcgtctgattgagaatctttaacccattctctggcatgctctggactcgttcccatttaacagaaaagagtgggagtatatagtgtggcttagacaagtgaattaaacttgccctgggttacaagtgaccttaataacataaaatcatcataatttggtcagtttagataattctgggttttgacaattgatttcaatacgacgttttcctttttccagattttatggcagttgtaagatgatgtataaactgcagtattggagttggagacaagcatgtttcagtgtttatcagtgataatgcaggaatagataatgtaatttgtttttaaaaaaaaaaaaaaaaaaaaaaaacgcgagactactcaattaattactgtttccgagagcgtcaatttcatattttgttaaattggtgaacacctgaccaaccatattgtccacttttgaacaaattgtagatttctagttatagcatttgcatgtggattgggaaatagccttctgaagtg

SEQ ID NO: 2422 - DNA, 1274 bp, Glycine max
caggtcattgacaactaccttatggaatcatcgataggtcaagcacattaagagtaaaccatgtagttcgattacacaagattagacaagaaattttttcttagaaaccattcagctactgctattagaggagccaagtgactcacttaaaaaatataaaaaggacaataaaaaaaaaaagacaaccaatgaccattgtccatacctttaactgtaaacacaaagtggaataaaacatgtgtacgagctttaataatcatattattatagcatcattcacagtgaaagagatatcaaaatatgcatttcaaccttccttctgagttcaatcgtccatctaattcgttgaagctgagacctttagccacctccagatttgagtgtattgctcaaccagtccaggccctcaaaaagtccttctccttttatggcagaagttttgaaaatagcccattggcgatttttgatcttgtgtaactctagagcctcggtcactgcagcatcatcaagtgcaccaggaaggtcctgcttgtttgcgaaaatgagaacaactgcaccttttagttcttcctcctccaaaattgcatggaactcctccttagctatcacaagcctatcaacgtcacttgaatcaacaacatagattattgcttgagtatttggaaagtaacacctccaatatggcctgatacttgtttgcccacctaaatcccagacttgaaatttaatgttgttatactgcactgtttcgacattaaacccaattgttggaatggtggagacaacttcgcccatctgaagccgatagagaatagtggttttgccggcattgtcgaggccgagaacgaggattcgagcttccttgttaccgaaaagagaggaaaacaatttggtaaacactaatcccatcttccgattcggcacagggacgctcgcagtgcaattgcaattagcgcataaatcagtcacacgagtttcctttctgaatgaaaatgcgatcggatctcagagtagagcagagcagagcagagtggttgaagcaaacgaagagaagtgaatgtgaacgtgaatctaatctgcgtccataatggaatggaaggaattcgaaaagcgtagaagagagcaagatcgattggcgagcttttctgagagaagaagcgaatggaaaacagaaaaaaaaaataaaaaaatgaacgacgacgaaaatgaagatagatatccctcgcccacgccctccaccttttggttttgggatctcgctccctatatgttat

SEQ ID NO: 2423 - DNA, 1422 bp, Glycine max
atactaattgaaatatttcaatggggtgggttttttttttttttttcataaaattgaaatatctcttattcattttaatgaacccaagccaagttttgcaagagcacaaaaagagtcgtgctatacattgataccaaacacataaaaagtggttcatcaaagcacacaattctaattagaactgtgaaaaagcatatggaactttggtggaaaacttaagcaacatgacatgcttgtaaggcttatctggggtcacaatagttgatggaaaattagggtgattcacggagtcaggaaatgcttgactctccaaacaaagtgctgaacgtggctgataaacaaaccctccttttcccttgtcattcttgacaaaattagcagtgtaaaactgcaaaccaggagcatttgtgaagagcttcatcactctccctgacttcttatccaccgctatagctgccagcttaatctctgcattgcctttttcaccatcaagcacatagttgatgttatagccatttgtcttaggcaattggttgatcctttctccaacaatgtgtggctcaaggaaatcatttggggttcctctaactgaggcatattggcctgtgggaatgagattgtcatcaaatagtgtgacttgggatccaaagatctgaaccacttcatctagaatgttgccactgttgtggtttcctaggttccagtaagcatggttcaccatgttcactggggtaggcttgttcagagcttttgctttcatgattatgcttaatgagtttttcccaagaatgtagctcacagttactaggaggtccccaggaaatcctccttcaccatcataactgtgataactgaaggtgattctgggtttgtcatcatcttttatgtaccttgtcactttccaaagaacatcactgaatgctttgggtccagaatgaagtgtgttgtttccttcattagcaactaatttgtaatggattccatttagagtgaactgagctcctccaattctgttagcaacccggcccacagtagctccaaagtatgatgtatcatttgtgtatgccttgggagaatcatatccaagaacaatatcacccaacttcccattcttatcgggaagtattacggacacaagtgttgcaccccaattggtgacctttatagaaaaatcacctttcttgagctcaaataacctaatatgatccttcttagaagagccatggacaaacccagaagaagctaagaagagcagacataacagcacaaagatcttggtcattgtattttcctatatatgaagcaattaaggaaattgatggtgcttattattaatggggttaatggaggagggatagcaagagagaacttttaagctaagagagaaaaacagtttgcaatgtcaatgcaaaagtttaaggt

SEQ ID NO: 2424 - DNA, 1594 bp, Glycine max
atacatatgtgaattatatttaataataaaatcccttcttttttggttttcctaccacccaaaagagaagggattttattattaaatataattcacatatgtatcaaaaaagaattctgcattagaaatacagaatcaaaatatcaataaaaagcaacaaatccaaaccaaaaacatgtttagagaaacatcttgaaaggttctgaagctgccaccaattatgagactaaccatgggactctaattattcattctaaaaggaccccaagtttggatgaaatccaaagttataaatgctacactgacttaccgtggcacattaaaaatgggggaaagctcactcctcctatctctagggatttttggtggaaatgcttgtcaggcttttctggtgtcacaattgttgaagggaaattaggctgattcactgaatcagggaaggcttgagactccaaacatagtcctgaatgagatttggtacacatatccaccttttcccttcaaaatccttaacatagttaccagtgtagaactgcaaaccaggaggcatttgtgaacaactccacccactctccctgatttcttatcctgcactatagctgctagcttgatcttttggcccttctcaccatcaagaacatagttgatgtcatagcctttggtttcagccaattgattgatcctgcttccaacagtttgtggcttaaggaaatcataagctgttcctttcaccgaagcaaatttgcctgttggaatgagtttgctgtccacaggtgtgattttggaaccaaagatctgcaccacttcatttaggatgttgccactgttgtggcctcctaggttccagtaagcatggtttgccaaattcactggtgttggcttgtttagagtttttcctttcataagtataaccaattggtttttcccagttagaatgtagctcacagttactaggagatcaccagggaatccttgttcaccatcaatactgtggtaactgaaggtaatgctgggacttggaccttctttttgataccttttcactttccaaagaacatcactaaatcctctggctccaccatgaagtgtattgtttccttcattagcaactaatttgtaatggattccatttagagtaaactgagctcctccaattctgttagcaacccggccaacagttgctccaaaatatgttgtatcattagtgtaatccttaacagaatcatatccaagaacaacatcactcaactttccattcttatcaggaatcaccagggacaaaattgaagcaccccagttggtgaccttcaaagaaaggtcacctttattgagctcaaatattccaatcttttccttcttttcaacatcaaagcaattcacaaacccagaagaagctgctatgatcagacataacagcaatacaaagaagatcttggtcattttttcttgcactggaatttgctatgtcctaaagccagctaaataatgatttatatgaggggataggaatagagattgattgaggggaaacaataatgaaggggtaaatgggaataatgaaaggcagtgggtaagaatgtaacgggacgcgtgg

SEQ ID NO: 2425 - DNA, 853 bp, Glycine max
tgacaatgctttttcatgcacctataaaatgcacatatccgcgcagccgccgcgatatctctcaatctgtgtgttattaccttaggagttaggtaaatatggcatactctcaacttcaaaagctggaagctaacgtgagtatcaaggcttcagctgaacagttctatgatgttttatgccacaagacacaccaaattcccaaaattttccctgaaaaagcactgtctgttgaaattctgaaaggtgcatggggcaccgagggatctatcatctcctggaattatttatacgagggaaaagtttgtgtggctaaggaggtgattgaaggcatagacaagaaaaacaaaaaaatgagcttcaaggttatagaaggagacgtgctgggacattataagagcttcaagtttataatgcaagttactccaaaggaaaaaggcagcgtagtgcaatgtgtcgtggaatatgagaaacagaaagatcacattcctgaccctcataccttattgcaatccactgttgagttgtgcaaaaaaattaatgcttaccttactcaggacaacaactaaatcaatatcaatagaaagctcatgctctatgctattgctatctaaaataaaaattgatatcttatggggcataatttccccttactttcatcaattataaattatattaaactcttaataaattgcattatctacaattaggcatgagttgggcacgtacgtactttatgtcgttgcattatttattttccgtgtgaacttgtcttcttgtaacctatgggattgaaagtttgttttgaaattaatctcctttaccttttgtgtggaaaacactaaaaaaaaaaaaa

SEQ ID NO: 2426 - DNA, 1591 bp, Glycine max
attgaccacaatggtaaagtgattttatttttggaacgcacgctggcgttagcgcaatagtcttttgaagtatgaactgtattttaagttgagaaagacaaaccaccattccagccacttgaagatggtggcagcgaccaactactccaccggagcaacacaagacgagagttcatcaaagttgggagaaactaaaaatatatacattgaggtctctgaaaacccacttcccagatcccaggtcagcaatacattgaatcaagttgaaaagaaagccgtgatgacttccctgatgatccagttgcaattgtcacatatatatctacacaactgggtggctacaaaagagtaagaacctctaaatcctcaaactactaacctactactatatcagaaagttaaaaatcaccgataaaatatgttacataatacgaagggaagtggatattacatacattatctttgttagcatagacaattttacttttcaaatatcattttctcgcatcattccatctcatttgcagacagtcttaagcctctttgcagcttggacaaatcccacaatcacctgcaactcgtccatttgctgcgacatgaaatgcctctgaacaacgtctactagttgctcttttgatgggtttgggaccgcatccaccagattaaaatgtcgccaatatctccacaatgcagccatttcaagtttgctcaagtccaccttcgcggacccatttggcatagaaacggatcccttcgactgtgaatcgccagagaaggacctactcatggtcttgtgagatgatcccaatgttctatgcattctatgcctcgacttgtgggacttgtgtgtgtcgtccgatgccatatctgatccattccacggcatattttcaaactcaaggtcatcatcttcctcattaccagtgggtgcttcaatcacgctaagtgcattcctttgtagcttcacttcaataccatttgtaagaaccagccaatgccatccgcctagtccaacggctttcttaacgacaccttgaagaccaacgagcaccgatttggtgcggttatttccggttacgacaactttggtgtgacgaggaagcaccgataactcttcttcgctgctatctccacagctctgcaaatgggagaagccaccattgaccgaactttccattgcctctagcattttccaattcacccgctcaagcactgatactcggatgtcaaatatcgatattgcattcgtattgaagatcgtgcattgctggtgaagaatgtgcgagtttcaggagcagaggagatagggtagtggagaaatttgggaaattctgcagagagaaaaagcacagagcagagatagagagagaaagggagagagaaaaccagtgagagtgggtggtattgtttattggtgtcttgggatgaatcccgacgagacgaaatggcccagtgaaaacgtgccacgtcagcgaggtgagggtgggctcttcaatcatgcgcttggagttacggcatgaacgtcatgttcaggagttactccgcttcttcacaatttctcactcacctttccttcttaccatcaattaac

SEQ ID NO: 2427 - DNA, 1406 bp, Glycine max
atctcataattacatgtcatttttttttattgtgccacgtattaaaagaattatcgtcatttctcacaattatacaaacgttcaagtcactttgagatggtggcaacgatccactacaccggaccaggtggcacaacacgatatttctttcttgtctttttttttttaagagaaactaaaatatatatacattgaggtctctaaaaacccatttcccaggtcagcaatacattgaatcatgttgaaaagaaagccttggtgacttccctgatgatccagtcgcaaggtcacatatttatctacataattgggtcgctacaaaagactaagagtctctataacaatctcaaagtactaacctactactatatcagaaagttacagatcaccgataaatattaacataatactaagggaagtggatattacatacactatctttgttagcatagacaatttcatttatcaaaatatcatttcttctcatttgcacacagtcttaagcctctttgcagcttggacgaatcccacaatcacctgcaattcgtccatttgctgcgacatgaaatgcctctgaacaacatctactagctgctcttttgatgggtttgggaccgcatccactagattaaaatgtcgccaatatctccacaatgcagccatttcaagtttgctcaagtctaccttcgtggacccatgaggcatagaaacggagccctttgactgtgaatcgccagagaaggacctactcatggtcttgtgagatgatcccaatgttctatgcattctatgcctcgatttgtgggacttctgtgtgtcgtccgatgccatatctgatccattccacggcatattttcaaattcaaggtcatcatcttcctcgttaccggtgggtgcttcaatcacgctaagagcattcctttgtagcttcacttcaataccatttgtaagaaccagccaatgccatccacctagtccaacggccttcttaacaacaccttgaagaccgacgagcaccgatttggtgcggttatttcctgttacgaccactttggtgtgacgaggaagcaccgataactcttcttcgctgctatctccacagctctgcaaatgggtgaacccaccattgaccgaactttccattgcctcaagcattttccaattccaattcagccgctcaaacaccgatactccgatatcaaatatcgaaactgcattcgtattgaagatcgtgcattgctggtgaagaatgtgggagtttcaggagcaaaggagatagggtagtggagaaatttgggaaattctgcagagagaaaaaacacggagcagagagagagaaagagaaaacgagtgagtgtcggggggggggcccgactacctggctcgcgcgggggcccggtacccaa

SEQ ID NO: 2428 - DNA, 1032 bp, Glycine max
tacggctgcgagaagacgacagatgggggaaggctcgttgatataaaagggagtccttatcttctcatattgtttaggttttcttagtcagacttaccccttgctaccaacactgagcttaaccgagcttcgcaaagatgaatcgggaaaagttaatgaagatggccggttcggttagaactggaggaaagggtactgtgagaagaaagaagaaggctgtccacaagacaacaaccacagatgacaaaaggcttcagagcaccctgaagagaataggggtgaatgccatccctgctattgaagaggtcaatatctttaaggatgacgtagttatccagtttctaaatcccaaagttcaagcatccattgctgctaatacttgggttgtcagtggttcaccgcaaacaaagaagttgcaggatatactccctagcattatccaccaattaggaccagataacttggaaaacctgaagaagctagccgagcaattccagaagcaggctcctgaaggggccgctggttcaaccacagctcaagaggagaatgatgacgacgtcccagagcttgttccaggccaggattttgagacagctgctgaggagaccaaggctgcttcttagattgtgccatcgctaaatatctcctgtgttttaattttttcttcttcttgattttccattttaagtatttcaggtgtttggttctcctgtcatatactttaaacagttcaaatactctattaaatctgctttccttcatctaactaggtattcagtttttgactgcacctgtcatcctcaacaccgtttcagtttatcagcattattcgtggttcggtagttaatgtaaggggtattcaattccaaagaaaaaaaaaaaaaaaagcttgatttgaagttagttttgatggatttgagttctaaaccaacgtgtttttggtacgagttggttatgatttgggtcatcataacctagtttgaagttgcaatttagtccctgaaatgtacacggtttcatgttagtttctga

SEQ ID NO: 2429 - DNA, 1355 bp, Glycine max
ttttttttttttttttttaaaagtaaaccaagctatattattatccattgtaggatgcacagacatgaagacaatgtttataataacattaataccatgcaatttgggatttgcaataaaagctcagaaatacaaggaaggtgaggcatgatttcattgtgcagatatcttatgatgctgcgctcttgattaatcagactggcctacataaagtactgtgaaaaacaaatgggggaaggatctagaatcttaaactgctctataaatcagcatgatattcctaaatcagctagcaggaatcaagatcatcagtatgcatcaagatatttatattggtgcttcctattatactgaagcaagcttgcataagtccggtcccagattccaatatatatacactcatcatcagggctcagagaaaccccagaaatttccccaaagaaatcaatttcttgacgttttctgtagtctgcctttgtgctataaacatgcacaaaatctgcaggctcagcaaccaccatatattgaccatcagaagaaaaccgaatagaccgggttgcccctaggttattcttgagaatggcagtaggagatgataagtgtctaacatcccatactctgcaagtcttgtcttgattccccgttgcaaaggtacgtccatcgggatgccatgcagaagcaaaagagtaatctcgatgaccaacaaaagttgcaacagtctaaaaactcaaacaagtctcaaagatgttagtggaagtttcttcagcacggtatgctgttttttgggaaagtataaagctataaagtaaccacgtagtgcctaatttctcggccttcgtattttgaaacactcccattcccaacccattcatatctagcatgcattcactatccattggagatgtttaacagtgagtacccatgtggccatatcatatatatgttcaatgaaagttttactagtttcaaattttctccttgtatgatcatttaaactaacgaaagatagacaggcaacatgcacacaagcaaattatgataagtacaaggaatcagtttcaaattgataacaataattcacaaaaaaatgataacccaaggaataaggaccatctaaaatgattagccctcctgaatctaaaggcatgcttccaaaactaacagagctagagacttgttttaatggttggataaaactgcaaaatattttccagctttctaccaataatgaaacgataaacattcttttttctctagcatttacaatatctacatacaacccaaataggaaactttaccagcttcacaaccatatgtgtcattctccaccacaaaaagaatcatagacataaatc

SEQ ID NO: 2430 - DNA, 1784 bp, Glycine max
ggaagacaatgtacttaacattaataccatgcaatttgcgatttctgctgggggcattcacatcaaaaactcaaaaatacaaggaaggggagacatgatttcattgtacagatatcttatgatgatgctgtggtcttgattaatcagactgaccaacatagagtactgcgaaaaacaaatggaaaggatctagaatcttaaacttctctaaaaatcaacatgatattcctaaatcaaacaagcagaaatcaagatcaacagtaggcatcaagatatttatattggtgcttcctattatactgaagtaagcttgcataagtccggtcccaaattccaatatacatacactcatcatcagggctcagagaaaccccagaaatttccccaaagaaatcaatctcttgacgttttctgtagtctgctttcgtgctataaacatgcacaaaatctgcaggctcagcaaccaccatatattgaccatccgaagaaaaccgaatagaccgggttgcccctaggttattcttgagaatggcagtaggagatgataagtgtctaacatcccatactctgcaagtcttatcctgattccccgttgcaaaggtacatccatcgggatgccacgcagaagcgaaagagtaatctcgatgaccaaccaaattggcaacagtcttcccattttgaggatccactagcagtccatctaggttatctccaacaacagtcataagcttccggtctggactgattgatgtgtgattcaccggccaagagaactggaagttattcaaaggctgaaacctttctgtgtcatattctctcacaccacaatcattattggaggcaataatatgcgttgcaccactcaagctgtcatatatttcaactgcatttgatatagcattatcatcatgtgtggtccgtgtacaaaagcttactcctttcttattcaaacgcttacaagtaagctctccttggaaaccaccagcaacaagaagattatccttgacagccaatgtgctaatctgggtctgagaaaatccttccaacaaatttcctgcatatctctcagtaggggccggtgccacatgcccagcaaaattgattatctcagacaaattaccacttaatgatgaccagtgattaacagagtagttggagataaggtagacatcatgttttgaagttgcccatactaagtttctcagctgaaaatgaaggatagtaggcttaaccattcttgtattatagaagaattcatagtaattcccacccttctcgatttgcttgcactccttgtccacagcatccccagatttaagaatgttctcaaaattcctatattgctcaagccttgtcaatctatacctctccctagatatgttcaaactttcccatggaattccctgaatgtcctttccctttcttgcttgagcagctgttgtatcagtcaccttagtaagcatctcatattcatcaagagcagcatccccaacacccctaccatggttttggtcatcaatttcgtcaaaaaaatcgtcttcgtccatgtgatcaaaatggtacatgtcatggtcgggcatgaaggctttccgtgcatcaaagttcaaaacttttttctagattgcagtgtcttcgttcgttcgttggttctaggattaggaaagtgaatgaacaaacacggttacctcttctgcatcttaatacatcaatagaaaatttcctagggaaggaacaaaagaaagcaacaataaacgggatacaagctcgagccgactgctggagtt

SEQ ID NO: 2431 - DNA, 2585 bp, Glycine max
ccttgagggaccggaaccgaattaaattccggggcgacgggaataatagtcggcggcagccctttttttttttttttcagcagaatgctaaatatgatcacatttctggaattaagtactaaacaaaattcataagcacaatagacaacataatttaagtccattcattagtagaaccaccaatatgtagaatcaagagaaaaaagaaactaattttaaataaaaaaatagctgacagattcattcatctgacaaaaaagaatgacctgtcaagggaactggaatgaacccccaatttggtcagtaccagcaggggggttgatagccacccagaggagagaaattgtgattgctatgaggcctgaccacacaaaaactatggtaggtgtcctccctcttcttcccatcaaaccttttgcaaagggatagagatgagccaagacccaaaaactgaagaaaacaccacctagtagacggctccactgtggtatgacactgtatatggttctgctaactccaactgctatagctattaagttaaccatcataattgtgataggtggtatcataagggatgtccatttcacaatatagagatcagcaaactcatcatctacatcatcaccaccagattttgaagtcaaggtgaatgatatttcaatccctgctatgactttgagcaaaccttgaagcaccgcagctagatgggcactggtccctccaatcagccaaaactgctcatttctccaccattcttccagctcaatgccagaccatttaatttcaagcacagcaagcatgcacagagtcacagtgatgcccaagaggtaagaaagaaaagtgacactgagggtttggacaatgaactggccagagaagagagatagtgcaggaaggaagcagtagacaattaggaatatggacgtgaaggggtagattccaacatttaggtatgcaattctttgaagaattttcattcttgggctagccagcagcgcattgtttcgagagaagaatatttcaactgagccagtagcccatctaaggacctgatgcagcctgtcagtgagattgatgggagcagttccacggaaggcatcacgcttggtcacgcagtaaactgatttccatcccctattgtgcatcctatatccagtgaccacatcctctgtcacagatccatagatccatccaacacgatttccccactcagtcttgtcctcgtaccaacaggagatgacactgatggcttctgcgacagttgatgcatcaagaagatcgcggggtatggtgagagcaccaggtggacgtccatttttcacagcagggtgatcagctagcggacgaccttggaactctgccactggaattgagtcaatgaggaaagtagagtttccaaacttcttaggaaacaacgatagattcatttcctcatcatcagaatcacccatcctcagtgaacggttctcttctggggtgcttgccagtgatgcatgcttcttctgacgaccaaagcaacaattacagcaacctgtgtggtgctctttagaacgcggtgggtcaaaaccataaagtgcaacccgtctgaaaaggcatccagttcccacatagactggtccttggagtccatcaagggctcgcatattgacatcaaagaaaacagtattatggttagcatatctatcagagggatcaattccttcaaacctctgggggaactggacataacaaaggcggtcacctccacgatccatcataaagcacatgccttccctcattgcctttgagttgtagatatagtgatcacagtcaagattgagtataaaagggccattagacattatagctgaggctcgaaccaatgcattcatggccccggcttttttgttgtgatcatagcctgggcgcttctctcgagaaacataaacaagaaggggaagacggatatcaacatcagtcaggtcaatgagccttgtatcatcagcacttcctaaaagaggttcatcgctcggaggtttcaacatcacctgaattataccagcatggtcacccttggaatgctcagatgtaggactcaaccaagttcctggccaatgagttccatcagccatccatgttgcttttggaatcttcacagtttctaaaggatcatcttccctgttttgtctctgaactttcatggccttgatttcctctcttgcatgataggcatctgaccggcggcggatagattcaggcagactattgatcctaaccttgaattcatcatactcacgctttacccgtctacgatccttgacaaaatcaggcttcactttgtttttgtaagggtctctttttaagttgaagtatgattcaggattcctgggctctatatcatgtttacgacagaagggaacccacatgttagcagaagctggcagcttcggccattgcctcaagagttagaagtgcacctccatcatcagaaacataacaagaaagcggcgcaactgggtaatcagcagctaaaatagacaagatggtgtttgcagtgacaagaggaggttctttctcaggatcagcagtagaaacaaactcgagcc

SEQ ID NO: 2432 - DNA, 1591 bp, Glycine max
ttttttttttttttttttttttttttttttttttttttttttttttttttttttttttttttttttttttttttttttttttttttttgcatgtcaacagctttattttattatatcatctgagtgactgattcaattgagctggtacactaaataaggtatcaagcttctatgaatagaagcaaatgacaatgtttattgaagtgaagctcgtctacaagtcaaatctcagcaagaaaaacaaatattgacatcagtgactccaaaagctgcaatccaaaaatttgtttcagaaaactcaagccactggcttcagcacgtacattttacacccatgtggatctactgtggcagtcaatttatccacgaagggtctcatcaatgtcttgtgctcccaaaggtctcttgcttcaacagcactttttggtggaatatcaatgtcatcccagttggctgtaattgagattttcgaagggccacgattaagcaagacaacagctaccctgtaccctgaaagaggacctgcccaaatctcttgatcaccttccatcctaacctttttaccttgtacaccaagtggatcttggttaactgaaataacttccttgtttgctactatctccatggtctctttagtcatattcctaacatcacagccaagaagaagaggagccttggaaagggcccataaactgaagtgaacaatatattcattttttgtcatccctccatttcccacctcaagcatatcaggatcattccaaccaccaggtcttgcatactctgcataaacttcattcatatctgcccttgaaaccatgctttcccatgaatcattaatgtcattggtagttctccagctgtttcccactttagcaccccatagagctgggtgtaagtctccccattcacatagtgagaagaagattggacgaccagccatcattaaagcccgagtcataatagggtatctatcagttggttttgatccatcattgttacagttatcatacttcaaataatcaataccccatgatgcaaaagtcttggcatcttgaaactcatgaccaagagaaccaggcatctgtttgctacaagtaaaatacccagcatctgaataaattccaagcttaagacccttgccgtgaacataatctgcaagagctttgattccagaaggaaacgttgaattttttgctaccagattacccttagcatcccgatttaattcagcccaacaatcatctatattgacataagtgtatccaagcttggacagaccagtagaaacaagggcatcagcagtttctctgatcattttttcgttaatttgacagctgaaatgattccaactgttccaccccattggaggagttctaccaaggccattagcaagcagattcctcctgaattgctccacacggtggtggagttttgttggtcctgatgatgaagcagtggcacaagcaaatgagaaaaccaaaagggtcaccaaagccaccagcacctcatagccaacccttctctccattgtgttcacttcaccacctcttcacttgctgtcggggggggggcctacgtagctgacgta

SEQ ID NO: 2433 - DNA, 1054 bp, Glycine max
  misc_feature (47)..(47): n is a, c, g, or t
  misc_feature (82)..(82): n is a, c, g, or t
  misc_feature (202)..(202): n is a, c, g, or t
tcagctacgtaggcccccccccccccattcaccgtgatgtcaaagcngctaatatattgttggacgaggaatttgaagcacnttgttggagattttggtttagctaaacttatggattataaagatactcatgttactactgctgtacgtggaacaattggacatatagcaccagaatacctctcaactggaaagtcttcantgtggcttgatgtttttggatatggtgtgatgcttcttgaactaataactggacaaagggcttttgatctagctcgacttgccaatgatgatgatgtcatgttgcttgattgggttaaaggacttctcaaagacaggaaattggaaacactagtagatgcagatttacatggtaactacaatgatgaggaggtagagcagttaatccaagtggccttactatgcacacaaggatctcctgtggaaagacctaagatgtctgaggtggtaagaatgctagaaggtgatggtttggctgagaaatgggagcaatggcagaaagacgagacgttccggcaagactttaacagcaacatacatcaccctaatgcaaattggatagtagattcaacttcccatattcaggcagatgaactatcaggtcctagatgataacattctaaggacaggtgaatacacaatactgccggctttctgttggaaagagatatacttctgatttgtgcatatgattttcgccccctctaccttttctcttgttttcatccttgtgcgcagattccatgcccattggtcagttgtgattattaaagaaagaaaattgtaatttcttttgggttgtcaagttgcaggatcaagtgtatgttacaacttactagcaacttttgtcattgtaggtatgaaaaattagaatagagctttatggaaataaatacaattctattgtcgattgtattatattgacttttgtagttatttctggaggtttggaaatcaatactatttgagtcatgcaatggtaggcatcgaatttattacttgtggaaaaaaaaaaaaaaaaaaaaaaactcgt

SEQ ID NO: 2434 - DNA, 2533 bp, Glycine max
cggaattcccgggtcgaccccgcgcgttcgttgacttaagctctctcttctcctcgacccttcttctctctcaaaaccctttctctgcattttcagctaaacctgagcacacccaactgagattttagcttcagattccgaggtaagagcagaaagaagagaacttggagctacccagagttcgattttgggttgttcaacaaggtcaagatgtttctgagcttgatggatattatgtagatcaagaggggtgtgtggattggggaagcaattgtttatgaggttgaagaagcatggagagagtgacttcatcttttatgggttccttttttttttgggcaattttggtgcttgatttggtacttaaggcttctggcaatcaggaaggtgatgccctgaatgcattgaagagcaacttgcaagatcctaacaacgttcttcaaagctgggatgctacccttgtcaagccccgcccccggtttcatgttacatgcaacagtgataacagtgtgacccgtgttgatcttggaaatgcagatctttctggtcaactggtttcacaacttggtcaacttacaaatttgcagtacttggaactttatagtaataagataactggaaaaattccagatgagcttgggaacttaacaaatttggtgagcttggatctttacttgaacactttaaatggtcccataccgactactttgggcaaacttgcaaaactacgtttcctgcgtctcaataataatagcttgacaggaggcatacccatatctttgacaaatgtttcttcactgcaagttcttgatctctcaaataaccatctaaaaggggaaatcccagtgaatggttcattttcattatttacccccatcagttatcaaaacaatcttggcttgatacaaccaaaatacactccatctccagtttctccaacaccaccaccagcttcttcaggtaacagtaatactggagctattgctggaggagttgctgctggtgctgctctgttgtttgcagcccctgcaattgcacttgcttattggcgaagaaggaaacctcaggatcatttctttgatgttcctgctgaggaggatcctgaagttcaccttggtcagcttaaaaggttttctctgcgtgagttgcaagttgcaacagataactttagtaacaaacacattctgggtagaggtggatttggaaaggtttataaaggacgcttagctgacggatctcttgtagcagtaaaaagacttaaagaggaacgcacgcagggtggagagctgcaatttcaaactgaagtggaaatgatcagcatggctgtgcatcgtaatttgcttcggcttcgtggtttttgtatgacacctactgagcggttgcttgtgtatccttacatggctaacggaagtgtagcatcatgtttacgagaacgtcaagaatcccaaccgccacttggctggccagaacggaagcgtattgcactgggatctgcaagggggcttgcttatttgcatgatcattgtgaccctaagattattcaccgtgatgtcaaagcagcaaatatattgttggacgaggaatttgaagcagttgttggagattttggtttagctaaacttatggattataaagatactcatgtcactactgctgtacgtggaacaattggacatatagcaccagagtacctctcaactggaaagtcttcagagaagactgatgtttttggatatggtgtgatgcttcttgaactaataactggacaaagggcttttgatctagctcgacttgccaatgatgatgatgtcatgttgctcgattgggttaaaggacttctcaaagacaggaaattggaaacactggtagatgcagatttacagggcagctataatgatgaggaggtagagcagttaatccaagtggccttactatgcacacaaggctctcctatggaaagacctaagatgtctgaggtggtcagaatgctagaaggtgatggtttggctgagaaatgggagcaatggcagaaagacgaaacattccggcaagacttcaataacaacatacatcaccctaatgcaaattggatagtagattcaacttcccatatccaggcagatgaactatcaggtcctagatgatccctttaacattctatggacaagagtgaatacacgatcttgcctgacaaggctttctgttggaaagagatatacttctgattttgattttgtgcatataattttcgtcccctctaccttttctcttgttttcatccttttgaaattatcttctgtgctcagattacgtgcccattggtcaggttgtgattattaaagaaagaagattgtaatttctattgggctgtcaagttacaggatgaagtgtatgttacaagcaacttttgtcatagtacgtatgaggaattagtatagagcttttatggaaataaatgcaattctattggcgattacagtttaatattaaaaaaaataaaaaaaaaaataaaaaaaaaaaaaaagaaccaaaa

SEQ ID NO: 2435 - DNA, 2106 bp, Glycine max
ccacgccggccgacacaacataaaaaatcgtttttgtgatactgatttgtaacactcacaaacacaaaatctttgtcctgcttttatttagttttgttccattccatctatctatgttcatctccaccaccccttgttgattcattcattaaaaagccacaaacttttgaattgacgatgggatacctctacctttcttgcagagctgaatccgctgtctcaacctccaattcggtgtcctcttccaaagagaatgagaaaagcagcagcatcaagatccaagagtttcagtacagtgacctcgaagctgccaccaatggcttctccgaccgcaagctcctcggcaaagggagccacggctacgtctacaaagccgtcgtccgcggccgtcccgtggcggtgaagcgtccatcgcggccacaccataatgttccccgaccggtctcttcttccgcaccctccgagatcacaaacgaggtcgacaacgagatcgacatcttgtccaaaatccagagcccgaggttggtcaatctggtcggtttcaccaataatgattcaagagacaggcttttggtggttgagttcatgagcaatggcaccctctacgatgttcttcatacctctccaaggcctcccaattggggtaggaggattcgtttggctttgcaaaccgcaaaagccattgacactcttcactcctcaacccctcccgtgattcaccgtgacatcaaatctgccaatgttctcatcgaccgcagctacaatgcaaggttaggtgattttggtttggccttaagaggccatgttgatgattacagactcaggtccactcctcctgctggcaccatgggatatcttgatccttgttatgtcactcctgataatttaagcaccaaaactgatgtttttagttttgggattttgctgttggagattataagtggaaggaaggctattgatatcacttattcacctccttccattgtggattgggctattcctcttattaagaaggggaaattgttggctgtttatgatcctagaatagcaccccccaaggatccgattgtgaggaagcagttggctgtgattgctgccaagtgtgtgaggtcttgtagggagagaaggccctctatgaaggagcttgttacttggctttgtgggttgtgtaaattggtgcctcttcattcgtggaatggttttaacaacccttgcatgatggctgagattgcagggcgcccagtggaagcggcggcggcggcggcaaggaattatggtcaattcagttctaggctggaaggtgtggaggaaggaaagtttgatgctttggatggcaggttgtcaaagtctgcaatgaggtattctaggagggtgtactctgatttggggttcagcagcaacttgatggacttgatggctaccactgaggagcccgaatttcttagagatgcggatggggtggaacatagttctaagtcagctgaacaagtttctggtagctccagcaggtttgggagtggaagatattccataagagggaggaatctgtaccggccttgttggagcgacaaggatgcattaggcttgagtaaaggccagattttaggtcagagtgagactacttcgaaacaggatggggtttctggttccaattcgaagaatttgaattctgttgctgctgaggttatctagtttgaatttaattgccgagacatttaattggagtgatgatgcctaggcttgtgagctttccttgcttgcaaattgtgtagatttgttgttggttcattatttgtggatttcagattcatttttagtaggtttttggattgaagggcacattcctgatgtccccttaacgttgttcaaaaagctttgcctaaagattttgtttccccctcaaaaacaaatgcaaaagccattgtatgaatgattcaagaacaattctaaaaactaatacatgaagctgccgcagaaaaattgtaaaaaaaatctaccattgcttgttggttgaataaactgtttgtatgtagctcaaataaaattttcaataccaacactgctggtccttttttttgcaataaaaataccagcttttggtttttt

SEQ ID NO: 2436 - DNA, 847 bp, Glycine max
tttttgattcataaccttgtggttgcattccaaatttccaagatagactgaaccaatatcagaaaatttaattgcacaaagaggacagagttctcaaccaaattaggctagtggtttcaaactctaaaatgcatgagtttacattctgataacaaaagtaaaactcaaagtgttatcacataaataaacaagtacttgtcttaaactcaaaagagtacccacaaaataattccagagagagagagagagagagctgagagagaggagagagagagatgaaagtataatttatttgttgcgtttggcagcacgccttccttggcccttcttgggtggtccttttcctcgccgcttcaacatttcaagctttgataagcgttcttgttcttgacgggccatgacaagagggtcgtctttcttgatgtcgtgagggtaccactgagcgactttttcaccgaagagcttcatgcggagaagcttgtgtggagttttcatgccagtggggttcaattggtggccgaagatcctggctcgtgcttccaccactccttgattcattgctacactcaacatgttcttcaaactaccactagccatcttctttgagtttgttttctgtgtatgtgttcgtagagatggaggccacggggttaatgaattcgttttatgggtaatcacaatttgacccctctaaatgcatatttttcgactaatcactaatgcccctggaattttttaaccatatgtaatcttagaagaaatgattcattcacaatttagtccctaaaataaaaaaaattaaaaaaaaaatctccaaaattgtaatgttattcattttactccttcc

SEQ ID NO: 2437 - DNA, 822 bp, Glycine max
tcctctagagcggccgctttttttttttttttttttttttttttttttctgttttggccgtttttttttttttttttttttttttgacgagcgaaacaaaaacatatccatgtatttagaacatcaaataaaacaacaaaaatattttaatagtctgaattgtttctcttccaacacaaaaaaggactaataatccccaaacaaaaaactacgcagaccaacaacgagaatgaaactaataacctcccttgaggtcattgacgacatcatagggaataggggtaactgtctccaacgttgccccctcgaccatgaaaccaggtttgggaccctgaggctgtctcttggtgctgatcttctcacccttggccttggcctcagccttgagctgatcattcttgatcttcctaaggcggaactcctcagtgcaccttgatggcataacatgctccacacgcacgtgaatcctcttccttatgattctgttgccgacctgcttgttgacttcgaccccaacagcacgtttggtgacattccagacgcgaccggtgcggccatggtagaacttgtgaggcattcccttgtggacggcgccgttaaccttgacgtcgacataatcgccgacgtggtaggttctgaggtatgtggtgagggcgatggtacccttcttcctgaagggacgagagaaggaatctctggtgcgggatctcaaaccgtgaccagccggcatttttgctagggtttctctctctcgctgctcggctttagttagtgtagaaggatcactcttctccccgccccgcccggcccctcgagcgggcc

SEQ ID NO: 2438 - DNA, 1507 bp, Glycine max
ccttataagcttggttttctttttctgatgttatctttttggcctcagatagacaataatcctaaaggttacatgttacaagtctttttttttttttttttgacctaaacaacacagcgttagcattctgcagatgcacgtattataatattggaatactagcagaagctaaggccaaagactcggtaataacatgatacaacgcataaatgagcatagcttttggtacaatattaagcatcttgctctcattattgtgcatcataacaatgatattactagtgcatacaacaacattcatggtaattactatgcacaatacaattcttggctgatttctccagcattctcaggcttgcgcaaatatataaacttcatcatatcctttcccagccttcccacaataagttggactgtaattgtaaatgagattgtctagcaactcttgagcaactggtctgtttaaggatttcctagcttcactgaccaaaaaatttgcaacatactgggttatctgaatggcatcctccgtgtgtggaattcttggtgaaccccattcaaaggcatttttctctggatgccattggaagccagtcacaggatagttttgagaacgtacagtggaaacataaaccttatcatcttcatctgtgcaagttgtcaagatctcaaaaaaactagacaactttggattattcagaagctttccaggggatatgccataacgatggttttgcatgacaagacaatctgtactcatcttccctaacaactctggaggaaatctttgaaagacactttctccgatatttgcattctccacaaattgaagagtacttgcctgatttgatgcactaaactcttcaagaatattattgtcctggcttatgatcatcgttatgagttcaaagcctaagcaggtggcaaataatgggaaatgatctccagcatcattcttctctaaaattttcttaaatatttttgtgacagtttcaaaatataaaccacttttagcccatccaccagtgaagagaaccccatttaccaattcgagcttcttgagaagcttctccggaggctcggtatagatgaggggaacgacacgggcgccggcggcctcaacgaatttgacataggaggcggcgatgtaggaggcgccggtggcgttgctgaggcggccggaggcgccgtcgccgggatggctgacgattccgatgactggcttgtagtagaggttggggtcaggggcggggcagctctgcggtgagtcacgggcgagttgacccgggaggaggatcgccgagtgggcccaggcggagggaaggcattgggagaagaaggcgaggtggaagaggacccaaacggcgtcgcttgacatgttggagaagtcaatggggggggggggggggcctacgtagctgatataacgggtgggagtgagatccaccttcgctcgggaatcaatcattctttcacgtcacgttttcatttccatctcttacaatca

SEQ ID NO: 2439 - DNA, 1781 bp, Glycine max
ctcgtctcctctagctattacgaagactttcaagtaaagttatgacagaaatattcaaatgattccttaatatgttaatttcttttctttttggttccaattttttccctggccaataggggccggcaataagataatgtagctaaaagaaaaataaatacagaaaaaggcaaaatctttcatcctatacaagaaatcaccactagtattccgattgcttgaatcgaaatctcctatgttacaatgaaattaactagttttccagaccccttgcatcaactagcggagatgtcttggcaggtaatattttaacactccttccagaactgagaaaaaaattaaaactgtatgtgaatcattcattgcggattgaataatatttatcccagagagtttgtgattttgatatttcgttcataagattcttgaacttgacactgcaatctcctccacttatgcggttcaaggatgcaatagctcggagtgcacttcgaatcatgtcttcattgcgatctacttcttgcttgacagcgtcttgctttggcttaaaattaatagtcttctggagaggatcaaccaatgaatctaacactgccaagactgcagaaggacacttgtcagctagtttggagagtatcaggtggcatggcattttaacatcataatgatcatccaaaccagatttaagataaggaacaatgaatgatgacgggttcacttgatcaaggcaactatccagcaatgtgtctacacattcaaaagccgccttcctcaattcaagtccatcatccacaatatgcttaaaaggaccaagatcaactgtccttatgagctcttgcttaacaatagtttgatcatatagaagaggcagcagatcaggaagaagccccttgatgagatttggcttattgtgtgcaaatgtgctgagagccaaaacagcagctcgcctaacatgcctatcattatccttgataagcatcagaaatgaagatatttcagggtatataatctcatctatcttctctggacgctcaactatagagtacttcacagcaatgacaacagtagctcgagtaaatgcagctgggctggttgttcttaccttgagtgcagggatgagttttacaggctcaataagagcaattttgcccaaacactccgccactacattgcgcactccctcttcctcactttcacagtggttgaagagtaaattaagtattttctccacactggactcttgaaactctgctttatccacagattgtctgacaattacctctttcaaagaatgaagcaagagatattgtttcttctgctgattatcaatctgatccaagataaatggcaagtattttggaagattaccaacagcaatgttaccaagagcgtatgaggcagcagactttatctcttcaaaaggggactgaaaagattcaataacggggggggcgggccgcgcatgtggacttagatccttccttctaccaatctcccccaaacataaaagtgcaaggtgctgcttagcggagttagaactgctgtcatccttgagaatgtcagtgagcattttcactgtagatgaacacttctgatcaccagcagcaaggcatagaacagcaacacactgagctatcgaatccagagcttgtttagcaatgccaccagcctgtggagaaggcttagcacaggcaagtagtgactccagcagagaatcaaaactagtatttgcagaatagactaaagcagcaaaacagcggcgcgaggccgaaagtgcttgc

SEQ ID NO: 2440 - DNA, 2820 bp, Glycine max
agaccccattacttcaacacttttatcaattaacaatgtcatgaatcaaacgttccaaaagttcaaactgtaggatgaaagcaaataatgactttcattttaaattctaacacacccattcatgatagagtcccttggccttgaagagactacataattatgagggcttcggtaatatatcaggaaacaattatcttaaacgtttaagctatttaaatgaaattttacatctctcacaaacaaatcaagagacagcaacatctagaacacagtttcctctgctataacattgagaagaaccaaatgaaaagtgttccattgagttgttccttttacatgcaactaacaagttcaatttcacctccttgtccggttcatgcttttctgggaaacactggcatttctactattccctctggaaagatttgatcctccatggccaactcttcttactgatcttctttcacagctccgtgtgctgttcccgagtgcagctctggcaacactatcgcttaatatttcgcgtgtcctattggccttaaggggttgcttgttcaggtacaccacctttggaaggagaccacagactgctttgctaagctggtcatcattgatattgctttgaatcggatttccaaggagattaagggccttaagtgagttgtagttagccactagctggcctaatgcttttgttgttgtgatcttgttgaagctcaactctagaactgttagcttcaatagcctgtgtagcccttcaacatcacttaatttgttccccacaagatatagctctttgataagtgtgcaacttgacaaaccttgtccaattctcgagatacggttgtagcttaggtcaagtacccgcaacttggtcaattctctgaggccctcaagggcactgatcttgttttttgacaagttaagtgtttgaataccctttggtagaactcctggtgagatgtgaactatgaaattgtttgacaagttgacagagcggagattggataagtgtgaaatagcagggatggcttttacaccaataccagatatgtgagcaatagttgaagctggatttagagactggactacactaatcgcagttaaagcctcttttgaaagattggcatctggataagtcaactgagatgtggttctcatcattgacccaccagcattaggagaaggtgggaagacaatgcttcttctggcattgtcatcatcaaaatcatcctcaggaagcatttgctgaatttcgagacccttcacccatgcatccactctggaaaaagaagatgattctgttgagaaagcaatccattggtcgctttgaaacctgctccccctttgattatcaatatttttaccaattcttcttttgttaaaggattccatagtaattgaatcagaagatttcacaggcctcaatgccttgccttgtttcagttcaagggtgtctgaagagtatccactatttaaagcagcactagtaggaactagtgttgaattgctagggagagttctgcgtgtgttcctgtggctccataggatcatcttccaccacagttttttacttctagaagggagtacctgacttgaagagtgccttttcaacaatactctatcagcactgtagtgactcatcacagacctagggctttcaagattaaccattgctgataactcctgaaaattctcaaaagacttcgactttgaagccggcaagtgacgagttatcttcccatgctcatcaaatttttcaaggttggagaagtgtctcttgaactttggagaagcccaggaatcagccttgccaattccaggatcagtgatgtgtccgctttcagttgtatcgacactcttttggctgtatctatcatttttgtcttccaattcattgttgacttggttttcatataaaatggggtactctacctttttatctgttgtatcatatgcgttgcttgcaacagcttcatgatcttggagatcaaaatcagagagttctctcttgatcaatggtgaatcttcatctttataagtttcatgtgcttcatccttcacaggactctcaagggtcataatcctcgtcgcattgaaccttgaatttttctgaataccaatggcatcaaaagtggttgactctgatgttattttttttgtagattgtagtttggcaagtagagtgttaaagtcctcttttgaagacctttcattccccttgtgtttgtccttcctcacaggcaaaagagagaagcacctaaccatggccatcccagaagataaagcttgttccaaaacctttcaattcaatcccctttgccgcttttcaatccgtttcactttctaagcaatcctaaacagctttgaacatagatccaacaatttttttctgacctttcacaacaaattgcattgaaaaaaagtaggaggatgacaatacaaacatactagtagttgagtagctatcacatgggggaccttcgtagctgactcaaatgttagccataatcaataggaaggcgcagaacaagagacaagatactttctgaacaaatctgaaaaccggaaatataaagacctaagcctcttccggtttgggaagatatctctatagagttggccagagttgtaaatgctcctcttcaaatctccaccaatattttcctctccaaataaaccttgaaaagcagaaccgcaaagctaataataaaaactctttcagacactatatgtgcttttgttctggaatcttcaaaagctttgggatgcgaaatagctattataaagtgcggtgggtgtgtgagaaagaaagaaagc

SEQ ID NO: 2441 - DNA, 2076 bp, Glycine max
ttttttttttttttttttcttttgagcacagaaatttaaatatttataatataatctaacactgatttataatacatagattagcaaacctgttcattccagtttgcaacttagcatttgcttcttaatacaaaataaaaaaaattaaaaattaacaattttttcctctatttcttgctaaataaacttctaaatttccctctttccaacctttcatgcagctttttagctcctggaatgtccatctcagtaagtttcttcagatacccaattgccccatatgagatcataagcttcttacatttcttacatgaagaaagtgatccaaggcaagtaacagcatatttttttgcagtgttctgaggactatgatcaagcaactgaaccaagtttggcacactcttgtcatccttcttaacctctcttcgattctgagacacaaccatcaagcttgcaattgcttgggcagcaacctctctaacactgtttgacttggcctcaagcatcttcacaaggagagggatgcagccagcttcaccaaccattttcttcatgtctgtggagctgcaaacccgacatatcgcagctgcagctgcttgctgagcacctaaggatccggacttcaacacgtgagccaaacgggggatcaaaccaagggaaaccaaggattcctcaggaactgatccaaccaagttcctcaatgctccaaccgcggattcctgaggaagtggaccatcaagataagccagaagactcctaacaccaccttctgatatgacattcctccttagattctcattgcttgcagtgaggttctgcaagcactctgcagcatgctctttcgaacctaacagaattccacagttaagcagattgatcattaccctcacaatcccttcttcagccaaagcttgtctaacctcaggcacagctgatatgttcttcagagtacacgcagccgcggcctgtgacacagaatcaccgatttgacaaagttcaaccaatggacgaaccccactgtgtcccacgattgctcgtgctgtttcggctgacatcgacaacctctgaagggatattgtggccttttccttccccaccgtgctgccagattcaacaagccttataagaggtggcagaactccttcagaaactagccaattttcgcagctaccggattctgcaagcgagcttataacagtaactgttttctctcttatcctgggagaggtagctgtaagcaattgaaccaaagcagcaatattgctccgaccaagaacagataaaacactcttctcatcctccttcatggcctcaacgacgctgtctaaagctcggtgcttcgcttccaagtgcccgatctgaaggcgtgccagcaactcccttatgttgttgtatgttgcaacatctgattctgccacagaactagacacagccaatggcaaagtagcctcaccaagcacaccagtcttgatcagaagcccacaatccctcaaattcaaatcaagcttcccagacaatgaatctagatcgctctgcatccgaagcttaccctcatacttctccttcaaacataactcagccaattcaatcgcttccccaagtgtctttgacacagcctgcaactgctccttgcaaagagcattcttcgagaagcatggatggcttgacaaatccgataaccgcaaagggatctgttccagttttgcgacaatcatcttccatctaccggcaaatcccttgacctctcttgccttatcaatgacaacaggaacaagttcttgtgcatgcaacaaccagtcttctgtggaacgagcatctaccgcaacctcatcgccatcttccaccatgatttcagtttggtagtcgtagaaccgacgatgattagctgccacaatggaaacacaagaaaaccaaagccttcaaagaaatgcccccagatgccaattggtaaatagaaaaatgatatcaagcatagaaaattaaaaggctgtggtggagcagttgcaatcatatgatccgtaaattataaattaagactccaatagaaaactctggggggggggcctacgtagctga

SEQ ID NO: 2442 - DNA, 1643 bp, Glycine max
tttaaaaactaaaaagatattatacctttatttcaatagatttagaatagttttaaaatcattacactactacatgaacgaattcatgccattgagcattgtaataatctaaacactactttgtagcaattttgttcataagaacttgacgaaccacgttgtccatgttcacaaacgaagacccatgtggactcgaagcagcctcgtgtgccaatttcttccactccaaagctcttgccttcatctccttacccttttccccttccatcaactccctcacaagtgcttcaactttctccctcttaacatcctctatctccaacccaatcccccactccttgcaacaaaatcgacaattggtttgttgctccgcaaagaaaggccaacacaacattggaaccccttcacacacactctccaacgttgaattccaaccacaatgtgtcaagaatcccccaaccgctgggtgagccaaaacctcctcttggggacaccaacttgccaacatgcctctatctttggtctctttcacaaattcattgggtaacgcacaattaattccccctgccacaagatcgggcctaatgacccacaaaaagtttttgttactatttgcaagtccccaagctaactctgtcaattggtcactagtcatgaccataatgctcccaaagttcacataaaccactgaatttggttcttttgagttaagccattctagacactttggctcttccttccaaaggttggacccaattgttttcaactcctcgttgttggtgacatcattgttcaagagtaggtttaaggggccaatggaatagataggaggcaacaatatggatgagaatgcatccaaaacgtcatgctctaatgcatcaaacgtgttcacaatgattgctgaagctttttgagctctctcacactggctatatatgaaatccatcatcatgagatcttgtgggtttgtggttctcatgaagctaggcaagtcctttaatcgaatttctttgatgcctggtacccaatcgatggaattttctaagtaacttgagtctttgagatgtgttaagcccatatcaacaagtcttggatatttcatgtaacacatgtacccacatgcactagctgtcgacaaaaacacgtcagggatgcctaattcttgggcagcatccaaagtgaaggacatgccactgtcagaaactatgcaagtcacaggaggagtatccgaggcactattgagttttgaaaggagatttttgaagggagttaaacaagtccttctagtagactcacttaaagaaactacgtcttgtgtggcatcaacatcagggttatcagagagaccatcagggatggtttcaaattgaaatgatgggacactattgagggaatcagaacctcttgatttgagaaggcgtttgtggttgtattctgtgttaacaaaggtgatgtggaagcctctaacatgaaggagttttgctagcttgagcattgggtttatgtggccttgtgctgggtatgggatgcacacagcatgaagcttttccattgtgcccaattagcaattagcaaaaaaattaacgagagtactaatttgtggcttgtgaattatccccttctgtcgtcttctcgcagccgta

SEQ ID NO: 2443 - DNA, 1528 bp, Glycine max
atttgtgaaagctacttgaattggcctattcaattagcaaaagaaaaatccagaacagaagaaccaagctccacaaaatttttcgtttttactcaattccacagaactccaaaagtaaaatcattattatttatagtaatgtaatgtaatactattgaattataaatttatttacatatatatacacatactgagggagacactgtgactgtgataaagtaaataaaatttctgtggctttggattcttctggcaattcgtgctagccagctttacttggctatgggggcagcattagcatagacctataaaataaaaattggaacttggcataaacgggggactgcaaatccctttcagctttctgggtaggaagaattttgtaagatggtagagtttcaaaggttgttggtgtgcatcaccacctgcattctatgttggatgcccaatggtgccactgccgccacagatccaaatgatgctgctgctgtgagatttttgtttcaaaatatgaactcaccaccccagctaggttggcctcctaatggtgatgatccatgtggacaatcttggaaaggcattacttgctctggcaatcgtgttacagagattaagttatctaatcttggactaactggatcgttgccttatggattacaagtcttgacatctttgacctacgtagacatgagtagcaacagtcttggtggcagcataccgtaccaacttcctccatatttgcagcacttaaatcttgcttataagcttctcgtgccgcctgtaccttcgtcgatttctaacttgactgctcttactgacctgaattttagtcacaatcagctccagcaaggactgggtgttgactttcttaatctttctactctctccacattggatctctctttcaattttctaacaggtgacctccctcagactatgagctcactttcacgcataaccaccatgtatctgcaaaataaccagtttacaggcactattgatgtccttgctaatctgcctctggataatctgaatgtggaaaataataattttactggatggataccagaacagttgaagaacataaacctacagaccggtggtaatgcatggagctcagggcctgcacccccacctcctcctgggacacctccagcacctaaaagcaaccagcaccacaagtctggtggtggaagcaccaccccctcagatactgccactggcagcagctcaattgacgagggaaaaaaatctggtacaggaggtggtgccatagccggaattgtgatctctgtcatagttgtgggggcaatagtagcattctttctggtgaagagaaaatccaagaagtcatcttctgatttagaaaagcaggataatcagtcctttgctccacttccttcaaatgaagtgcatgaagaaaagtccatgcaaacttcctctgtaacagacttgaagacgtttgatacttctgcctcaataaatcttaaacccccacctattgaccgtcataaatcatttgatgatg

SEQ ID NO: 2444 - DNA, 1883 bp, Glycine max
aggtgacctccctcagactatgagctcactttcacgcataaccaccatgtatctgcggtcccgcaagcccgggcgcaccaccgctccccttgctaatctgcctctggataatctgaatgtggaaaataataattttactggatggataccagaacagttgaagaacataaacctacagaccggtggtaatgcatggagctcagggcctgcacccccacctcctcctgggacacctccagcacctaaaagcaaccagcaccacaagtctggtggtggaagcaccaccccctcagatactgccactggcagcagctcaattgacgagggaaaaaaatctggtacaggaggtggtgccatagccggaattgtgatctctgtcatagttgtgggggcaatagtagcattctttctggtgaagagaaaatccaagaagtcatcttctgatttagaaaagcaggataatcagtcctttgctccacttccttcaaatgaagtgcatgaagaaaagtccatgcaaacttcctctgtaacagacttgaagacgtttgatacttctgcctcaataaatcttaaacccccacctattgaccgtcataaatcatttgatgatgaagaattctccaagaggcccacaattgtgaagaagactgtaacagctcctgcaaatgtgaaatcatattctattgctgaactgcagattgctactggcagcttcagtgtggatcaccttgttggcgagggatcttttgggcgtgtttaccgtgctcaatttgatgatggacaggttcttgcagtgaagaagatagattcatctatccttcccaatgatttgacagatgattttatacaaataatttcaaacatctccaatttacatcatccaaatgtgacagagcttgtaggttattgctcagagtatggacaacacctcttggtctatgagtttcataaaaatggatcactgcatgacttccttcacctatcagatgaatatagtaaaccattgatatggaattcccgtgtcaagattgctttggggactgcacgtgctctagagtacctacatgaagttagttcgccatcagttgttcataagaatattaagtcagccaacatattacttgatacagaacttaatcctcatctttcagatagtggattggcaagttatattccaaatgccgaccagatattgaatcataatgttggatctggatatgatgcacctgaagttgccttgtctggtcagtatactttgaaaagtgatgtctacagctttggagtcgtcatgttggaacttctcagtggacggaacccttttgatagctcaaggccaagatctgagcagtctttggttcgatgggcaacacctcaactccatgatattgatgcattggctaaaatggttgatcctgcaatgaaagggttatatcctgttaagtctctttctcgatttgccgatgttattgctctttgcgttcagccggagccagaattccgaccaccgatgtcagaagtggttcaagcactggtgcgactagtgcagcgagctaacatgagcaagcgaacatttagtagtagtgatcatggaggatcccaacgagggagtgatgagccagttctacgagacatctaaatcccaaagcaaatgtagttatatttttctcccaagctagttcggttatttgtaatataatttccaatagttgcaaatttgaattgatgggttccatattctgttgatacctatgtaaacctgtccaaatcagcttattacaatgacagtaacggttgcactggcaatgtaaccagcctttcacactaagtaccaacgatagatgacaataaaattcaatagaggacaatactaactttaaatcgag

SEQ ID NO: 2445 - DNA, 2672 bp, Glycine max
cggcacttgtttgagcctaaaacgcacctccaaaggacactctttctccctcactcacttaaaaactcaacactttcccaatgggttgcacggcgtccaagctagaaaacgaggacacggtgcgccgctgcaaagagcgccgccgcctgatgaaggaggcggtgtacgtgcgtcaccacctggccgccgcccattccgactactgccggtccctccgcctcaccggctccgccctctccaccttctccaccggcgaacccctctccgtctccgaccacacccccgccgtcttcctcaacaactcccaacacctccaacaccaacaccaacaccaacaccagcaccaaccttctccttctcctccgccgccgaaactcgaccccatcctaccccgccgccgcaaaccaccgccgccgaagctcccgcacatcctctccgactcaagcccctcctccaccccaagaagccacgtgtcaaacttcttccccaccgcacattctacttactcctccaccccttcccaaacctcctccgtttggaactgggaaaatttctaccctcctccacctcctcccgcttccggttacttccccgaagaacaacaacaaaaattctcccacactaaaacacaaacaccttctcattactctcacaaaacacaaacaccctctcattactctcacaagacacaacaacacaccaatctccaaatccacgacactgattctgagagatctgaatacgattacttcgacggaaaactcgaaaccgagaatgagaatgagaaaactgattctcattctcatcatcttccggaggagtatactgaaactgagagggaagaagttcagtgtagtgaatggggggatcattatagtaccacgagttcttctgatgatggtgatgatagggtggagggggatgtggagtcgcgctccgagatcgggacccggtcgaatttcgggtcgtcggtgcggaccgagtcggtggttggtggcggtggggcgaaggggttcgacgcggcgtcttcggtggcggcggagatgaagatggttgtgaggcacagggacttgagggagatcgtggaggctattaaggagaatttcgataacgcggcttccgctggggataaggtttctgacatgcttcagatcagtaaggcgcagcttgatcgcagcttcaagcaattgaggaaaaccgtgtatcactcgagtagcatattgagcaacttaagctcgagttggacctcgaaaccgccgctggcggttaagtaccggctcgacaccggttcgctggatgaaccgggcggtccaaagagtctctgctccactttggaacgccttttggcgtgggagaagaagctctacgaggaggttaaggctagagaaggtgtgaagattgaacatgaaaagaaattgtcagcgctgcagactcaggaatacaaaggagaggatgaagctaagatattcaaaaccaaggcttccataaataggctgcagtcactaatagctgttacatctcaggctgtgtctaccacctcaactgccactattggccttagggactctgatcttgtccctcagcttgttgatctcattcatggattcatgtacatgtggagatcaatgcaccactaccatgaaattcaaagcaatatagtgcagcaagtccgtggtcttgtgaacagatcatcaagaggtgactccacttctgaactccacaggcaggcaactcgggaccttgaatcagccgtttcagcttggcacaacagtttttgtcgccttataaaatttcagcgcgaattcatcctgtccttgcatggctggttcaagctcagccttgttccagtccacaatgataacatcaacggcagggaaacctctgaaacataccaattttttgatgaatggaaactcgcacttgaccgtgtccctgacacggttgcatctgaagccatcaagagctttatcaatgttgtccacgtgatatcttccaagcaagtggaagagctcaagatcaaaaaacgaaccgagactgcatctaaggaacttgagaaaaaggcttcctctctgcgaaacctagagaggaagttctacagctcatattctatggtaggcattagccttcctgattctgcacctgacaatggacaagtgttggatgcgcgtgacccacttgctgagaaaaaactggaactggcaacctgccaaaggcgtgttgaagatgaaatgctgaggcattcaaaagctgtggaggtaacaagagccatgaccctcaacaatttgcaaacgggcttgcctggagtgtttcaggcactgaccagtttctcttccttgttcactgaggctcttgaatcagtgtgtacccgttcatatgccatcaagtaggtgaggtaattcatttgttctgcatgggatctaagttcttcataagggctgggggattttttggcggcaagctcttattgctctcactattttgagttatattttgaaatgtaaatatgaagaattttggggttccacctattttgatggaaaagggaattttcttattgtacagggaaatttcttggtttattgtatcagaggattgcaatttttagtatatcaataaattatacgcattgtgctttcatgttccatttatgttccaaaaaaaaaaaaaaaaaa

SEQ ID NO: 2446 - DNA, 1576 bp, Glycine max
ttttttttttttttttttgtatagaagatgcgatcaaagaagatattaataattgtgtaaattacataaagataaaccttatcaacagtgcatacaaatgttgtgcacaatggtaaaacaaatgcagacaccaggatttcaaaaggagacaattcaggtttgactgggcttactacagagcaatgagtgggtttgactgggcttaaccaattttccatatatctactaatatctacatcgagaacccttatttaattgataaatattagtagatacgatagtaattaacagaacaaagtattcgagaaagcacaaattcctttatttatttcttccttcagggttcgggttccatattagcaataatgcagcattcaaataaccatataacacagatgacaagctaatgccacatacaagataatccagatccagatgtctcaattacaatagtcctgctcccatcactgagaattcagcctctgaaaatccaccaactggtaaagatcacctcgcctttgcttagttacaggcagatttgtccttctctgctccaatattgaataatcaatttctgctatgatgattgcctcctcatgttctgtagtagccagaacttctccaaatggtccaacaagagtggagtggccccaagccacataaccagatccagtatcccgggcaggtgaacaggtagccacatataactgattatctgtagcccttgccctctgcaataactcccaatgtaatggtccagttgtcatgttaaatgccccagggtagcagagtaagtgagcacctctagcagcatatatcattgctagttctggaaatcgaatgtcataacagatgcctatgccaatgcgtccaacctctgtgtccacaattgtcggagtctccccagcagtaagagtttttgattcaataaaagtaatcttcccagggatgtcaatatcaaaaagatgtatcttgcggtgcttggctagtaggtttccgtcggtgccaaagacgcagcaagtgttgtacaagagacctccagagcgttctggaatggaaccaccaactatggtgattttcaagagacgagagagttcagatagcatggcagtggaaggagaagcaccagcgtcaatatcctcagcgtagacaggaaaactatcgttggaataaggactgttccaaatttcgggcaaaagaacaagctgggcgccctttgatgcagcatcctgaatggcggtgcgagcgtgggcgatgttgctgtctttgtcggggctgacggagagttgacagaggccaattttgaagttggagagagggggagggggcaagggaatggcgggaggggcgcgtgctcgttcggagttgacggatgtggcagacatgattggatttcgagagtggtggattcggcggtggcgggggtgggatggacaaagaaagggggggaagaaggagttggaagtgggagaatggcggctgagagtgaaagatttcaagttaagcagtgcggatgctttcatttctgattccggaaatctaaaccctccgcttcgctcgtcgctccgccgccgta

SEQ ID NO: 2447 - DNA, 1998 bp, Glycine max
aaccaaaataatccattcaatgattcaaccgaacaatcaacaatacattgcgtaattttgataacatagtcaccaaacaaatgaaccatcttgttacaatgcaacatcaaattcaatgcccaaagaacaccacagatacatacatacacacatagaataacttttccttccctcaaccttggtagttttttttttttttttttgtagctcaatatgtttcatcctcattcaatttattgagattgagaatatactacatgttacatccagtaaaatatcacatgagactcaattcatacaaacttatagacttgtagtagtaatagtagagggtatatcaagaaatcaaaactaaactacttcacttgcgatcgacaaaggtaaagcgcaatgaaaacactacctgccgacccaaatttgaatatcaaacatggaacaagaaagtaaacaaaaagagacagcaaagatacctaactaaagaaagcaaaaaactgacaagagattgtgaccctttctgaataccagacaaacactttattagcataaaatcctttaggcattaggtttatgcaatgcaagtatttgtttcagattgaggttactcctttaggcatgccttgcctgaaaatccttcatgaaagccaccaacttctcaaccccagccaagggcatggcattgtaaatagaagccctcatacctcccactgatctatgtcccttgagctgcaccatcttctctttagcagcctccttgataaactcaccctccagctctgatttctccaaagtgaaaggcacattcatcaaagatctcacagacttctcaacagggcatttatagaaccctttgctgccatcaattgcactgtagagaatctcagctttcttctgattcttcctctcaacctcccccaacccaccttgctccaacaagtcctcaaacaccaacccacacatgtaaatcccataacaaggaggggtattgtagagtgaatcgttctcatcatggatcttgtaatcaaacatcacaggcgtgacaccctgtgcattcccaatgaggtcctttctgatgatcacaatggtgacaccagagggccccacattcttctgggccccagcatagataaccccaaaccttgacacatccacaggcttggagcagaaatttgaggacatatcagcaaccaaaacaccactcttgggaacagggtagtccttgaactccaccccatggatggtctcattggcacagatatgaagatacccagaattgttgttctgctccaaatcgtgaaaagatgggatctttgtgtacttttcgggtttcccagaccagatcacggtgggcttgcagtacttctgcgcctccttggcggccttgtcgctccaggagccggtgacgacgtagtcgacggcggagtcgggggaggagcagaggttgagggggacggcggcaaactgggaggtggcgccgccctggaggaagaggacggagtattccggagggatctggaggagggcgcggagatccgattcggccttttggattatggagagaaactctttgccgcggtggctcatctccatgacgctcatgccagatccgtgccagttgtagagctcggattgggcgcggaggaggacgttttccgggagggtggcggggccggcggcgaagttgaagacgcgatcttgggagtgggtgaggggcggagcttgggtgtggagttgggtggcgcatttgatggatgtgggtttgaacttgaaggaggaagaagagaaaggaaaagaaggtttggtgcggttttggaagaggccggtgtgaggggatgttgttgccattgacatggttatggttatagagagtttggtgttttctttttggtaatggaaatgaagaatggaggaggtagctgttgctgtttgttgtggcgacgcgcggggccacgccgggggtggatttatattgagacaattattaataaaaatacttgaagc

SEQ ID NO: 2448 - DNA, 1006 bp, Glycine max
aagtctcaaaacaccaacccacacatgtaaatcccataacaaggaggggtattgtagagtgaattgttttcatcatggatcttgtaatcaaacatcacaggcgtgaaaccctgtgcattcccaataaggtcctttctgattatcacaatggtgacaccagagggccccacattcttctgggccccagcatagataaccccaaaccttgacacatccacaggcttggagcagaaattagaggacatatcagcaaccaagacaccactcttgggaacagggtagtctttatactccaccccatgaatagtctcattggcacagatatgaagatacccagaattctcattcagctccaaatcgtgaaaagatgggatctttgtgtacttttcggatttcccagaccagatcacggtgggcttggagtacttctgcgcctccttggcggccttgtcgctccaggagccggtgacgacgtagtcgacggcggagtcgggggaggagcagaggttgagggggacggcggcgaactgggaggtggcgccgccctggaggaagaggacggagtattcaggggggatctggaggagggcgcggagatccgattcggctttttggattatggagagaaactccttgccgcggtggctcatttccatgacgctcatgccggatccgcgccagttgtagagctcggattgggcacggaggaggacgttttccgggagggtggcgggaccggcggcgaagttgaagacgcgatcttgggagtgggtgaggggcggggcttgggtatggagttgggtggcgcatttgatggatgtgggtttgaaggaggagagagtgaaagggttggtgcggttttggaagagggcggtgtgaggggatgttgttgccattgacatggttatggtgatcaagagtttcgttgagtttctggcaaaaatctgaggccgaaggagggagtatttatgttgaggcacatagaaacgcgtgggtcgacccggga

SEQ ID NO: 2449 - DNA, 1397 bp, Glycine max
  misc_feature (4)..(4): n is a, c, g, or t
  misc_feature (28)..(30): n is a, c, g, or t
gtancgatcctcacgcaccaattgttcnnnacataggatttgccgaatgccaatgcgagagtactccgaaaaggttgaatattatcccacaaaataaatcagaattcaaaataatttacagtaagccatggttgaatatgatgagcccgcagaaaagatctacagtaacgaattcttgatctaacctaacaagtcaatacatatatatcatcatatcaaccagtgaaactgactcccagcaggtaagacaaccgtaagaatctcggatgaatgtgacggcaaatccaagcgctcattctgctgctcagtttagccaccatgcctacacctgcttctttctcttcttaggtcttctcttcctccgtggcttgtgagcatcggagttggagcttagactactaccatgaccagtccctgatcttgagggtcttactttgaagtctgagctgcttttgctatttgatgtgttgctcgatgtggaaatctcagatctctgcgcagatgaattatggccagaagaagacccaaatcttgacaacttcatgtttgaaggacgaggaggaggcatcaaagctctagcagaaatctgcctctgatttttttcgtcactggacatgccagacacacctttcccagaagcactagaagcctgctctcttgcacttttgtctgtccattcatcatccgcatctgcttcgtcactagaactcccggcaaggaaaaaatcatcatcactcagatccaaaagaccatcatcctcactgccagtctcttctaaatccttgccacttgcagcagctgcaaccaacctatcttcaatctgtttgcgcagcccgtttctccggtcaactatctccgaatcatcaccgccggtaaacaaaggcacatatttctcattcttcggaaagtacatgacatattgaagatcctttttgagagaggaaagctggtcagagtaaggttgggcagaggaagaagaggaagaagaagcacggtgcagtttctcgaggcgtctgattcgtctttcgattttcctcctctcgaagaacttgatcttccggtcgcgcaagaatatcttgcgttcggcggcgaggcgcgtgtgaatctcctgctgcttcttcagtgcctccaacttttgctcctgcgcctcgcgcacctcgggaggcaggttcttgcggagcatgcgctcaagggatcgaatctggtttttgagggaaacggagggtttggacttcttggcgatgccgagaggcttggagttggatctacgcgttgcgttcacgcgccgcttgctgtaagcaccgtgagccataactgtctcaaagctggtttctctcctgaatctgttttgcttgttgtttgtattgtgccgggcgcctgcccttacactcccaaac

SEQ ID NO: 2450 - DNA, 1324 bp, Glycine max
  misc_feature (50)..(50): n is a, c, g, or t
gcacatcaaacaagacatgttcattctcatgcagttggtaacaatgctgncaacatccaacacattaacaaaaaagacaatggcaagttcccttaacaagaaaaggtcgagttctattcctacaatccaagaacataaaatgtacccaagtttaaaggtatggcgaatgttgccacgtccatcttcaaattgttctataaatcatataaactaacttccgagcatatattggtggtgacaaaattgacaatgagaaaacaagacactgacgaacactcttattagacaaaatacgggacagcactcattagcatttgacaagggtatgccgaagggtcttgtcccaactttcaatgttgaaacacttgaatcccgtaactgaatctgaatggaaccgaaccaaaaaatttcacatgaaatcataatcatccagagcatcatatcgatcagcaggaacaaaatcctcatcaggtttatcgacattaagttgctttttcttcccacctatcttctttttaccagcattggcttctttttctgcctttatcttctcgtttgcaatggcagttaccgaagatgcaatatctttggcatctgccccttttagagatatcgttgatagtctcattactgccttcagcaagccaatataatgataacttttctcaaaagctcggagcttgtgtgagatgagctctgcatactccaagaaatcactctcagatttgggtatgaaagtgtcaaggttcttttcatctttttcttttcccccactgaacaattctttagtggccttataatctgcttcttcgattaatctttgttggcgaagtttttcagccacaggatctaatggttcttcctttattggttctactgtcttacccttcttttcagtggctttatcagaagattttttgggagccttttcagtagtttttacagcaggtgctgcaggtgccggagcaggctcgtcttcatcctcccatgattccttcacatcattttcatccacatcttcatcatcccaattacttttaactggatctttcaatgtaagatcaataggggcaatatgctcatcctcccaatcatccatttgttatcacttcgtcaataaaacagaataactgagctcccgctaacaaactggcgagcgacgaaggcaaaagcgttgatcggaattaggggttagagcggtggagtgaaagattccgatttgagaaattagggcacaaaggatttggactgtgtgtttggtccggttggggaatataaactgccgtcccccttctgtctcttctcgcagccgtcggacgcgtcg

SEQ ID NO: 2451 - DNA, 2097 bp, Glycine max
aagacaattggctgttttaccatttggaagacaataggcatttatttcctcttgtttgttctgaacgaatgttagcgatttattcaatttaagttgaacaaacaaagtttgagaattctcagtgccaatcgaggccttcttttgttgcttttctcgcgcgaataatttggaatttcatacaccatcgtcatgcaatgagcatcggcttatatgtctcgaggggtaatgtcttttccaaaaactgatcctataaatcctcaacactggaacagtgccctttcccgatttcagtctggcttttaaacgagaagaaaaagaagagtactagccatccattgacaggcagcaaaaatgtttaatgctacagaataaatgaaaaagaaaaagaatctcagctgtggactcaatcactaagaaggagccgagaagctgaacctaaatccagttttcccacgatcatgctcattctgcttgagtatgtaatagaaattaccctctaggcgaaaaagtctagtgggaacaacaaatccacatcccacagatgttcgaaaggattctaagaacttccgaggtgaaaagtgcttatattcattctgagttaatttagcagtattcccagcaccagcaaaaacatgaccatgaattccatgatctctcaaccacctaattggaagatcaaaagacaggtctgcaaatgcagtaacagctagatctcctccaatgaagtcccatctagaggaatcatcactgtcatcaataattccatctctacttcgtcttcgtggttcagtaggacctaatcccctagttttaaatccccacaatgttattggtcctccaagggtgcaaactggagagaaatcaccacccaaataaaacctttcaggaagcggagatggcttgttcatgaagccatgcccccagggaaaaacagcactggcagaaatcccaaggttaagtgccgtattataaaacccaaaggggatggcacagcgaacatcaaattcctggcgcagaaatcgcaagctccgatgatctggtgtaaggccaccaaagtgagtggtagaaagaaaagcatatccatttgtaggcctaattggtgagtttctcctgtcaattttaaatgtatacttcaaggatgatagtaaaccatgcccaagttgcctccttatagacctggatgacatttgtgatggatcagtcaaggtacgccatccaagagtgtagactaagtcatggtgccttgttgagatcaagccaagagacaagcctagcaactgctctttatatgaagagaactcttgccaatcttgagaaagcatggatagtcgtgctacaaagggggttaacaatcctttcagtcgaggggcatacactcctacacttacctctgttgtttggttggcaccataggccaacgaggcatcccatagatcaccataacctaataagtttttgtacttaagaccaccttcagcagaccaagaactagtcgcgggtttggtgtaaacgccgaaatcgccggagattctgttggcggactcgacgacgtcgacgacgacattggcggtgtgaggcagctccggcggcccggcctggagcgtgagctcggcggtgtcgaaaatctcgaggccgcggagcctggcgagggcgatttcggaggcgcgaatgagctcctgcacgttggtggcctcctcgaggagcttgagctccgcctcgatcacccactccttcgtcttcgtgttgccgcgaatcagcacgtcgtggactcggattgggaccagctccgacgccaatcgccgggacagggtttccagcttcgaacgctgctcgcgcagccgcgacaatggggattgctcctgcgaaacgacgccgtcgtcgtcgtcgtcgtcttcctcctcttcttcgtcttcgtcttctggctcttcgatgtcgtcgtcttcttcttcggcattgttagggttttgtggagagaagggaagttgctcgtctgagttttccattgatcagattcggaagcagtttccttggtgggctgaagaggaaggaagtgtgagtagaagcaacgcaccccccttctgtcgtcttctcgcagcc

SEQ ID NO: 2452 - DNA, 1448 bp, Glycine max
ccggccccggctttggttcctcattacttctttgatccacaatatttcaaaatcctcactctctctcttccactcttttgctgttcccctttcccaattcagctacgtaggccccccccctttccgtgattgatacaggactcattgacttgatagcatacacccgtagcaacatgagggcatggcattagttaagctagataaactataaaatgctgtcaactactgccgctgctcagcttccaagttgctgatagccgaattcccctcagaaacttctatggcctaagtcttcctcaaacccataattgcagcaaagggaaagaaagcaataacagggctagatacaattccaatttaaatcagaaccacagacatttattatttctacagttcttccctgacagtgacacagaagacagcaataatcaaaatccaagaaccagaaaccactgtcaacatcaagtagatgaacaaagagaattcaaggaaaataaagaggccaggttgcttttctcaaacatgtggtgggtagatgtgaaagcagcacttggccaaagaataaatttggagggcattctatgttcaactatggtgatcttaaaagacccgaaattggcaatgccccatatttctgttcctgatataaggtatgttgattgggctgagctgcgtagaaagggatttaagggtgttgtctttgacaaggataatactattacagcaccttactctttgaagtcctggcctccacttgagtcttcattggagtgttgtaaatcggagtttggtcatgatattgcagtatttagtaactctgcgggacttcatgaatatgaccatgacggttcaaaagctaggatgcttgaaggggcaattggaattaaagtcataagacatagggtgaagaagccagccggtacagctgaagaaattgaaaagcattttggttgtgaagcttcacaattaatcatggttggtgatcggccattcactgacattgtttatggcaatcggaatggatttctaactattttgacagagccattgagtcttgctgaggagccgtttattgttaagcaggtgaggaagctagaaacttcatttgtaagtttctggtctagaagagggttggatccacttagccagaagttattgtcagatccaaagccatgtgtcaaagagccatatcattgacaagactaatatccaaacactgcacaattttttggccatcagaagtactgctttttagtaaagtaatgccctttagttaagtaatgcatacatgtcaatatattttttttaaaagcctatctagtttattttttaccccatgttaaatacatatttctctgtcctttatctggtaaagttatctcctcagcttaaagcgtgttttttttgttaaacaacactaacagtaacacaccctcttcaaccagcta

SEQ ID NO: 2453 - DNA, 835 bp, Glycine max
  misc_feature (816)..(820): n is a, c, g, or t
  misc_feature (824)..(828): n is a, c, g, or t
aaaaggaattgtttttttataaataacatgagaatgtgaaagaaatttgagtatattgaacataaatttctaggttgagggtgttaaagcgctatacattcagccgagctacacttagacttttggcatggggcaacctcctcactggatttcttgtcacagggaagatcaaattagagcctgaaaatttgccatacaaagggataactgctggtgctggaaaaggttaaagaagctacttgaaccaaggattctcctagtgtagttttaactacaatgaactcagcaaagcaaggaactctgagggttcctcattctctttaacaaccttgatgactgagttctttggcaaactaaaccgagcaaggagatcacatccaatttgattccagtcgacagctcctacatctgattgtttatcaatatctaagtgaacctgtgaagcgtcacaactgaaagacctccctacccaaatatataaaatgttccctgcatgtacatgcatactgggagagaatatgacaaaagcagatttagaatccaaatgacttgcaccaaatgtctcaatcttttctatactgggccagtgatataccgaagtctgtgcgacattatactgcagtaagccactgtcattagttcccttcaatgtggtagactgactaagtgatgattccttgaggtgcatgctatcagcaatgcttggctcacacttttgaatggaattcacacctccatccttggcatggttgttagacccgcgtgccgaatccggcccgtcgcctcgtgccggatagctaacattgtcattaacannnnngtcnnnnncttgact

SEQ ID NO: 2454 - DNA, 1861 bp, Glycine max
ccccaacctcagctttcgactcgttaggagtttcacaacgcagctgcgcacagcacagtcctgaccctcccagaaaaccctaatcagcgtatcgaatagttggaatctccaattcttgtctttatctcttgaccagaaaaaatgtgcgaagccgtagaaattgaagaaaggcccaaatacaaagatatcagacgctattactgcgagtactgcggtatctgcagatccaaaaaaacccttatcacctcccacatcaatttgcaccacaaggaagagtatgaaaaagcaagagctgaaagagatcccgaagcagaggcttcgaaatcgaacacttgcgaggaatgtggtgccactttcaaaaaacacgcctatttgttgcagcacatgcaaagtcattcacttgaggtatttgaactcttgattaattattatttaagaaaaataagttggatacagtcaaactctaaaagcacataagaaaactgtatttaaaagctatgtcttatagaccgttgtgttccttgagaaacatttgatttgcggaagacaggctttgggttgtgacttgattgtgctagttgttttatagactgaagatacatattttgcaggaaagtaatctataagtttctaaaatcattggaaaattatgggttaatagtgtgaagcattggatcccagagaaagatctccaaaatgcgcgaggcagcatatatggacttgatggattagtatcaggtagggtgacctcctgtgaagctccatcaaggatgcctcggtcacgctctgtccaaaattgagaggccatttgtgtgtgctgtcgatgattgtcaggcaagttacagaagaaaggaccacctgactcggcaccttctacagcatgaagggaagatttttaagtgccctgttgagaattgcaacagtgagttctctttgcaaagcaatatgaaaagacatactgaggagattcatgatgacagttctaccactaccagtagtgacaaaagtcacaaacagcatatgtgtccagagattggctgtggaaaggtttttagatatgcatcacagctacaaaaacatgaagattctcatgttaatttggaatcagtagatatggtgtgcttagagcctggttgcttgaaacatttcactaatgtccagtgccttcaagcccatgtgaagtcctcccatcagtatatgacctgtgacatttgcgggacaaagcaactgaagaagaatattaagcgccatcttcgatcacatgaagctgaaggcagttcatcagagacctttcaatgcgagtttaagggttgcagctgcacattctcaagaaaatctaatctagacaagcataagaaggctgtgcactttaatgtaaagccttttgcgtgtgggtttactgattgtggcatgagatttgcttacaaacatgtgcgagataatcatgaaaaaactgctaaacatgtttttacccttggggattttgaagaagctgatgaagagttcaggtcaaggccgaggggaggaaggaagagaacatgtcccactgttgaaatgttaattaggaagagggttaccccacctagtcaattggaacattggttatttatgcaggatagtgagtagagtgcatttagcactctgtgctcctaatactagtaggtaaaatgtaaatttaacatgttgacacgagtatataatatgtatacagtttggattattgttaacagatatataggatttaggacaacaacgtgtaataatgattgatgcttatgagttatgacagattccatagtgtagcgaatctattaaccgttgtaccaatttgcaatttaaacaactgcatttgtttttaagc

SEQ ID NO: 2455 - DNA, 1710 bp, Glycine max
tgtttttgttaaggctggatccttgctggatgttgacagtcacattctttattctccacttccctgccgtgttcccttgcctgggtttgaaagcttccggttttgcttttcacaatatgatgagaaagacagaaatctcctaagaaacttgtgctttcatcttggagctaaatatggggagaagttgactaagaaggttacccatttgttgtgtaaattcaccaatgggcccaagtatgaggctgcttgtaaatgggggattcaatcggttacatctgaatggatatttgaatgtgtcaagcagaatggagttgtggccattgatcagtttttaccaaaagaagtcactgctcaagaccgagatgcaggaatttgcactgtgagtcaatttcctacccaggctgttcaaatgataagtgacatgccctcccagttgtctagtcaatcacaaactttgagaggcacgacaaataaaaatgtcagttgtggagttgataatcatgagaccagttttaagataccaagtaattatagcaaaaaggcaagggcttgtggaggaacccttgcctatccaataagaagccttcagcttcaaattcaggtattcatgctgatgacaagaatttttccaaagacaatatgcttatagatgcccggggaggccttttcattgctgttccagaatgttgctgctgcaattgaggacttgttagagcagactagtaagatgcatgatcagaggtccccagcacagactgggtgtgagagaagtatttacccatctgatcgctcagtccttagtgaagataattccaatcctcatactgtctttggattatctaaacactggttaaacagaagtggaagaaaagatgataatggggaggcttctcaagacagaagagcaggaatatatgatggttttagtgaaacacagacagaatctcaggttgttagttatgaagaagatttatcaggaaggcaaatgcttatagatagagtccgaactcgaagtagcttgcagtgaatggaaacacaaacagaatctcaggttttatatcttttggacattggcaaggttgttggttatgaagaagatttatcaggaatgcaaagtccgatggcaaatgcttatagagtccgaactcgaagtagcttgcagtgaataggaacaagaatctgtcatgtcctgatttcagaaacaaaagaaaaagaaaaaatcaaccttggtcagctaatgaagggaacatcggctgctgcttactatatagaaggtcaatattaattatatttgtcgtacctacattgttggaacaagttgagtctgatcaaataagtaacacccttaattccatagtgtaatagtgttttacagtaatattgtattgtcttatcagaccacatgaaatactcttatttataatgaagaaggtttacaaaaaaaaaaaaaaaaaaaaaaaaaaaaaaaaaaaaaaaaaaaaaaaaaaaaaaagaaaaaaaaaaaaaaaaaaaggggggggcgcccccctattaatttggtctaccccgaccattaaatttaatcaccggacccttcaggggagccatcttaccttttgttaaggcgatttaaataaaggcttgccaaaggaaataccatacccctgccctaaaaaaaattgttttccccttacaattcaacataaaatccggacggaaaaattaaaaagc

SEQ ID NO: 2456 - DNA, 2179 bp, Glycine max
aaacccaaaaactttgaaagttacataaaggcaaaaatagaaaatattctacattacacatgatgaaacgacatggcttgtttgttaaaatgtgcattgggatgcgcaacggtaacctgatcataaaaatcgccaatatcaggacattatcatttttgtaatcatacatctaatacaattcatgaatcaatctataaactagaacttaatgtatgaaaactaagaccacaaaaaattatgcatattgtatcttcaggagcctcgagccatgtatgaacttcctcaaacttcccctttaaacttggcttcatacaactctggttgcatgaagacagctgaaattaacctgcgtgcaaaccatctcatgtgcattgcacgttgagcaccacttgccgcttccactgtatcaaaccgcaaatacacaaaacctgaactttttttgtcaacaaaaatatgcttcacccggccatatttagaacactcttcctctacatcctctttaatgtctatatcaaaatcaggttccgtctcagtgctcgggtcgaacatattctttaaaagtaaacagtcgctggggtttcctacaggttctactgctggattaggcataacttgcgttggtagaactggtgcaccaataggcaagctgatagcctgctgagcaggaactgagccattcacaacaggcaaacctatgcttgcagggtctgcgccagccagcctctgcataagcaatgctcttgagtgagcatttaaagtcaatccaccttcatcgtcatccaagtctgcagattttgcggttgcatcttggcttgcaacatgatctgtgacacatgaaaccttgatagttctgccagcaatctctaattttccatttaaactctgagcagccttggcatgttctagtatgagtaaattgaacaaacccaaaacccttgcagtgtcctgtttcctagtcatagaggcagttgcactatctcaaccggaccaaatggctcaaaaatctcccgcagctgactctcagtcatgttgaagtgaagatttcccacatacaattttctgtccacagctccatagggcccagttacaccggctgctccaccagaagcattagattgaacaaggttcttttcagcttcagaaggtttcaccattacaggttgtccaagaagaagttggccagagagagcaatagccattggcactgacatcgcatcataaaattcaatatacccgcctcctcttcatcgtcttgcatcaagtttaccttgagtgtgcagcatgaattgattaaacatgagtgcaaggtattcccaccatccctcatcattatcgcattgccaactcctttagatcgtcttgagttcctatccatgatcagacggacatctctcaccttgccagcttttgaaaagaactcatacacatctctctctgttgcttttagcggcatctggtaggcaaaaacagttctctgatccctttctgggtctgcctcaggttctgcagcctcttttttatccctaaatctccggccatcgcgcatatcaaaatctcgctccctatctctgtccctctcggagcggcctcctgctccttgtggatctctccctctccgctctttccctctctcgctccctatccttctctcttctctcgcgctccttttccctatccctatccctatccctgtccctatcacggtctctcctatccttatccttatccttatccctcctctctctatccttatccctgtctttcctctctccgtctctctccctctcgctcctgtgacgaccagaggaacgttcgcggtcacggtctctctctctgtctctgtcgcgatctctcttggaaccgccgttctcgtcgtcgaccctagacctcttgctctttctgtcatcggcgtcgagatcgtcgtcgacgtcgcggggctttcggtaactcctctcgctcttgtcggtgacgtccttcttcttcttggaggaatctatgtcttcctccactgtcttctccaggtattcgtactcgtcgaagtccattggttcctccttcttcttcagctgaattctgaatttctagggttttagggttttctttactctctcagtctttcctggggctcgagccgcatcccgaaaacccatcttcttcagctgaattctgacggctcgag

SEQ ID NO: 2457 - DNA, 817 bp, Glycine max
ttttttttttttttttttttttttttttgttcaaaaaggactggatacagtattatttgaggaaacacataatatttacttttgcatcttaagcacaagcattgccacatttcaaaactgatctgaaatataattccttgcattaaccacagcaatcttaagactaaataagcaaagactgtaccataagaaaactgcaccgcagtctattgtttaatggtcaataaaaattaaaacctctggtaaaccccaaagattcactctcagaagataaaatcactcttcaacaacattcactaattcatattcaactaacgaaagattgttatcctctttaacttcaaattttgcagggtctgtaggctcaatacgcccccatttatcaactgcaagcctcatagatcccttgaacatgtcaatctttgcattacgcagaattacagttgcgccagcattcatatggtccacctgttcgttgcgtgctgtgaagattatggttccggtttcgtctccgacgaggcactcggcgatgcgcgacgggcgcgccgcgagcaccgacgatcgaccgccgcgagtggtcaccgtcttcaccggcttggagctgaccaccttcaccgtcagcgtgtggccgttggtgccaggttttagctgatccaccttcacgaacaccggttttctcttcgtcgtcgttggtgtcgccatggattcttagttcgtgtttctgcttcgcgtgagagagaagagaatcaatcgaatcggaatcgatcacgcaattataagttaaaccctaaccctagtttctttctgcttttgattt

SEQ ID NO: 2458 - DNA, 1909 bp, Glycine max
tcgagaagacgacagaagggggaggctactgaaatcattacttatactagttttctacgattattcatagtgaggcaatagtagcagcaattcacactggtctttgcttctcgttactcatttctcacctaactttctattcttctcagtctcagatcagaaccttagccatggcagcgttccagaagatcaaggtcgccaaccccatcgtcgagatggacggagatgaaatgactagggttatctggaagtcaatcaaggacaagctcattttgcccttcttggagttggacatcaagtattatgacttaggccttccttaccgtgatgagaccgatgataaagttacaattgaaagtgcggaagcaactctcaagtataatgtggcaattaagtgcgcaactattactccagatgaagctcgtgtgaaggagtttggtctgaagtcaatgtggaagagtccaaatgggacaattaggaacattttgaatggaactgtcttcagagaaccaattctttgcaaaaacattccccgccttgttcctggttggacaaaggcaatatgcattggaagacatgcgtttggtgatcaatatcgggcgactgacacagtaattaaaggagctggaaagctgaagctggtgtttgttccagaaggccaaggtgaggaaactgaattcgaggtttttaacttcactggtgaagggggtgtttcattggctatgtacaatactgatgagtctattcgttcttttgccgaggcttctatggcaactgctttagagaaaaagtggccactttatcttagcaccaaaaatacaattctcaagaaatatgatggaagattcaaggacatatttcaagaagtttatgaggcaagctggaaatcaaagtttgaggctgctggtatatggtatgagcatcggctcattgatgatatggtggcgtatgcacttaagagtgaaggaggttatgtatgggcttgcaaaaactatgatggagatgtccagagtgatttcttagctcaaggttttggatcactaggtttgatgacatctgtattggtttgccctgatggaaagactattgaagcagaagcagctcacggcacagttacccgtcattttagggttcatcagaagggaggtgaaaccagcacaaatagcatagcatccatctttgcctggacaagagggctagcccacagggcaaaactggatgacaatgccaaactcttggatttcactgaaaagctagaggcagcttgcattggagtagtagaggctgggaagatgaccaaggatttggcacttattcttcatggatccaagctgtcaagggagcattatttgaacacagaggaattcatcgatgccgtggcagccgagcttagtgcgaggctttctgcatagacttgattcaagacaagcggaaaaaagacgttagcaacaaggagcgtgcgtgcgtctgctactctcttctattcagaagaaataagaaagggaaaaaaagcattggtccttagccccgtttccttcatttgtttgttggttgggaatgcaagggttggctgtttcttctccataatattggttgtgaactgatttgtcctttgtaatttcttattgatcccttccaactcccaatttataatggattttctgctgaatttattttgcatgttttgacttattattattctgcaaatgccgttctgcagatagaaagttaaacatccttcccaatctttagtgggtcaccataataagtaccacatggccagcaaagtatgtaacttctaaggcccaactaactaacctctttcttgtttaggggttatattagattgagattttaaaagattattttataggaaaaaatcagttttatgataatataaattttaatg

SEQ ID NO: 2459 - DNA, 2440 bp, Glycine max
ttcacgcgttcttatagtcgcagagacctcggcgcgcgctgattaccaatccatcgtttttgaactccacataaggctaaactaaacacctctctctgcaaaacaaaaccactctcttccttccaacgaatctctgccacacaacaaataactctgaacatataatcaacctaagacccgcctctgattctgaacaacaaaaggctaatttggctcttttgacgacaatttttgctgacacctaaagcatctagcagcttatcaaaatggagactaaccatacagcaaaacggtgttgtaggactttagtatgcatttgatcaggagcagctaggaagcatttttacaattacaaagtttgaccactcattgttctgatcactgagtaaataatttctttttagatgcaaacttctaagaagcacccaacttcagctggtatccatttatacctgcagcctgcacaagatattgatccttacactcattaccaaatattgcaaagcaattcatgccatgataatagcagcagccagggaaccactatttcttttgaaaccagcaaggagcaatactttacccttgaatcatccccagcaatcaatgatctcataggttgtgattctccttcctatgctagtgtatcatccaataggagtcctttttctccacaagcttctcattcagaccagcatcagtcatcagacaacacctatggatcaccaacaagtgcacactctagatatgatgatgacggctacgaattgaagaacaagcttagagaactcgagatttcgttgttggggcctgattcagacattgttgatagttggcactgctcctacaagggtggccgccacagagcatcatctccaacggctaaacacaattgggatcagattgtggaaatgattccaaaattagacttgaaagaagtcctcattcggtgtgcacaagccgtggcagatgatgatattgaaacagcagtgggatttatgaacaatgtattggcaaagatggtatcagttgggggtgatccgatccagaggttaggtgcctacatgttggagggtctaagagcaaggttggagtcctcagggagcataatctacaaggccttgaaatgtgaacaaccaacaagcaatgatctcatgacttacatgcacatcctgtaccagatttgcccatattggaagtttgcttacacatctgcaaatgctgtcattggagaagcaatgctgaatgaatcaagaattcacataattgacttccaagttgcacagggcactcagtggctgttgcttattcaggctcttgcatctcgtccaggtggagcacctttcattcgtgtaaccggagttgatgattcacaatcatttcatgcaaggggtggaggacttcacattgtaggaaaacgcctctcagattatgccaaatcttgtggagttccatttgagttccacagtgctgctatgtgtggaagtgagcttgaactagaaaaccttgtaattcaacccggggaagctctagttgtgaacttcccttttgttttgcaccacatgccagatgagagtgtgagcacagagaaccatagggacaggctattgagactggtcaaaagcttgtcacccaaggttgtgacccttgttgagcaagaatccaacaccaacacttctccctttttccaaaggtttgttgagaccttgagttactacactgctatgtttgagtccatagatgtggccctccccagagatgataagcaaaggatcaatgcagaacaacactgcgtggctcgcgacatcgtcaacatggtagcttgtgagggggatgagaggctggaaaggcatgaactcttagggaagtggaggtcaagattttcaatggctggttttgcaccatgccctttgagttcctcagtcacagctgcagttaggaatatgttgaatgaattcaatgaaaattataggcttcaacatagagatggcgctctttatctaggatggaagagtagagctatgtgtacctcttctgcttggagatgttactgactcattgtcattgtcattggtatatgtatttttttttatccacaaatattatttgttagtaatatattagcttttattagcggggaatttgaacccatcacctctccccattcccatcattggtatatgcatattttcctccttgttaatttctttcctttttatgacattaagtcattatttagtggtatccgctgtttctcaataggattaattagagacttagctttcttccaacgtgtatcctttaccttttgtgggttcagcttagtctttaaactttcttgtacatgtcaatactagaaagaacgaaagagaaacctagctcatatttattgacatgccctgttttgcagtttttagagtatagtggttactcattttaaaaa

SEQ ID NO: 2460 - DNA, 2003 bp, Glycine max
cccacgcgtccgcccacgcgtccggcggaaatcattacttataatagtcttgtacgattaggcaccccgcggcaatagcagagcagcgactcacactggtcttcgcttctcattcatcatttctcacctaaccttctcttcctctcagtctcagatcagaaacctcagccagccatggcagcgttccagaagatcaaggtcgtcaaccccatcgtcgagatggacggagatgaaatgactagggttatctggaagtcaatcaaggacaagctcattttgcccttcttggagttggacatcaagtattatgacttaggccttccttaccgtgatgagaccgatgataaagttacaattgaaagtgcagaagcaactctcaagtacaatgtagcaatcaagtgtgcaactatcactccagatgaagctcgtgtgaaggagtttggcctgaagtcaatgtggaagagtccaaatgggactattaggaacattttgaatggaactgtcttcagagaaccaattctttgcaaaaacattccccgccttgttcctggttggacaaaggcaatatgtattggaaggcatgcgtttggtgatggaatcggtgtctaaatatctcaacattatcaggttggacaaaggcaatatgtattggaaggcatgcgtttggtgatcaatatcgggctactgacactgtaattaaaggagctggaaagcgggtcctcccgcgcgtccggaaggccaaggtgaggaaactgaattcgaggtttttaacttcactggtgaagggggtgtttcattggctatgtacaatactgatgagtctattcgttcttttgccgaggcttctatggcaactgctttagagaaaaagtggccactttatcttagcaccaaaaatacaattctcaagaaatatgatggaagattcaaggacatatttcaagaagtttatgaggcaagctggaaatcaaagtttgaggctgctggtatatggtatgagcatcggctcattgatgatatggtggcgtatgcacttaagagtgaaggaggttatgtatgggcttgcaaaaactatgatggagatgtccagagtgatttcttagctcaaggttttggatcactaggtttgatgacatctgtattggtttgccctgatggaaagactattgaagcagaagcagctcacggcacagttacccgtcattttagggttcatcagaagggaggtgaaaccagcacaaatagcatagcatccatctttgcctggacaagagggctagcccacagggcaaaactggacgacaatgccaaactcttggatttcactgaaaaactagaggcagcttgcattggagtagtagaggctgggaagatgaccaaggatttggcacttattcttcatggatccaagctttcaagggagcattatttgaacacagaggaattcattgatgccgtggcagccgagcttagtgctaagctttctacatagacttgatttaagacaggcggaaaagaagacgatagcaacaaggagcgtgcgtgcgtgcgtatgctgctctctatattcagaagaaataagaaagggaaaaagaagcattggtccttaccttagccccttttccttcatttgtttgttggttgggagagcaagggttgactgtttcttctccatattggttgtgaactgatttgtcctttgtattttctaactgatcccttccaacttccaatttttataattggattttctgctgaatttatttttttccatgtttttgacttattatttttctgcaaatgccgtgctgcagacagaaaaggtgaacatccttccgaatctttagtgggtcaccataatccataatagatacagcatggccacatggccagcaaagtatcgaacttctaagagctaattaagagcatctccaagaaggtttttcatgagtttaaaactaaacattatttatcaagtttttataataggagaagatgatttg

SEQ ID NO: 2461 - DNA, 987 bp, Glycine max
  misc_feature (975)..(975): n is a, c, g, or t
ggaattcggctcgacgagggcagcgactcacactggtcttcgcttctcattcatcatttctcacctaaccttctcttcctctcagtctcagatcagaaacctcagccagccatggcagcgttccagaagatcaaggtcgtcaaccccatcgtcgagatggacggagatgaaatgactagggttatctggaagtcaatcaaggacaagctcattttgcccttcttggagttggacatcaagtattatgacttaggccttccttaccgtgatgagaccgatgataaagttacaattgaaagtgcagaagcaactctcaagtacaatgtagcaatcaagtgtgcaactatcactccagatgaagctcgtgtgaaggagtttggcctgaagtcaatgtggaagagtccaaatgggactattaggaacattttgaatggaactgtcttcagagaaccaattctttgcaaaaacattccccgccttgttcctggttggacaaaggcaatatgtattggaaggcatgcgtttggtgatcaatatcgggctactgacactgtaattaaaggagctggaaagctgaagctggtgtttgttccagaaggccaaggtgaggaaactgaattcgaggtttttaacttcactggtgaagggggtgtttcattggctatgtacaatactgatgagtctattcgttcttttgccgaggcttctatggcaactgctttagagaaaaagtggccactttatcttagcaccaaaaatacaattctcaagaaatatgatggaagattcaaggacctttttcaagaagtttatgaggcaagctggaaatcaaagtttgaggctgctggtattttgtatgagcatcgactcattgatgatatggtggcgtttgcccttaaaaagtgaagagggttatgatgggcatgcaaaaactatgaaggagatgtccagaatgatagcttaccttaagggttnggatcacttggt

SEQ ID NO: 2462 - DNA, 2428 bp, Glycine max
aagtcataaaccaacggtaactaccccccaatccactgccaaagatattctcccgcgagaacatccttcgccgtcgccaccatttttgtcaccctccatcataccgggtcggttcgggtattgacgagacaactccacacacagagagagttgttggagttgttctgtctgaaaccgaaccacattccaaagatagccgttgtcattgtcagaaggagaagccattgcgttttagaaagcgataccgtgagcgacaacaatgcattgcgttagggtttgattatattacgcagatcgaggctcccgctgtgaagcgcattttgcaatttcaacaaataaataaataaaaatgggagaaaaatcgaggtccaaaggagggtgctgcggttggtttatcgcgtttatcattctggctctcgtcgtcggtgccattgtttttaccgttaagaagaaatttagtcactccggttccgataagcctgctccggttcccggtccccctggcgccgttgaccaaaaatattccactgcactcaaaactgcgatgcaattcttcgatattcagaaatctgggaagttagttgacaacaaaatatcttggagagggaattcggctcttaaggatgggagccaagcgaagttggatctaacaaaagggatgtacgatgctggggataacatgaagtttggttttcccatggcttttacggcgacggtgctgtcgtggtccattctggaatatggagatcagatggatcacgttggccagttagacgctgcgcaagattcgctcaagtggatcactgattatctcatcaatgctcacccttctgagaatgttctctatattcaggtgggtgatcctgttgcagatcacaagtgttgggaaaaaccagaagccattactgaggaacgaccactcatacaagtgaatgcatcttgtcctggatcagacgttgcagctgaaactgcagcagccatggcctcagcatctttggtctttaaaaagactgatcctacatattcaagcactctactcaagcatgcaaaacagttgtttacttttgctgacaagaatagaggttcctatagtgagaatatacccgaagtccagacatattataactcaactggatatggtgatgagcttttatgggcagctagttggctctatcatgctacgggtgatgattcttaccttcagtttgtgactggccaagatggagaagactatgctcaatggggaagcccaacctggttcagttgggataacaagcttgctggaactcaggttttgttatctagattaagcttttttaaggcaaaggacatttcgaattcatatagctctgggctccatagttacaggaaaactgctgaggctgtaatgtgtggtcttcttccggattctccaacagccacaaaaagcagaacagatgatggtcttatatgggtgagccaatggaactctttgcaacatcctgttgcatccgcattcttagctgctgtttacagtgactatatgctaacatcgcagacaccaaaactaaaatgtggttcagattcctttaccccatcagatcttcgagactttgccaaatctcaggctgattacgtattgggcaagaatcctatgcatatgagttttctggtgggctatggagataaataccctcaatttgtgcatcataggggtgcttcaattcctgctgatgcaaaaactggctgcaaggatggcttccagtggcttgagtcatctgatcctaatcccaatgtagctactggagcacttgttggtggacccttcttaaatgagactttcattgattccaggaacaattccatgcaaacagaaccaagcacgtacaacagtgctgtcatagtcggtctcttatcaagtttagttaccacgtcttctgccgttcaatcctttacctaagctgtagcttcctatccgtcctgagttgcacttgttgacgtagatttatgttttttgttgctttattcacttcccaatccttacaaatgaagtgttgtcaaaagcacgaaacataatattgtaacgatatgcatgattgtatgagtgtaaaccctgaggtttggataggtttatcgtgaatatgtacgggtgtagtttgctttggcattattagctcagcaggtgtggagctattttgttgtagtatgtagagcaaatctttaaaatttattattattataaccactgcttttattattatcatcatcattagacagactatgatcacattattgatctttggtttcattctgttggacgagcattttgtttgacacaaccaaaaaaaaaaaaaaaaaaaaaaaaaaaaaaaaaaaaaaaaaaaaaaaaaaaaaaaaaaaaaaaaaaaaaaaaaaaaaaaaacccaaaaaaaaaaaaaaaaaggggggg

SEQ ID NO: 2463 - DNA, 1433 bp, Glycine max
gcataacatcttgtgtataatgagtatggtgctctattcacaaccaatcttgcttctaagacgtactgttatcttcattattcatgcaagcataaatattatatgacaggtatgcttgaatgcttggtatgatcaatcaagagaaagtgttttttttttttttggaacaggtgattatttcagagtttttcattgaacagaaaaatttatatgagaagggaaaaaggatgaaatggaaatagaggaagaaaaaagaatatacatgcctatcaccttctctacaacagtccaacaacacagctcagatgcaatctattttccaaccctcttaagtgatgacccaataacatgcaccagaaaagcaactttgctaggtaatcacgagaagtggctactgtattactaagctcatcactgtctgtgcgattgtctacgtttccttccactgattgttccataaaactagagctagcatcatccacaaagaatcttctcaatatgttctgaacaagttggtgaattatatcctccacttctaatgatgaaggccgggacaattcagtcaccatatcaggatccagagaccgaagatattccaacaaattattccattttcccttgtcatattctaattgcatcatttcctgcttctgggcattcagttcctccatcacacttgtcaactcagactccaactgctgaatgtaactcagagcctgagaaggcaaatctccaaattctttcaagctaccactgctgctgcaactttccaaatcattaacaacatcgattttctcatcacccactgtttttgctacatccttcacctccaaaacctctgaacatgtttcacaatctgacccctcattcctagaacccgacatatccagattcctcgccagagacatcctgtactccgcattccatagagtgtaccctgtgacgatggaggagaagaggaggcggtggagggggtgtttggagacggtgacggtgacagcgaagtggtcggaggggagcaatccgagcatggtggaaatggtctgcttcatggagtctcgggcggcgggggacacgcctttcgagatggcggagttgtcgaggggctcgatgcggcggagcatggcggcgatcacggtgaagccacggtcgaagttgcgcgtggagacggcgtcgtcggagaggcaggaggagatgaagccgccgcggcggcgcgtgagggggaggaggacggagggtggcggaggaggaggaaaagggggaggcttgggtgggaggaactgaaagagtgaccggtcggtgaagcgggggtggatgaggggtcggaaggagagtgccatggagtggtggtggtgctggtgagggtgaacggtgaacccaacttattattctatctatctatctacgatgcgattacaactgatcttgtttgt

SEQ ID NO: 2464 - DNA, 797 bp, Glycine max
atcggcaaatgttattgttagttattgttagcgggggatttgaacaagcgaactctctcccttcaccacgagatcacccttatatcttctttttatcttgtttttgtataattagttatgaggagaagcttattcaaatagagcccaagtattcttcattcaacagaattggtctcaggtaccaaataccaatcaaaacactactaattcaaccacaaaatgaaatcttcaacaatcaaaaaatttgggaggagtgttatatgcgcgtttcacaatctgacccctcatccctggaacctgatatatccaaattccttgtcagagacatcctgtactccgcattccatagagtgtacccggtgacgatggaggagaagaggaggcggtggagggggtgtttggagacggtgatggtgacggcgaagtgatcggagggtagcaatccgagcatggtggagatggtctgcttcatggagtctctggcggcgggggacacgcctttggagatggcggagttgtcgaggggctcgatgcggcggagcatggcggcgatcacggtgaagccgcggtcgaagttgcgggtggagacggcgtcgtcggagaggcaggagggaaggaagccgccgcggcgacgcgtgagggggaggagaacggagggaggtggcgaagttggaagagggggaggcttgggtgggaggaactgaaagagtgaccggtcggtgacgcgggggtggatgacggggcgaaaggagagtgccatggaaattggaatggtgctccagccggtgaggctcgag

SEQ ID NO: 2465 - DNA, 2448 bp, Glycine max
tcagctacgtaggccccccccccgaattaagattgcattgcattaggctttcacaacacctcagcgtcactgtaccagttggaaatggagacaataacagagaacggatcagatggtgtgagtttggcaagaaatacatccaacaacgcccgtcgagggttgccaatgatccaaacaaacatgaagccaacggattcggaattccaagtgtgccacgacgacagcaccccgccggtcagagcccaaaccattcacgagctccattctctgcagaagaaaaagtcaaccccttccactcccctctcagcaacgcaaggccccttcgccactgtttccgatgaggaacgccagaaacagcaactccaatcaatcagtgcgtcgttggcgtcgttgacgagggagtcagggcctaaggtggtgaaaggagacccagccactaaggcagagaaggggacacatgttcatcaccatccgcaaccacattactttgcttcaacggcgtttgatgtcagtgacagtgcgctcaaattcacccacgtcctctacaatctctcccccgctgagctgtatgagcaagcgattaagcacgagaaaggatcattcataacggcaacgggagcgttagctacactttctggagcaaaaacgggacgctctccccgagacaaacgggttgtcagggacgacaccaccgagcatgacctctggtggggaaagggctcgcccaatattgaaatggacgaacataccttcttaatcaacagagaaagagcagttgattacttgaactcccttgaaaaggtttatgtgaatgatcaatttctgaattgggatccagaacacagaatcaaagtccggatagtatctgcaagagcttatcactccctatttatgcacaatatgtgcatccgacccactcctgaagagctagaggaatttggaactccagacttcactatatacaatgcaggacagttcccttgtaatcgttacacacactacatgacttcatcaactagtattgacatcaacattgcaaggaaagaaatggtcatccttggcacacaatatgctggggaaatgaagaaaggtctctttggtttaatgcactacctcatgcccaagcgcaatattctctccctacattctgggtgcaatatgggcaaagatggcgatgttgcactcttttttggattatcaggtactggaaagacaactctgtctaccgatcataaccggtacttaattggagatgatgagcattgctggagtgaaaatggagtggcaaatattgaaggaggttgctatgcaaagtgtgtcgatctttcaaaggataaagaaccagacatctggaatgccatcaaatttgggacagtactcgaaaatgttgtttttgatgagcatactcgagaggtagatttctctgacaaatctgtgaccgagaacactcgtgcagcatatcctattgagtacatacccaatgctaagataccgtgtgttgctccccatgcaaagaatgtcatccttctagcttgtgatgcatttggggtgctccccccagtaagcaagctgagcttggcccaaacaatgtaccatttcatcagtggctacacagccctggttgctgggacagaggatggtataaaagaaccacaggctacattctctgcttgtttcggggcagcgtttataatgatgcaccctaccaaatatgcagcaatgctagccgaaaagatgcagaagcatggggctactggatggcttgtcaatactggctggtcaggaggaagttatggattaggcaatcggattaagttagcgtatactaggaaaatcattgatgctattcactctgggagccttttgaatgcacagtacactaagactgaagtgtttgggcttgagatcccaacagcactagagggagtcccttctgaaatcttggaccctgtgaatacttggtctgacaagaaggcctatcaagatacacgcttgaaactagcaagcttattcaagaagaattttgatggattcacgacctacaagataggaggggatcagaagttgactgaagagattgtctctgctggtcctatattctgatgagagcatttcctatttagcgaaaaaaaaaatgaagtccaaaagcattcggttgattatttctacttaaaggttttcactgtatttagcttgcttgactataagacgatccctttattattgacacttccgagacaatacacaaatctgttattttgcgagcgtttaattattgaaattttcggccttgtcaggctacagtcccttattgttttccttagaacattcatcccctcttcaattcgagagggatacttgctagttttcagttgtcactgctttcgtttaagaatggctatcccccataatggtacttttacccatttttaactaatatgtaatgca

SEQ ID NO: 2466 - DNA, 1722 bp, Glycine max
ctcgagccgcaaagagaaacaaagaaaattcttgcacaccaaagaaagattgcaacaactgcacgaaaatggcgaccatttggaagaccaacgcatcgagaaacgcagtgcgttgtttgacgcagtccttggcatccactagccgtaccccttcgctcccctctcatttctcctccgtccgctacctccgcaccggtcgcgatcccagctcaaggacttatgagataattccgccggtgaattgggggattcggattgtgccggagaagaaggcgtttgtgattgagcgattcgggaagtacgtcaagactcttccctccggaatccattttttgattcccttcgttgatagaatcgcttatgtgcattcgctcaaggaagaggctataagcattcccgaccagagtgctatcaccaaggacaatgtcaccatcatcattgacggcgtcctttatgtcaagattgtggatcctaagctggcgtcttatggggtggagaatcccatttatgctgtgattcagctggcacagacaacaatgcgtagtgagcttggtaagattactcttgacaagacctttgaggaaagggacacactcaatgaaaagattgtggagtccattaatatggctgcaaaaagttggggtctggagtgccttcgatatgaaataagggatatctctcctccacgtggagtgagagcagctatggagatgcaagcagaagcagaaagaaaaaagagagctcaaattcttgagtctgaaggagaaagacaggctcacataaacattgctgatggaaagaagagttcagtgatcttagcatcagaagctgcgaggatggatcaagttaacagagctcaaggtgaggctgaagctatccttgctaaagcaaaagcaacggctgagggactggctgttgtgtcaaaatccctaaaagaaaatggaggacctgaggcagcaagtttaaggattgcagagcaatatattcaagctttcagtaacatagccaaggagggcacaacaatgttgcttcctagctctgcatccaatcctgctaacatgatggcccaagctcttactatgtataaaagcctgcttggtaatccttccagtggtaagcttagtggaactgcacccccttcaatagcagggcaattagaaggaaatgattcatccagtgaggttaaaggcgagagctcgacgaatgctactgtaactagtggaatcccggattatcgtggaaaacctggattttcacttcagagcccaccaaaacgggaatagtctttcattttataaaacttgcctttttgatgaattcagttttttgatttatggatgttgctgtggaaattgagttcggactttagagagaagaaggcggaagagtctggttggaattgcattgctggttgttgtggcatttaccacgggatacacgtagtttactttttatttttatttttttatctcttcctaactgacaaatttggggaggaaataatgaaaagaaaagaaaagagttattctgtcctctcatgtctgtccatactagtgttttctttctttaatgcttgcctgcatacccggctctatggcatcgcttgaatttagatgaaaattttaaggatcttgttaactagaaagtctttgataacattacgaatgtatttgaaatcatggtgtacgtgtaatttcttaaattatttgataaaccgtttgt

SEQ ID NO: 2467 - DNA, 1047 bp, Glycine max
ttttttttttttttttggcaggtaaaattatactattcatttttcaaaggttgccctttaaagtaacagggaaaaacatttttattacatgaaagcaggaacaacccttcctccctaacattttgcataacctctaacacgataatatgataacacttgtttgcttgatacatctaaaagtaggaaatagaaattaggacagcaaaatatttgggatgtaacccacttaacactttatcaagaaatagaaatcattcacaggtaaactccttcgtaaacaatatattaggacaatgcttcaagttagcaaccttacatccgcaaatgtagaggtcctattctaacaacatacccagtaatgctactaaaggaacaggtccattttaagccatcaaagagcatttatcattctcttcatctcagcagacctcctcggatctggttcttcaattgctctctcagtaagtacatgcttgatgcgacacattgacttcctcaccttagggatgcgctctgggttaggaaaacgcaggttctgtgcattaagcatttgacgttgagtcatcaacatgttcttttcctttaacaacacataccacaacttatgaaggtcatcccaagacttcagacgcagttcacacgccttccaactccgaccataaacaacaggtttgtcatcttcagggctcctgtctgcctcaaaaaactcctgaagggggttgtgtccttctctgctagcagcagctgctgtagtggcatattgttttgatctggcagcagcagcaaagagtgttcgtccaagtgttcttgacaaaaacatagctgaagaaataaacagactagcactgcaaatatgaaggtcgtggtttaagggtttttcgggggaaaggaggaagaggaagtgtttttgttttgttttattttttacgtacctggtgttcaggtgtaattcaaaaatcgttaaactactcaactggccctaaacgatttgaaattttctaaataggtcttcaaacttctttttttaagactgttattgatcatgat

SEQ ID NO: 2468 - DNA, 2429 bp, Glycine max
gcagacaaacgtttcgaatttctattgccacgcatgataagaaatcaagtactcaagaagccacagactagcaaaacaagtaaaagaatcataaaatacttgctaagttgcataaggctatggctaaatagaaccaaaatataaaaaggtcaggaaaattgaaatgtggagttagaagatattaacttacatgggaatatttctatggggagaattggcatgtacaattagaatgcagggaaaaagcaatctaattttccagttcactcctaatccaatcttgtgaacacaccaaagcttggacagtagcaggattaagtgagctccaatcgcgatcaaggactcttgcactatgattaaatgccaactctggcgcaacttttgacattggaattcccaaaacattgcgtgccatcatggataggacaggatacctgggagtgtgaactctccaccaattcagtatgttaaaatcaacattacgtggaaagagaggttcttccaagtacttgtctagatccgattttgtgccttcaccctgtgtagtttcatggagaaatttatcaaaccccatcaatcgatccctggaatccttcgcagaaccttgcaagagaagtgaaccattgccaacctgccaggccagaccttgatcatgagaagctaaaggggagcatattgaatgttcattgtatagagcctttacaccatcaaagacctcttcaattcgatttgcagacatgctgccaaaaatttgcggataataataatctaccaacttcatcttgaatcgagggtctaacattgcagcaacagccaaccctaagctacatttctcccaatactcatcaaacttgcttctcaatcttgacgccaaagaactgataaactcatctgaattcttggaccattcaatcaaatgcaacttaacatcacagagctcagggaaatatatatttgcagttggatacttgctcttagtgaaaacattgataacctcaacaaaaagcttcaagtagctggtaactgctgtgactctctcccactctacctcagataaacagactttgtaagcagtgtcattttcttgcaagagaattaaaacatccttgaattctaaggcaacttcaagcattgagtatgtggaattccattgtgacggattatctagaaataagcccttttgactcaggatcccaacttctttagccatcacattgaactttgccagtataatttgtgaacttttaatgtaaccaatagtttgacgaatcttattgactatttcccttacagttcccagagcatgctgaaccatggtgttaataacatttgcagcacagcgtatatcaaataattgaccgttgcaataaagaaacctgttttgcagaagtctctcaccaattctaacagcaattttatccgaggtggaacaactatccagtatcatggaaaacaatttacggtcaatatcccaatccattaggcaagtcatgatagcttctgaaaccatgtcttctgtatgagaaggatcaatccttataaaatttaatatcctccttcttaactgccaagattcatcaatgtaatttgatgtcaaacacaaatactctgcgtcgtccacagcgttccacacatcagcactaagactgattttcccaggcaatttatccaacatctcattcacctttttcctctctctctcataaatctcaatacaatcagcctcaaccttattcaacgacacaagttcaaacaatggctgtagattttttatgaaagctctgaaaccaacatgctcaaccatagccaatggatatccatgtagaataatcatacgagcaagatcaaatcgactccgtctttgatcaaagttactagttccagtgttgacagagtcttctttcaactgcgcctgctcaaatttaatattcacaagactaacagtattatcatctttgtttgaatcttgatcaatattgaaatttgcaattgctagagttccttcctttctcttttctcttgccgaaataaattgtgctatgccatggctagaccttctctgacacctgattaaatggttccttagatgcgatgttccactggtacttgatccgctcagtttctttttgcaatgcctacaaacagccacacaggtatcgccttttttaatcctatcaaaatcattccagaccacagatttcaacctactcgatttgacaatgacagcatcagacatgtccattgcatgaaccgtgaggaagaataggtttgattcggtgtgtggtgcgtgcaaagaacgaaaaaggggtttggaagaaaaccctaatcgaaaggtgaaagaaggaggaagaagaagaagaggaagaggaagaagaagtggaacactaagaggagagcaatgtggtcagacaggcgtagcagcttcctag

SEQ ID NO: 2469 - DNA, 1353 bp, Glycine max
tcagctacgtaggccccccccccagcaaaaaattccattccttttctcactaaccaaacatgaatatcaaacccatcatcatcctagctttcttaatttccctctctttaacaaacgtcgtcgtttcagctcgactctttcccaacgtctcctcctggctcaacgcccacgcccctactggaggcgcgtgggatgcctttctcaactttaccggttgtcaccgcggcgacaagtacgacggcctcgccaatttaaaatcatactttgaacgattcggttacttccctcacgcgccgccctcctcgaatttctccgatgaattcgacgacgcgctcgaatccgccatcaaaacttaccagaagaacttcaacctgaacgtcactggcgtcctcgacgacgccaccgtgcagcagatcgtgctgcctcggtgcggcgtcgccgatataatcaacggcacaaccacgatgaacgccgccaaggagaacgagacggcgtcgtttagcaagccgaagtttcacacggtggcgcacttcactctttttcctggcatgccgcggtggccggagggaacgcaggagctgacgtacgcgttcttccccgggaacgggctgagcgacgccgtgaaaggcgtgttcgccgccgcgttcgcgcgctgggctgaggtgacgtcgctgaagttccgcgaaacggcgtcgtacttcggcgccgacatcaggatcgggttcttcagcggcgaccacggcgacggggagccgttcgacgggagcttggggacgttggcgcacgcgttctcgccgacgaacgggaggttccacctggacgccgccgaggactgggtggtttccggcgatgtgacgcggtcagcgctgccgacagcggtggatttagaatccgtggcggtgcacgagattgggcacttgctagggttaggtcactcatcggtagaagaagcggttatgtttccgacgatttcttctcggaagaagaaggtggtgttggcaagggacgacatcgaagggattcaattcctctatggttccaaccctaatttcaatggctccaccgccacgtcagcaccggagagggacgctagcgacggtggtcggtgcctcacttgtgtggggccctcgtccggcgttttcgctttgttgacatttgcgttcttattttaggtttttctattattatttatcgtaggggtatgatgctttgcacattttattaattcgtgcccaatattttttgttcttattgttgtttggttttccattcactttcgtatagaatttttcttggtgtatatgatataataataaaatttcattatataaaaaaaaaaaaaaaatttaggac

SEQ ID NO: 2470 - DNA, 1264 bp, Glycine max
  misc_feature (31)..(31): n is a, c, g, or t
  misc_feature (33)..(33): n is a, c, g, or t
  misc_feature (47)..(47): n is a, c, g, or t
  misc_feature (53)..(54): n is a, c, g, or t
  misc_feature (57)..(57): n is a, c, g, or t
  misc_feature (67)..(68): n is a, c, g, or t
gcccccccctttttttttttttttttttttntntttttttttttttntttttnnttntttttttttnnttttttttttagtggcttctaaagttctaattttttttttttaatgaacaatacttaaatccagataatttatatcaatctcttacgttacaaattggaagttctaacttttgacacccttggatgtgagaaacgttagcaatttcctacagggacaacaggttcacacatgatacaacagttgtagcgcagcatagcttctgtatgattgcaatggattcaaaccacttcccaaaagcaaacaaaccaaaagtgcaacaaagattatacaagcccaaaatccaaaaggaaatgaagataaacagcagatttttcttttaatgccaccaactgattaattttattcagaatcagaatcagaaccagcaattgtggaggatctaacgactctacgtgtactgtctatatattcatcatcttcatcatcctcagctttcttctcctcaattatacctttctttatcagaagagcttccagcgttcttgtggtaaaatcatctttacctcccacatcttgaaatcctaccaatctatctactgctactccttgtctgaacaacaagacacaaggcaaagtcttgatagccagttttgtaacaaagaatggtgcattctctgcatcaagcttgatgaacttcgtatcaatatgcattggtgcaagagactttaaatgcttatccattatcttgcatctatagaactccctatggtagaagtgacaaatcactttttcacttccagtgacttcacctaagaaatcaccctcggttacttccctgaattccccatgacctttcttcttccattcctcccgtttctctgcttctttcttaagagctgcaatcctatctgcatgcaatttttctaactcaggatcatccattaactcgtcaaggtcaacctcctcatgtactgaacttgatccttgagtcttctcttgagcaagcaattccttctgataatcacgggcagctgctgccattacgtttccaaacgccagattggagagagtggacttcaccgcgtttggatccatttttattttatcgttaaagatctgtgatgtaggtgctaagctagggaagcgagaagcttgttcaaaaattgaaggaagcggaaattgaagctttgctgctatgttttttgtttcttttgcgtatggaagctcggggggggggcctacgtagctgactcga

SEQ ID NO: 2471 - DNA, 2115 bp, Glycine max
gggaacccaatttctttatttacctgtataatttcataaagatgaaatgacaaaatcatgtaataaatgtaaataataacacaatagttctagaccaggatgaggtaaatataccatgaaacaaaattaaaaaagagaaataaaatgtccaagataaaaaaaaaatgtaatacagtaaaatccacattgacatgccaaaagctcttgcgaagccattctctaagttctatcaaaatcttcagcaactgaaagtcaaggcttgttcaccagctcccgaagtcaagtttcatgcctttcttcatgaaccaagtagagagaacccatcagaagaaagctatcccagaaaggcagaaattacttttttttttcttttttctttttttactttaaactgtgtggtgtggtcaaatgctaccagcaataacaccaaaaatattttttttttgaaattcagtagatcaatctaggagggaagaagtggctgtctctcatcatgtccaacacgatgagtggcctcctcatttgctccagctgccatatttataaaggattcctttgacctttgtttgtcatgaacatcatgcagttccagcacaccattttgttcatctttaacttttgaaagtggtgaaaagaactggtgcattgagatgaatacaatagagatgccaataacgaagttcattgttaaagtatgtccaaatagtacagcagatgctataccagtgaagattgttgctactgttgatgagtacttcttcaaaattgtatctgcatatttgaagaagaaagaggataaaatcccttgggcagcattgtttgctatcaaaagcattgtggcttttgaatgaccttgtaggatatcaaagctgctaggccctttgacaacaacagtcccaagtatcccaagaaaattgaatatagctccatatccatataagaataagttctgcagataaatgcttgtatcatattggctcttcaaagcatactcattataaacagaggccaatgatggaacagtgacaaagatcaatgtatagatatatgcacccattgtgacaggaagacccaaagctgtagttccttcaggtaaagatcttagttgattaacacttataccaatgagcagtagagcaagagcttcccactgaatgatggaaaaccggcgcttcataatcacctttaacagaagtgctattactaaaaccttcaaattgcttagcatcttcacagtagcaggattaaaatacagctgcatgataaacttcagatagttgtttatggcatacagaagtgcgggaactgccagaaggacattgttacgagctgcctgcacaaatgtagaaattgagagaagaggcttctccccaactttttgatgcctagcctggagaagaagcataacaatagcaaagaaaacctttgtaatctcggtcaaaaaattaacactaattgggctaaaattgaatttcccatccaccttggacatatagacaaggataggctggaagccaactagaacacaatcaccaacgaccaaaaagacgttgagtgcacgttgcttggacgatattctacttttgtggcgatcataagcccttgatatagttttggcggagggggaaaccaatttggaatggcaaacactgcattccattatcccgttcttcatgtatatcctcccacactatcagggtatgaagaactcgatctaaatcgagtccagaaagagcattcgggtgaaactcgatgtgatctgcagctgaggcgacggattcgaagtggctcaatatagagacacgagagagagagagagagagagagagagagagagagtgcgaatttcaaagacaaagcgattccgattcagattcagattcagcttcgttccttcctccttcctataaaaggaaatggaaaacggagtttaaattagcagagggagagagagagagaggactgcgttgttgtttgtaatttggaattattaacaagagcgagagaaccttatatggttttagtatttgtttgctttgaactcactcacaaaaacggtgtttcggagtgacgcgtctcaaaggaggatcggccgattcggctcgagctcgagcc

SEQ ID NO: 2472 - DNA, 1683 bp, Glycine max
aagtaaaggaaagctgattttattagaaaaattaaatgtatgtacacaaggcttttctctgatttataagagctacaaccaggatacagtgtttgctaacatacaatcactaggaatactaacttgtaccaagaacaaaaatatctttacagtggaagtcgtgaacttcaacatgagcaaaatccaaaacagttggatctgtcaatagaaacagctggagaaggaagtctaccaaagaatatatattaacctaattgagggcaggaatagccataaaaccatcctatgtaactagtcatttcttaaaggtactttgtttcctttgtcattggtataatgaacagtactatacaaaaaaagcagtttcaaaccatcatattcaagtctgaaaggtcatccatgggaatttcaaggcccataaagtcatcatgatcttgcaatccatcgtcctcaatattcaaccatgaaccaagatcagcaccttggtcaccaagatcatcaggaacaccaagcacatccattccaggcagttgcaagttggacaaatcaataggctcatggtcatcaaattcacccatgccaaactcatctttctccttgggagttctgttagtagacatttcgttagactttgaaacggaaggcaaagctgttttaggttgctctgatagcttgccaaggaggccatttacagaaacagaatgcttagttgctttctgcttaggctttgttttgagtttcctttgtcccttagcactagatattgctggcctaccaactttggtagttccatttctggatagcacctctctgctctgtccttttccatctctgtctctctcgctcctctttccttttgtactatttgatagagaacttccaatacctgatggagcacttgaactaccaatgctaccgccaacgtcatctagggacaattcccttttcttcaccttgtttgaccacagatcttccttcccactagtttgttcagatgaaccatttatagcaggaagaatatctgatgaatcgagatcatgatttttcatattctgactaaattgtgaagggttctgctgtgaacccatggaagcagttcttgcttccagagaaaaggaagcacaaggttttgtggattcagcctctatgccatctaattgccgaacaatacttagctgggaagaagcagcaaggaacatatccttatacaaaggctcattgaagcagctcttgcctgtatcttcaaattgccggcatcgttccaatgttcgtttaacaaatcccaatgcagcttgcttggcgattttgttgcttgcatttttcccacctgatgagctaggaccccggctagccatgtatttctcataagccatcatcacaagtttgtcaagagcattttgttcaaaatccttttcttgaagttcttttgtcactgaagccgatttcaataatccatctagcaagcatttcctcttggacatctgtccttggtaatgctcctctaacctagtgatatccttacaaattccttcatcatctgtttgcagcatttcaggcactgattctgaggaaattccaatactttgaagctccaagagaagcttttcattcatacccaaggtggcatattgcaactcagaacagatcaaggtaggcatgggggggggcctacgtagctgactc

SEQ ID NO: 2473 - DNA, 1068 bp, Glycine max
  misc_feature (1068)..(1068): n is a, c, g, or t
aattaattttgtttttttgaaaaataaaatatcgattaaaaatacaaaaagtaattaaattaaaaccatctatgcataaatattactaatacaaaccatctatgcttctaaaaattgaaaggaaccctcctgtgtgaaaaaaaaaaccaactgacttctaaccctaaaacaattaagccttgctacactacaacactccttactattctacgaaagaaaaaagctattgtttggcttatgagctctaagcaaaatgcatcacagcccttgttggggcttttgtcttcaaaaccatctcttcatactcgtcttcagggtttgacagagcaacaattgcccctccagctcctattgaagcttcaccctcgtgtacaatgactgttcttatcacaatatttagatcaaatgcttgattatatgagaaaaatccaatacagcctgagtagatacctcgagaacaactttcaatagaatcaagaagttccattgatctcaacttaggtgcacctgtcattgaaccaccaggaaatgcagctttgacacagtctacagcactgacatctgaccgcttcttcccacgaatagtactcaccattgtgtgaacagttgcatatgattccacatccatgagacgtggcacatgaacagatccaggatcacaaacacggccaaggtcattccttagaaggtcaacaatcatcaggttttcagcctgatccttttcgctgaactgtaatttaaattttagttgctcatcttcctcttcagtagcaccacgagctatcgttcccttgatgggcttagcttctagtatattcttcctatccaactgcaggaacctctcaggagaagaacagcaaatactcagatccacctttgaaaaattaagccaagcagcataaggtgccggattcctttctctcaaatgcagataaagttcaagggaattcaattcctcaatcgatttccttatctgagttgtgaggcataactcatagctttctccatctttaatgtagtttagacacttcttaacatcctcaatgtactgctctttacatttttcan

SEQ ID NO: 2474 - DNA, 1538 bp, Glycine max
ggcctatccttgtatgagaaggatcacatacattacttttctttttatttgttcacaaaccaataagttatcccttttgaccattataaacaataaagaaaacaaacatgataaatactcggtaaaatattctaaaagcttcgcagcctaagtgatcctaactctttgggagactgcttaatccgtttaatcctatccctctccccaagccagatgacaagaggatagagctccagtttgtgtgattaaaaaaataccatatggtaaccactttttttttttttttttttaaaataaaatgtgaaagataactatctatcttcaaatggtaatcacagtaattactaattagcatccttggctcaacaagttaatacgttctgcaggtattcagttaaagacaagtaagaaacaagttccgggaaacaagttgtgggaaacaagtctgatatccttctaacaaattaatcaacctcctcgcatatgtgcaccaagctcgccaaactgatcatcagcctccactgtatcttcagatagcctcacagcatccagcttctgcttgagaatttctatggcatttagaaccaattgagaagctttaaccgctccagtagactccacagtgaatatgaagctatcctgcctcgcaatgatttctacaagcccaggcttgcccatagcttctgctttcttaagcacctcatcatcatatgtgtatgcctcagcatcaaccaccatcacctgttgtgtcactggatcaatttcaaagacacgggttggactactgtcaacccattctcttttctcttccagagtcaaggtttccatcaaatcctcatttatatgaatctccggttcatacatgaaagtgacagttgcagcaggtgaccatttagcatgatccttcccaatccccttcctagctatcgctctcagcttcagctcttgtccgcgccgcaacttcacaatgataatccccctgttgttgtcggagtcagtggcagaggggtcagagaaatcaacgggactgacagtagggtcagaactgtagaggtccttgctcgtaacatcgagggtctgatcagtcatgcacttaaccctaagatgaaactcgacggagcaaaactcgcactgtccgtcaccgtcgcacgcgtcgcagtcacgtgagaagcgcatggacatggcgcgctcgctagtgagggggatgaggcccagcctgtgagcgataaactcgtcattgagcaccgaggagttgacctcgatctccacgaggtcgatggcgaccgtcggcacctccgcgatcatcacgcgccgcagcgcgttggcgatgctcgcgtcggtgtcgcggagctcgaacttggcgtagtcgtccttcagctcgcggattttgacccgaggcatgcgcgcgtaggatactcctccctccatcgtgagaagcgtctcactctgtcttctgtgtgtttctgtttctcaccggagaacgaataaaatgtaaaacccttttcccggggggggggcctacgtagctgctcgagggg

SEQ ID NO: 2475 - DNA, 967 bp, Glycine max
aaaagcaacatgtcaacacaactacagaagatgatggcgggcatcatcatcaaatccaaaggcaaaaaccaaaaattcaatgtaaccaaaagaacttagctaaatgcaaaaccttattctacaaatcataaatgtcagctgtactatctatagattcttctcttctgtgatcagtgacagaactcttggtttctagctgatcaacatcaatggaaacttcatcaactgtggctgagagagacttttggcctcgtgccgaattcggcacgagggagagagagagactagtctcgagttttttaatttttttttttacggtaacaaaaaatctatgattgaaatataagacaaccaaatatttatcaacgcactggcaaactgtcaaaaaagcaaatttagctggcggtaccaaataccaacgaaaatttagaatgagtatttgctcaagacgacaatcatagtactcaaatatctctagcaagcgtagaaattaatacatagcaaagtaacaaactatcatgggtgtctactgttgcttaacttcaactttcttcttctgccacaagcgatctagggcactgtcagcatcaccctgagcacggatgaagccgcagagagcaaaagtggagaaatggccattgtagacgccattctcatccacatgcccaatgttaacctgaaccgaagcatggtccttagcggtaatcaatcggtttgtggcagagcacttcctaggaatgtaaagctcggtgatctgtccttcctcgttctgcatcttaggttgagtgttataaagcgacttcacagagatctataaaccagaaccaaagcctcgtgcctcgtgccgacccccgcacgaggatttctaataataccaccttcatttttatttttctaggacacaaaaatagtccttggaaattctggatcactgtaccacctggtttttctatttctgcttatcaca

SEQ ID NO: 2476 - DNA, 741 bp, Glycine max
cagttttttcttttttcacataaaatccacggtaacaaaatttatatgattgaaatatgacagaatatttatcaacgcactggcaaactgtcaaaaaagtaaccaccttagctggaggcaccaaatgccgacgaaaattcagaatgagtatttgctcaaaacgacaatcatagtactcaaatatctctagcaagagtagaaattaatacataacgaagtaacaaactatcatgggtgtctactgttgcttaacttcaactttcttcttctgccacaagcggtctagagcactgtcagcatcaccctgagcacggatgaatccgcagagggcaaaagtggagaaatggccattgtagacgccattctcatccacatgcccaatgttgatctgaaccgaagcatggtccttagcggtaatcaatctgtttgtggcggagcacttcctaggaatgtaaagctcagtgatctgtccttcctcgttctgcatctttggttgagcgctgtaaacctccttcgcaaagatctataaaccagaacgagaacgaaaacgagtgccctccccgcgtcgcgttgtgttgcgtcgtgttgcgtcgtgtcgtgcgctgttcctctgtttatcgtttaggtgttcagaccgaaccctagctccgcatcgcaaccatgtcgaccaagcaaggtgggaaagctaagcctttgaagaaacccaagtctgataagaaggattacgacgagattgatgtg

SEQ ID NO: 2477 - DNA, 1332 bp, Glycine max
gggagcataatggaaaagtttgatggagaaaaaaagtgtaactgttattggcctttggtttttctatcccactccgacatcctagttacaaggatcatcatatgaaaaccgaaagggaaaaaaaaggggggggagggagtattattactgtaatcctaaagcaacttgtaaatacacgagtatacattgtcacgaaaattttgacaaactaagctgtttaggcctttcaaggggaagcttctccatctctacagaaacaaaggtaacttcatcattcaactctgccattttgagttgatttagagtccttttggcatagacagtgaaggcaatagtggtaactattgcaataatgaaagaaataatgttgtatacgatttccacagtagtcaagtggtgcttcccatactgtgcgtctgccaatgtctttattaaccgaccactgtagatatagatgaaagcttctggtaccattccagctactgatccacataagtagggccaaaacctcatatttgtgactaccacggcataattgaatatagtatagggaaaaggagaaaccctaaacagtgcaaccacttgaaattgacgagaccagttcccttccccagcaagcctaatcagtgcagcattctggggccatctctttaaccattgatgaattcggtcacggaacagtagcccaattaagtatggcagcaccatcccaatggttgttccaaccattattataaagaagccaaggccataaccaaaaatcatcccagccagccacatggaggggccagaagggattaagaacactgggaataaagccagagaggcaacaagtactaaagcaagaactggacggccaaaggcagtagcttcccattccatgattgggtaaagaacctttacaaaaaaaaagtggcactccccatttgacaagaataaaaacaagtatcacaaagacaacacaccataaaaaggatttcatccaccaccagaaagacttgattcttgattctgctcgagtcagcaaggtttcagcttcaaccaccctttgttcatcggatatgaccagtctaatatattcactactccccctcacatgagaacctgagcttgcatgttttcccaacacctctgatgattcttgtgtcatcattgagatgccagaaagcttgggggaaggagttgagctctggtaattaacgaatgcaacacaagacaagtgagtgaagagaaaaaacggggttgggttgggtgcgattctgaaactgacggaaacgtcccattcacgccaacacactcatcattaaccaactaacttcaactaagaaagtg

SEQ ID NO: 2478 - DNA, 2011 bp, Glycine max
cgtggctcacctccgaagggatcgggccagccaccttaggcccacccagagaaaaactggatgaacgatcctaacggtcctatgtactacaagggatggtatcactttcttctaccaatacaacccgaacggtgcagtttggggtgacatagtttggggacacgcagtgtcaagggacatgatccactggcttcaccttccactagcaatggtggctgatcaatggtatgacatgcaaggtgtgtggacaggctcagccacgatcttaccaaacggtgaaatcatcatgttatacacgggttccaccaacgagtcagtgcaggttcaaaaccttgcataccctgcagacccctctgaccctctccttgtggattggatcaaataccctggaaaccccgttttggtgccaccaccaggcattggtactaaggactttcgcgacccgacaaccgcgtggctcacctccgaagggaagtggcgaatcaccataggatccaagctcaacaaaacaggcattgcattggtttatgacactgaggacttcaagagctatgagctcaaggagggtttgcttcgcgctgtcgatggcaccggcatgtgggagtgtgtggacttcttccctgtgtccaagaagaatgagaatggattggatacatctgttaatggggatgaggtgaagcatgtgatgaaggtgagcctggatgatgatagacatgattactatgcaattgggacttatgatgagaagagtgtcttgttcacaccagatgatgctaagaatgatgttggtgttggattaaggtatgactacgggatattctatgcatccaagacgttttatgatcagaataaggagaggagacttttgtggggttggattggagagtctgacagtgaatatgctgatgtagccaaaggttgggcttcagttcagagtattcctagaactgtggagcttgataggaagactggcagcaacttgcttcagtggcctgttgctgaggtggagagtttgagattgagaagtgatgaattcaaaaatttgaaggctaaaccagggtcagtcgtgtcaatagatattgaaacagccacacagttggacattgttgccgagtttgagatagacaaggaaacccttgagaaaacacctgaatccaacgaggagtacacgtgtggcaacagtggtggatctaaacaacgtggtgccttaggaccttttggtcttttggttttggcagatgagggcctttttgagtatactcctcagtatttttatgtcattaaagggagcaatggaaatcttaagacttccttttgcgctgatcaatcaaggtcttctcaggcaaatgatgttcgcaagcaaatcgttggcagcgctgttccagtacttaaagatgaaaagttttccttgcggatactggtggaccattctattgttgaaagctttgctcaaggtggaaggacggttgtgacatctcgggtttatccaacaaaggcaatctatggagctgctaggttgttcttgttcaacaatgctactgaggccactgtgacagcctcactcaatgtttggcaaatgaattctgcatttatacgcccattccaccctgatcagaagaattaaaataaataattaaattggatataaaagacttgtagtcacaaaggatcggaaaacatcttggggtggcaatttgtactcatcaattgtttaccttcccataaacacacataaagttatgggttcttgctcaaagcccattccttcattttttgctcatttatgtttatgagaatgtttattataattttatcatatcatgtttaatgattcttacaagagaatctgtttttcaaagaaatatgatgcaaatgttatccgattcaattctgtggtaaaaatcttttacgttatttgttatattaatttttttagatgtatcttgaaagcaaatttaataaaaattgtttattgtaaattttttcttctaaataacacttttaatctttt

SEQ ID NO: 2479 - DNA, 1315 bp, Glycine max
  misc_feature (12)..(13): n is a, c, g, or t
cttcctaattanntcagttagtatgatttctcatgacaagcactacaagggtttgaactttgaaggcgtgcagattataaccatgctgaacgagaaatagacattagacaacacatacagaatcacagatctaaatggtcctctctatgtgataaagatcgggaactatacaaagttaattacagataatattattgtgtgaaagttaacttgctatgtcttgttttacctagtccacagtcaagtgtaacaatattccgtaatccaggataagcctttattattttttgttctatgggaaagtaacacatcactggggctccacagcctgcacatttgtgtaagagtaagagtagctctcaatgttggagttgccctctctgaacttcgtccaggaaaccctccacgttttaagcaaactttgcctctcaggttcaacactcctcttagcaagcatgaatgttaagaagacaggaaccattgctgcaaccagatgcttaagtgtgtgaccactgacaatatgttgcgcccattcatagatcacatcatcagtagcctctagcaccttagctagaagataagaccctgcagcccagagccaatatgttgaatgtgtgtacattggaggcaacaaaatagccattagaggaatgacaatgcatggcacaaattggactagagcatatggacgcaggtcatcaaagaatctccaatacacaatgcttattatacccgccaaaactagaggtataatagaaaccgttcccttcctctcatcaatccgctcaatgatgaatattgccatgattgatgtaaaagcgacggtcatgggcaagcgatcccacacaaggcgagcatcgtctggcttgagatgatagtatgaagatccaactgcaactgcagccacgccaacatagaagcatgtccagccccatagttcaccttgcaagctgagcctaaagtaatttccatgatgacagagtacaagtccaacgaggccaataaccagaaaagggaaattggatatcacgttaagtgcattgggaataccgaggaaggtgcggtggtcggcgaaatcatggtattcttgtgactggggaatggctggggtgacgatcatgagtaggaggaagcaaacaagtgctactagccatgcgtaaatgctgcgttttctcatcttttgggcacggaaagtcttggaggcgatggcggtttagttatgaagctgtgcagtgggtgttgtgttcaatattccccccgacccccttctcattttcattttcactcttcctctctgcctgggcggacgcgtggg

SEQ ID NO: 2480 - DNA, 1464 bp, Glycine max
ttttttttttttttttcttgatagaagaatattcaataaaaaaaatcttggaaagtgttccggccattctacaaggatggataaaaaaattcctatattgacaaaaacaaatgaatgaatgaaggatgcaacaacggttttgtaatttgaatgtaaattgttttgttcacttgtgaagggtgagtgagttaacaaagacgttatgactaattaagcatctgatggcgcgatccagtgtctcccattgacgaaactcttcctgataaatggatgggcagcttcgaaatctaagtctcgggcccatgagaccccacgtacagcctctgctcctggtccccaacacttgtacactccgaagaacacagtcttgttcttattgtgggcatggtcccaatcatcccaaccgccatgtgcaacaatatcatcgaaatatgtgtaggagtagacaattctcgaatactgtcccattgctcgtcccacatatagcggacccgttcctgtcaccttgcatcgtacgaatgcgaaccctgtcttctcttctggctgtttcctatcgtgggccgctatggaaccgaacctcgttgctattgagtgcagctcgcaatccttgtacatggacctgccattgccaaaaatgaaatcgatggatccttcaatgtagcattccttgaagtaatgtctgcctgcatcgtcgcaaagggtgtcttgtgcaccgtagaaaccgcatccggagaagtatgctttgtcgccggatatgcgaaacgccaccgcttgccatccctgcatccccggcattggtgcaggtgctgtgttcttgaagctgatgttcctggcagaaaaatagctggcaaaaacagtaacagaagcggttctgtaagtacgcaattgctgtccgctaggaccagggtcacttgctcgatcatgccattctatcaccgtcacttctttacccgcgccctcaaaagttatgtacggcttcgtcacgggcacaactaccttttctttgtagcatccggcgttgatttgaataaggacattccttcggttgttgtcggggacggcattgacggcgtcttggacggaccggtagtggccaccgccgttaatgtcaacggtgattttacggtgaccaatgggtccgatccaatggtggctactctttgaggagttgctcgtagaagagaatatttttaaggtacggtcgcggtggtggggtttacatgtcactgttgctgcatggaatatgcaagcgaaaatcgcaagcgctacttgcagtgacaccaagagtgaagaagaagtcattagatagcatcgaacgcggagagaacaaatgttgaagaaatagcggagacacactgtgcttatttgtatgggaattcttaaatatttgaggaatgtgcaacgtgctagccaaaaagcgataagatcgggagtggcccgggccggggtacctgctggtcgtac

SEQ ID NO: 2481 - DNA, 1324 bp, Glycine max
  misc_feature (1318)..(1318): n is a, c, g, or t
attgagaaaaaattagcacaatgaaggataataaatggactccaaatacttatagagaaacaacttcagttcatatagaagtctaattgctgttcaaaccattagtattgtggggaaaaacaaatgcaagaaagggcaatacactacaaccaggaagatacaacgtatacatagcttcatcaaacttgaggggaaaatagatgaagggcaatagaggctgctccgtagtctaggcaaacttttcttcataatcatctttatattgatattcatcttcttcatcttcttcgtcatctgattccaagcaatacctaacgtctgcatctgaatctaattccaagtaattcctagcggcaatggcctcatctgtacctgatagcaagtaatttttaagggcttcacggtaatcggcagggtcgtgccaccaagttggagtatccagaatggccttctccaaccaatactcatcttcctcttcttgctgtgccgtcatgctttcatagagttgtccccattgatgcatggcattcttcagtcgaacactctgacttccgccgaatagatacttgatatagtctctagctagctttgtgagttcctccccggtgagaatataaatgtacagaaatataaagccaagggtggctaaaatcatttggatattttcttcccacatcccagctaggctttcttcttctgattcaccagagccatcagggccaccaccaccaccaccagtgttgccgcctcctggtggtttcactccaccaccaccaccactgtcataatattcacccttttcaatttggctccgtaatacatcctctagtgatgattctcccttaaattttcctatagctttctcaataaatttccatggggaattctcatcatcatttcccatcatcccttttccacgggctaagcaaatatgaagaggtttccgagattgtaaactgggccaacattttgagctaaccgattgtgttgctcttaagctttgtaagcaaggaccaaaactatttggtaaaacacatggttttgattgaagcctgtgtaactgagatatatttttcacacaaatcccaggctgccatgctgtaacttgtgcaatattcatttttgtcaaacagcttagctacccccaagtttcaaacattacccagaatgtaagagcaagatgaagaagagagaaatttcgcaaaagttttgaaatatgaagatgccacagaggcggaaatgacgcaggcgaaggggatatggtgtgggttgcggtgatggtcagggagtgggggcaggcggggccggtgcggtgctnactcga

SEQ ID NO: 2482 - DNA, 1194 bp, Glycine max
ttttttttttttttttttttcaggaagaaatcaagtaatcattgataaaaagaagaaaaaaaaagtaggcaaaaaagttgtattggaggtacagaaaggagtatttttctcctcccctatataacactatagtacagagtaagtcttaaaacaacaacaacaataggaagactgaaatttcaaaggaaaacaactaaaaagaaaactgaaatttgagaagctaacacagggattgcaaatttaaaaatgtttagattgtccaatttgattccgggtaaaggaagggagcatgtccaagttggttaaaatggtcttgcagcctcttcctgcatcttctttactctggtcaacttctcaatttccctaagagcctccaaagccatgtcttctcttgtaatttcatctaagttatcacaacccagccgagaaactactttttgaactgaaataatagcatcagctgtagcatatccaactctgtatttatcgtacagagcacctagttcatcctgtacctctgggtatgatcctgaaatagatatttcagatggagcaaattgactcttatcttcaattacatctctggccacaaaatctagaggcacatcaatccataatgaaatcccatgtctcagaagggccagattagtggagcttgtaacagtgccatttcctgcacaaaccactagtcgacccatggacgataattgcttcagtacttcagtctcagactcatagaagcctttttcgtcactctctctgaatgattttgcagccagtgcaccacctacagcttcttccaccaaactatcactgtcgaaataataataccgcaatgcatcagccagcagcttccccaaactagttttaagagagctcttcaaaccaaccagaaatatggaggtccctttgagctcagaagacacctctgctgctttcttcttcaccgcaagagacgagtccgtggcaccaagcgaagacgaaacggtgccgtctgatactgagcaattgagcctgcgcagtcgatggaggtttgggttcgggaacttgaggaaggagttttggtgcttgaattgaagaaaattggaagggcgattaagaagtgggagaggagtgttcctgtggcacaggcttgccttctccattccaatcttattatctttctctctcgggggggggcccgcggcgccgcga

SEQ ID NO: 2483 - DNA, 1154 bp, Glycine max
ttttttttttttttttttttttttttttttcaggaagaaatcaactaatcattgataaaaagaagaaaaaaaagtaggaaaaaagttgcactgtaggtacagaaaggagtaatttttttctccccaatataacactctagtacagtgtcagtctttaaacaacatcaaaaggaagactgaaatttcaaaggaaaacaactaaaaagaaaactgaaatttgagaagggagcatgtccaagctggttaaaatggtcttgcagcctcttccaacatcttctttactctggtcaacttctcaatttccccaagagcctccaaagccatgtcttctcttgtaatttcatctaagttatcacaacccaaccgagatgctactttttgaactgaaataatagcatcggctgtggcatatccaactctgtatctatcgtatagagcacctagttcatcctgtacctctgggtatgatcctgaaatagatagttcagatggagcaaattgactctggtcttcaattacatctctggctacaaaatctagaggcacatcaatccacaacgaaatcccatgtctcagaagtgccagattagttgagcttgtaacagcgccatttccggcacaaaccactagtcgacccatggacgataattgcttcagtacttcagtctcacactcatagaagcctttttcatcactctctctgaatgattttgcagccagtgcaccacctacagcttcttccaccaaattatcactgtcgaaataataataccgcaatgcatccgccagcagcttccccaaactagttttaaaagagctcttcaaaccaaccagaaatatggaggtccctttgagctcagaagacacctctgctgctttcttcttcaccgcaagagaagaagagtccgtggcaccaaccgaagacggaacggtgccgtctgatactgagcaattgagcctgcgcaatcgaaggaggttcgggttcgggaacttgaagaagttcgggtgctgcttcgggtacttgaagaagaaagtttggtgcttgaattgaagaaaattggaagggcgattaggaagtgggagaggagtgttgtgggagaggagtgttggtgtggcatgggcttgccttctcccccctctgtctcttctcgcag

SEQ ID NO: 2484 - DNA, 1728 bp, Glycine max
ctctagagcgccggccctttttttggaggtttaactttttttaatttttttttctttttttggtgatttctaattgattgacatagtattttacaaagtgtaaacagtaggatttttacaagctgggatcaatagttgcaacaacagtatataccaagcaaaagaggtccaaaccataagaaaatctctaccacttgacccctaatcacttagtataggcctaacccctactgtaggctctcaggcctgcatggtccagcaaaattgacaacaagcaaataggtgtctgtccacaatttctcagatggcaagttgatattacaactgatgcagcaacagtaaacacctttatcactccacaactggtaatagatacatgctcatctttggctcatcaactgcttactgcaaacttgttattgtatggcatagaagtgtctgtgactgcaagatcaaaagggtcggtgactacaggagttttctggaacttattccgtagctgaccacaagctgcatttgcatccagtcctctggtttgacgtacactaacagttattttagaggactccaaagcaccagaaaatgcaagcactgctctcttggaaggacgctgatactcggagccttctattggattgaaaggtatcaagttgacgtgatatccgctgcccgatcgatggagtaattcagcaagctctaatgcatggtttactgagtcattcactccagctaaaagtgcatattcaaaggaaacccgcctactagtttgctgaaagtattctctgcagtcactcataagtgcatccaatgggtaggattttgcacttggaacaattgtctccctaagtttctggttaggagcatgtaagctcacagctaaagtagattgaagtttgtgagaagcaagtttctttattgtatttggaacgcccacagtggagatggttatcattctttgcccaatttgcacatccttattcaagcaatggtgtgcttcaagtactgccttcaggtttaacattggttcacccattcccataaacactacatttgtcaccctattcttgaagacctcctcaatggccaagacctgttcaactatttcatgtctctgaagattccttgaaaaccccccttttccagtggcacaaaaagagcagcgtaaagggcaaccaacctgtgatgagacacatgctgtgaggcgagtcaagcctttatcaaccataactggaatgccaacagtttcaatcaatctattgtcctccaacttcaacaacaacttaacagttccatcagctgcagttacagtttcgaaaataggagagcgccccaccttccatccagcttcctctagagtattcctaaatccctgaggcaactgagtgaaatcctgaatttctctgagcttcctctggtataaaaaatgatgaagttgtttgcccctatatgttgcctgaccgaggtcaagggcaagttgttgcagttccttgtcggacaagccgaggagaacctgagactgggagttggcacgtggggaaatggatgcgtagcccacggcagtgaaacaaggtcgcacgtgcgtgcgaggtggtaggcgtaccgcacgtgcgaggggcatggagcagttctgaagtagcgccagcattggattgatcttaccttctcttcagtcttcactttcgcatcagaagaagaagataatcggggggggggcctacgtagctgatc

SEQ ID NO: 2485 - DNA, 2208 bp, Glycine max
tcctcctcttgatcttaaccatgaccaacccaaaactaggctatgccggaatctccgattccggcaaccacattccctcctccaagaaaaaccacaagaagctcctcctctccctcttggccaccctcctcgtggcggcttcgctggtggccattgttgtcggagtaaaaaataaaaactccgacaactctgccaccagcacccccctctccctctcccaccactcacacacgatcgtgaagagcgcgtgcagctccacattctaccccgaactctgctactccgccatcgcctctgagcccaatgtcactcacaaaatcaccaccaaccgcgacgtcatccagctctccttaaaaatcaccttccgcgcggtggagcaaaactacttcaccgtgaaaaaactctttaccgaacacgacgacctaacaaaacgcgaaaaaaccgctctccacgactgcctggaaaccatagacgaaaccctcgacgagctcagagaagcacaacacaacctcgagctttaccctaacaagaaaacgctctaccagcacgccgacgatctcaaaaccctcatcagcgccgccataacgaaccaggtcacgtgcctcgacggtttctctcacgatgatgctgacaagcacgtgaggaaggcactggagaagggacaggtgcacgtggaacacatgtgcagcaacgcattggccatgacgaagaacatgaccgacagtgacatagctaactacgaatacaatatgagagttgaaaataatggacaaaatggtaatagcaataggaagttgttggtggagaatgatgttgagtggccggagtggatttcggcggcggataggaggctacttcaggcgtcgacggtgaaggctgacgtgacggtggcggcggacgggagcggggacttcaagacggtgacggaggcggtggacgcggctccgttgaagagtagtaagaggtttgttataaggataaaggctggggtctatagagagaacgttgaggtgcctaagaagaagaacaatatcatgttcttgggtgatgggaggaccaacactatcatcactgctagcagaaatgttgttgatggtagcaccaccttccactctgccaccgtcgctgtggtgggttcaaatttcttggcccgggacttaacattccaaaacacagcgggcccatcaaagcaccaagctgtggccctaagggttggtggggacctctcagcattcttcaattgtgacatcctagcattccaagacaccctttatgtccacaacaatcgccaattctttgtgaagtgcctaattgctggcacagtggatttcatctttggcaactctgcagtggtgttccaagactgtgacatccacgccaggcttcctagctcgggccagaagaacatggtcacggcccaaggaagagttgaccctaaccaaaacactggcattgtgatccagaagtgtaggattggtgccactaatgacttggagtctgtgaagaagaatttcaagacatatctagggaggccttggaaggagtactctaggactgtgatcatgcaaagtagtataagtgatgtgattgacccaattgggtggcatgagtggagtgggaattttggattgagcactttggtttatagggagtatcagaacactgggcctggtgctggtacttctaatagggtcacttggaaagggtataaggtcatcactgatactgctgaggccagggaatatacccctggaagcttcattgggggctctagctggttgggctcaactgggtttcctttctctcttgggttgtaaattatgttcaacttttgagcattataattgttacctattattgttatgttttttattagcaaaagggctgaagcccaagctagaaccctctacagaaaggcactccctagagaaacaaagttgaccaaaaaatttaaaagaaaacaaaaaaggaaagagggagagagagattattgctggagaggagggggttttagtttgtctttggttgggttttagaacacaccgtgttcttctaccttaggctatttattctgattttgccactggctaaaataatcatgataataagtgtatcagtgtaagccaaagttttggctcgttcaaaaattggatttttgttttcatgttaataagtggatcaatgtaagccaaagttttggctcgttca

SEQ ID NO: 2486 - DNA, 1823 bp, Glycine max
ccatgtgctttcgttcgagttattattttgggcagagagagagagagaaagaagagagatttgaattgagtggtattccaacgtcgaaagcagagaggagaaacaataaggtttctcctaaagtgctcagctacgtaggccccccccccgtctatatgtgactccgccctcaacactctgacctgtggtgtccctcatgtgacaattcgggagctgcaaggtttcggtcttgggttggaatattgggagaacccctccttcgaaaaatcaaggaaaacgaagaagctcgttgattggagaagttggtttaatggctaaagtttgttggccatattttgatcctgagtatgagaacttcagcaatagaatgaaccctccaagggtctctgtggacaatgctagttgccatgattgtacactgattaagattgatagtgttaacaaacctggaattctgctggaagttgtgcaaatcttgacagaccttgacttcgtaattaccaaagcttacatatcttctgatgggggttggtttatggatgtatttcatgtcacggaccagcaaggaaaaaagataacagatagcaaaaccatcgacctcattgaaaaggctctaggaccaaagagcaagagcacagaaggggtgaaaaattggccgagcaaacacgttggagtgcattctgttggtgattatacagccattgagctaattggcagagaccgcccaggtctcttgtctgagatttcggctgttcttgccaacctccattttaatgtttttgcagcagaagtttggactcataacaggcgaattgcttgcgttctttatgtcaatgatgcaacaaaccaagttgcggatgatccaaaaagattatctcttatggaggagcagctcaacaacatcttacgtggatgtgatggtgagaaagtagccaggaccagtttctccatgggttccacccatatggatcggcggcttcaccaaatgttgttcgctgatcgggattatgaaagttatgcagtagcaagagaagttgatagtcctccctctttaaggccaagaatcacaatagaacgttgtgaggaaaaagggtactcagtggtcagtgtcaagtgcaaagatagggcaaaactcatgtttgacattgtttgcactcttactgatatgcaatatgttgttttccatgccacagtatcatcagatggcccttatgcattgcaggagtattttattcgacatatggatggatgcacgcttgatacacaaggagagaaagaaagggtcatccaatgcattgaagctgctattcgaagaagagtaagcgagggtgtgagccttgagctgtgtgcaaaggatagagtggggttgctgtcagaagtaacaaggattctacgagagaatgggttgtcagtgtgtagggcaggtgtatcaacaagaggggagcaagcactgaatgtgttctacgtgagggatgcatcagggaaccctgtggacatgaaaactatggaagcactttgtaaagaaataggtaaaacaatgatggtggatgtcaagagagtgccaagcaataccaaagcacctgagactcgaggatgggctaaaactagtttcttctttggtaacttgttggaaaggttcttgacctaataataatcatgcatagtaaaaggcacatgattatgtacagaagaataaagttgtttgtgtctcaactctcaaacatggactttgacttattaattgttagtatcagaacaatgcttcacaaatattacgaccttccacacttccccatctttcattcaaaaaaaaaaaaaaaaaa

SEQ ID NO: 2487 - DNA, 1081 bp, Glycine max
tagaagaaaacatgatgctggtcgcccttttttttttttttcctcattattcaatcttagcagctgctcatatttctcatctgcgtattaaaaaaaaaaaagcatatggatcctaaaacaaatacagcaataaaatatatccttgaccaaaatctttagttataagatcaagctaacaagtataactacaggagagcaaatcagagcccaccaaagaatcatcgtcctcttgaaattgcttcttccatctcaccgggtgatgaaggaaataactctatgtagcgactgccaagtgtcatcctgtcctttaccattgctgcttttgaatcttcagcacttgcaaattctgcataagcctccccagaaggtcttccctctgaattcattataatatgaatagaatcctctggcagcccaaaatccttgaagaattccattatgtcatccttacttgcagaaaatggcaatccccttagtcgcaacaccccggtgtgctcagctgaatcttttccttcatcatatgatttggcccgggaagcacttcgacgaggtgaaccacctcgagcatctgaaacctcatttgcaattgccttgtagtattcctgcctcttacttctgaaaacttcaacatatcttctacccatgttctgcctgtttctttgaagagcaaagtcaacttgaagaggataccccagaacacagaagccttccccagtgaacttgccacctttgtgaacaaaaaggacatcgactatgtctagcccatggaagaactcagccacatcagtttcagtacaatcaaaaggaaggccacgcagtcgaacaacaggaaaaggtggaggaggaggaggttggctgacatatccgtaaggagatggattgtacataaaattggaacccgtggaagcaccatagaatgaagatcctggatcaacagtgcgctggcgttttgcagccatttcacgcccatcaccaccatcggcaaatttacctctgtagaacattgaatttgaagcgaacaacaaggatgccacttttgtcttggtttcgctgcttccctctctgtatgaatgtaaattcg

SEQ ID NO: 2488 - DNA, 832 bp, Glycine max
gtaatgcaaggatattttatatggaagcacttttggaaaattcccttgattcttactaattggaaaaatacccgcagagaggcctggcatgaaattttcacatttaacttactaacacaaaactgagatattaaaaggcagagcacaagtcacatagatagacacttaagagttctatttacaacctgtaagaaaagcaaaaactagagtaattatctagtcacacgtgcgagggatcgaccccaacggacttgagggtctcgacacgaggggtataagtataggcatctccctgaatgggactaaggatttggtggtgatcagggtagctacgctcttgcacgtgcgccaccttcctgaagaaggatttcttcatgaatttctcagcctcctccgccacgtggtcgggttccaccacttcggggagggtctccctcctctgcttcttcacgctcaccgtcggggaattcctcagttgctgccacgcagtgtggagacccagccctgtggacagagctatcatcccaatcgccacgtaaattgccacaaagtcccgtttggccgacttcccatgttgttgcttgtgtccgtaatcagccgcagctgcatacgctttcatctttggtgctgttgaggttgcgtacgcggctttacctccataactgtttcttaacagtgctaaccaattaccactcattggcctgaaaaccatgtctgcggacagaattgaaccaaaccaaagcgaaaattagtatctggatagttagcggttgatgctacgaaatgagaaatcagtttgtgttggttgcttgatgctgtcggtgtcgctgtt

SEQ ID NO: 2489 - DNA, 1129 bp, Glycine max
cccacgcgtccgcccacgcgtccgcccactcgtccggaaaaattattttcccttataaacgttatctctatctatcctttgaaacgattacctataatttcagagctagctagttcacagcttcagttcgtttttgttgatcctgtgaacttatggctgacggggtggttctgttggatacatgggccagcatgtttgggatgagggttaggattgcattagctgaaaagggtgttgagtatgaatacaaggaagaaaatctcaggaacaagagtcctttgcttttgcaaatgaacccaattcacaagaaaattccagttctgatccataatggcaaaccaatttgtgaatctgcaattatagtgcagtacattgatgaggtctggaatgataaagctccaatcttgccctctgacccttatgagagagctcaagccagattctgggtagattacattgacaaaaaggtgtatgacacttggaggaaaatgtggctttctaaaggagaggagcatgaggcagggaagaaggagtttatctctatctttaagcagctagaagagacactgagtgacaaagcttattatggaagtgacacctttgggttccttgatattggtttgatccctttctacagttggttttatacctttgagacatatggtaacttcaaaatggaagaagagtgtcctaaactcgttgcttgggctaagagatgcatgcaaagagaggctgtgtccaaatctcttcctgatgagaagaaggtgtatgactatgttgtggccgtaacaaaagtacttgagtcaaactagagagacttcttgaataaattcacgtaaggtcttgtgtaatttttatcttatgtttgcttgggagttacttatagcttcctagacacttgagtgtgtctagtgtctgcaggatttgtaactttatcttatgtttgctagccttcagttacttatgattgctagacccttgagtgtgtctacaggatttggagctgaggaaggatggatgttgtaatgtttgttttaagttgtgtgtttatgatcaataaatcactcattttataaggacacataaaaaaaaaaaaaaaaaatttaaaagacgaaaaaaaataaaaaaa

SEQ ID NO: 2490 - DNA, 1340 bp, Glycine max
  misc_feature (12)..(12): n is a, c, g, or t
tcgagtcagctncgtaggcccccccccccaaaacaagaccatatccgtttccttatttttttcttcaattctcttgtatacagttttggtctgtgatttgttgctttggtgagagagtggatatggacgaacggtacgagactttgaaggagcttggttcagggaacttcggagtggcaaggttggccaaagacaaggagacaggagaacttgttgccatcaaatacatagaaaggggaaaaaagattgatgcgaatgttcaaagggagatagttaaccaccgatctttaaggcatccaaatattatcaggttcaaagaggtatttctgacccctactcatttagctattgtccttgagtatgctgctggtggcgaactcttcgagaggatatgcaatgctggtcgattgagtgaagatgaggcaagatttttctttcagcaactaatatctggagttagctattgtcattccatgcaaatatgtcatagagatctgaaattggaaaacactctactggacggaaatccagctcctagacttaaaatttgtgactttggtttctccaagtctgctttgctgcactctcaacctaaatcaactgttggaactcctgcatacattgctccagaagttttgtcgcgaaaggaatatgatggaaaggttgccgatgtttggtcgtgtggtgtgacactttatgtcatgttagttggagcatacccatttgaagatccagaagatcctaaaaatttcagaaagagtattgggagaattatgagtgttcaatatgccatacccgactacgtacgtgtctctaaggagtgtaggcatcttatatctcgtatttttgttgccaatcctgccaagaggatcaacatctcggagataaaacagcacctttggtttaggaagaacttgccaagagagataattgaggctgaaagaaggggttacgaggaaacacaaaaggaccaaccaagccaaagtgtggaagaaatcatgcagatcattcaagaagcaaggacaaaaatccacactggtgagcaagctggcacaggaacttcggatgttgtgcgtggtgatgaggctaatgaggaagttgatattaatgaccactttgccaaatacctaacccttgattaatttgtggttggctaaattccctctctctctatatatatattgtttaccgaagctagtgtgcattcttcgtgtgtatgatatagagttgaatgagacacaacacttcatcgaatttgaaagttgggctattttgtttatcaattataataagaattaatttttgttgtttagataaaaaaaaaaaaaaaaagtgttaag

SEQ ID NO: 2491 - DNA, 3741 bp, Glycine max
gggcatcactcgttgtttctctcttccatgcccaaaatgcgtgtcctctttgtttttctgtttttccattttcatttccctgaaaccctttctgccccaatctcagagtaccgcgcccttctctctctccgttcagtcattaccgacgccacaccacccgttctctcttcttggaacgcctccatcccttactgttcctggctcggcgtcacctgcgacaaccgccgccacgtcaccgccctcaacctcaccggcctcgacctctccggcacgctctctgccgacgtcgcccacctccctttcctctccaacctctccctcgccgcaaacaaattctccggccccattcctccctctctctccgccctctccggcctccgctacctcaacctctccaacaatgtcttcaacgaaaccttcccctcggagctttggcgcctccagagcctcgaggtcctcgacctctacaacaacaacatgaccggcgtgctccctcttgccgtcgcgcagatgcagaatcttcgtcatttgcatctcggcggcaacttcttctccggccagatcccgccggagtacggacgctggcagcgcctccagtacctcgccgtctccggcaacgaactcgacgggactatcccgccggagatcggaaacttgaccagcctccgggagctctacatcggctactacaacacctacaccggcggcattccgccggagatcggaaacttgtcggagctggtgaggcttgacgtagcgtactgtgcgttgtccggggagattccggcggcgcttgggaagcttcagaagctggacacgctgttccttcaggtgaatgcattgtcaggatcactgacgccggagctggggaacctgaagagcctgaaatccatggatttgtctaacaacatgctctccggtgagattccggcgagtttcggcgagctgaagaatattacgcttctgaatctgttcaggaacaagcttcatggagctataccggagtttataggagagcttccagcgttggaagttgtgcaactgtgggaaaataacttaacaggtagcattcctgagggtttgggcaaaaatgggagactcaaccttgttgatctttcttctaacaagttaaccgggactttgcctccttatctctgttctgggaatactcttcagactctgataactcttgggaattttcttttcggtccaattcctgagtcgctcgggacttgtgaatctcttacacggattagaatgggagaaaactttttgaatggttccattcctaaagggctttttggacttcccaaactcacccaggttgaacttcaggataattatctctctggagagtttcctgaggttggttctgttgcggttaatcttggtcagattactctctctaacaaccagctttctggggctctgtctccctccattggtaacttctccagcgtgcagaagctccttcttgatggcaacatgttcaccggtcggatacctacacagattgggaggttgcaacagctttctaagattgattttagtggcaacaagttctcgggtcctattgcgcctgagatcagtcagtgtaagctgttaactttcctggaccttagccgcaatgagctatctggagacatccctaatgagataactggcatgaggatattgaattacttgaatctttctaagaatcatttagtgggtagcattccctcttcgatatcatctatgcaaagcttgacttctgttgatttttcatacaacaacctgtctggtttggtgcctggtaccggtcaattcagctacttcaactacacgtctttcttgggaaaccctgacctgtgtggcccctatttgggtgcttgcaagggtggggttgccaatggtgcacaccaacctcatgttaaaggactctcctcttctttgaagctgctacttgttgttgggttgctattatgttccattgcttttgctgtggctgcaatattcaaggcccggtcattaaagaaggccagtgaggctcgtgcatggaagttgactgcgttccagcgtttggacttcactgttgatgatgttttgcattgcttgaaagaggataatattattgggaaaggaggtgctggaattgtctacaaaggggctatgcctaatggggatcatgttgctgtgaaaaggcttccagctatgagtagaggctcttcccatgatcacggattcaatgctgagattcagacattggggcgaatccgacacaggcacattgttaggttgttgggtttctgttcaaatcatgagacaaaccttttggtctatgagtacatgcccaatggaagtttaggtgaggttcttcatggaaaaaaggggggtcatttgcattgggacaccaggtataaaattgcggtggaggctgccaaggggctttgctatctgcaccatgattgttcgccactcattgtccatcgtgatgtgaagtcaaacaacatccttcttgattcaaatcatgaagcccatgttgctgattttgggcttgctaagttcctgcaagattctgggacatctgaatgcatgtctgctattgctggttcatatggatacatagctccagagtatgcctacacattgaaagttgatgagaaaagcgatgtgtacagttttggtgtggttcttttagaacttataacaggcaggaaaccagttggtgaatttggtgatggcgtggacatcgtgcaatgggtgaggaaaatgacggactctaacaaggaaggagttcttaaagttcttgatcctaggcttccctcagttccccttcacgaagtgatgcatgttttctatgtggccatgctgtgtgttgaagaacaggctgtagagagaccaacaatgcgtgaagttgttcaaatactgaccgagcttccaaagccacctggctctaaagagggagacttaacaataacagaatcctctttgtcatcatcaaacgctttagaatctccatcctcagcctccaaggaagatcaaaatcctcctcaatccccaccacccgaccttcttagtatttaaagtgctctgttgggtgtttcatcttattagttcccttggttgtgatagcttatccatttactttctttttctgtctctcttctggggttggggcttttcttcttcttctaactgaaggtattaatgctctgattttttaatggttttgtacagtaggattggtggggggggttattttcttatgaagtcactttcttcatcatgtagtactgctttttaatttttatgttacggccgttgttgtgcttcgcctaagctggggagtggggagggttcaagggaatggatactctttttttatgcgatcactgacaggtagacacaaaatgacgcaaacgggttgggtattaaacagtgggtatattgtatggtttagaatattattgatgaatcctgagtggattggcacagtgtgaactgtgagcctgagctgtgactgagtctatgagtcaggtttggataaaagcttatttgaagaagttaacctgtttcgagaaaatcagagtgaatcaggattcaggcgtgttttagctttagttcgttgttcatgccgtgacgcttttacagaagttaattcttttgctttagctttttcatttacgagactttgtagcgctaaaaaggatataatttttttcccttgttaaataacaaaagagaggcattggggatgac

SEQ ID NO: 2492 - DNA, 933 bp, Glycine max
gtacgctcaaatttatataatcttattttggttgtctccggtatggaatgaacttacaatcatgaaaatgataatcagatttttgattttaagttcataaccctagcccaaaatcttggtgttacacaaatacaatattatttctctagcatgctacgccaatgcattcattcgcaatgacgtcaaatagtgatgcgtgcctcactacattttcagcagtgtgcacatgcgcacaagaatcggcaaacaccactttcttaaattaagccaggaaaaatgaatacaggagtttggtctgaaaccaaaagtattatctcatccagtattgacataaaaaacgttttaagataattctttatttgaggaaacagaacacagctcatgaccaaacttcagaagtaattggtgttgtagaaattcttcagaaaagtagaggtgcccgggtcttttgtggctgaatcctgcacttgccgaccaactacgtactgaccaatgatatgatgcctctgctttgaatggtccacaacattcttcagctcttccatccccttgaaaagcagcatatcgatcactttgggatcggtgacgtggatgttgttgcggatctgggaggcgacggaggagcggagttcggagacggaaacgacgtcgtagaggttgtagatttccataacggagggtaacgatctgcaggccgttctgaagaattcgaagactcggtgacgcgcttcctccatattcgccgagttcgggagcaccttcacgttccgaagcgccgcgttcgccatgagtaactcgctcgctcgctcactcgagtcagtcacaacaactcgctcggttttgttctgcctttgatttttattgttcttggggggggcctacgtagcttctcgattattgcgatgagagaaatggactatgtgtgacacgcgc

SEQ ID NO: 2493 - DNA, 1142 bp, Glycine max
  misc_feature (17)..(19): n is a, c, g, or t
actttactgttccttcnnntgcataaaatataaaatgatgatgatccttttctcgggtgggcgtgaccatgaagtgctgcttggttcagttgtaaaaccattgcagacataatgttttcggttcattaaaaaattgtcatcctcaactatagacaaaaaaaagacctaataaccaaactcttggtgaaaaattaaacttcgtagagtaagccatcttcgaagtttatggcattcttaaaaggaccatctcatttcataaaattgaatggaagaaccagagatggattccattattccaatgtctaggcatttttctaattacaacaaacctctcacgttgtggttttgctcttcaactatattattaacagtttcttcacacttgtggtttagtcttgaatcttattacattattcttaacaacctgaatgttaactataggcttcgtttcaggaaggaaatcataatatacttatacatacaaaagcagttgctaaaattcacatcttctgttgttgcctctttggatgcgggtgcataattgaggaaataaattttgtatcacaacaatcaccatatgaggttgagtctaggcttctgacggaactgcttttttgtgacgcaccaatgaccaggaaaggtgctcaaattgccaacaatctttgctccaaaccatggagtatcagcaccatatggaggaggtatgactctaattccattggacacgtagggaggaagtaaggcatggagttccttctctatcctttcagccaaaccaggtaagcatgcagtcccccctgataagactatagtcttgtaccaatcactgtcacatgctaaatctgcagaatggcaatgttccacacaaagagctatggcttggtgcagacccatagcttgcactccggcaagatgtggctggaataggatctctgctgtctgaaacctcccttttgaaagggtaaaccatccttctccagcagcttcaaatgatgcttttgtatctttcaatagctcagcttcataatcaagtgcaacatagcatagattctctttcaatgtgcgggcggggggcctacgttgctgacttaaattattcagttgcatcttctccctaagaaatcctgtaagtttcagtgctc

SEQ ID NO: 2494 - DNA, 1966 bp, Glycine max
gagtcagctacgtaggcccccccccgataagcatttgcgtgaaaaccctggtcttctttctcatgcctcttttattgtggtttttttttctttcttttctctctctctctctctgtgaaatggagccgtttgcttagagctgcttcttctgatctttgaatcttgatctagatatctagatacagaattggaaatggattcaaatgggagcctacgtgctaacacctgggcaaggtcgtcgtccttgacctctcctgcaagtggtttatcctcagatcctctttctttcccaggttttggtttgcagcataatcaacaaaaatgggatgttccctcaaattcagattttgggatcagggctgaagcacctttcaaagaattcaatcagccctctcaaacccagtctccgcttccttgcaactcaaacaatgagattgaaatccctggtcaagaaaactgtcatctgagtgaatcatcacaaaccaatacactccaagattgggaccccagtgtgatgttgaataacctatctttcttggaagaaaagattcatcagctccaggatctagtgcatttgattgctcgtcaaaaaggcattggacaacctaatgaacttgtaactcaggaacagcagctcgttacaactgatctcacatcaatcattattcaattgatctctaccgcaggtagtctcctcccttctgctaggcataaccttgtaaacactagttcattggttggacagattgaccagcttcgtgggacgaccattcctcctgggaccggtgcaagtaacggctgtattcaaccacagaataatggtggaaaaatattgtctgatcagtccatgcagactgatctacctaatagtggtgaaatggagcaaaagtacaatatggtagaacatgacttgaaagatgaagaagatgtagaggatggagaaaaccttgcccctggttcatatgagattctacaattagaaaaagaagaaatccttgctcctcatacccatttctgtacaatttgtgggaaggggttcaagagagatgcaaatcttcgaatgcacatgcgaggccatggtgacgagtacaaaaccccagcagcgcttgccaaaccgcacaaagaatctgcatcaccaaagcctatcaagaggtattcctgcccctatcctggctgcaagcgcaacaaggatcacaagaagttccagcctctgaagacgatcttatgtgtcaaaaaccattacaaaaggacgcattgtgacaagagttacacttgcagtaggtgcaacaccaagaagttctcagtcatggctgatctaaaaactcatgaaaaacactgtggtaaggataaatggctctgttcgtgtggcacaacattttctaggaaagacaagctttttgggcacattgctcttttccaagggcatgcaccagccattcctttggatgacactaaaggggcaggggtagctgaggcacccattcatgatagcaaagagaacaacagtaaggtgcagagcatgaacttcacttttggatcaaatccttcaaatgcaaatgaagttccaaatgccatggatgcaaaaggcgatagcgatgatcctatcaattatttctcatcattgaactttgaagccaactttggtgagtttaatgaattcaccagacctctatttgatgacccagaaggttcgttctcttttgtcatgcctggatctttcaaatctggaggagaatctagttctgacaatcttttataacaatggtactaccattggttctgtaataacttaatatctatgtttctcttaattgtgaagatataactttcgggtttgtgttaaatttgtaaagccggtttaatttcatgaccatgcaaatccttaagaaggatgttagattttcttgatgattttataaattataaattgcgcgtctcggttattcagctaaaaaaaaaaaaattc

SEQ ID NO: 2495 - DNA, 1737 bp, Glycine max
attatcttcatattcatcaaactcatcaaaatgaatctgtaccactccaccaccaccaccaccatgttcctcctccttgcaatattattcactctcacaccccacaaggccaacggtgccacgtgtcaccctgaggaagaagcgggcctgttgggcttcaaatccggtatccgatccgacccgtccggcctgctcagtaactggatatcgggtacggactgctgcacatggaccggagtagaatgccactataacagcacccgggtccaaagattattcttaacgggtcaaaaacccgaaaccatcttatcgggtaccatctcacccaccctctcaaaactcaaactcctcgatggactctacctcataaacctcatcaacatttcgggtcccttcccaaattttcttttccaacttccaaatctccaatttatctatctagaaaacaacaatctctcgggtcgaatacccgataacatcggtaaccttacccgattagatgtactcagtttaactggtaaccggttcatcggacccgtaccgagttcaataaccaagttgactcagctcactcagctcaaactcggtaacaattttctcaccggaacagttccccaaggaattgccaagctcgttaatttaacctatttgagtctcgaaggaaaccaacttgaaggtaccataccggattttttctcttccttcacggatcttcggattcttaatttttcttacaacaaattttccgggaatatccccaactcgatttcttccctggcgccgaaactgacgtacttggagcttgggcacaactcactttccgggaaaatccctgattttctgggaaaattcaaggcgcttgacacgcttgacctgtcatggaacaagttttccggaacggtccctgcgagtttcaagaacctgacgaaaatcttcaacctgaacctctccaacaacctcctggtggacccgttccccgagatgaacgtgaaagggatagaatcgttggacttgtcgaacaacagttttcacctggggagcattcccaagtgggtggcttcgtcgccgataatattctctctgaagcttgtgaattgcggaataaagatgaggctagaggattttaagccttcggagacttatttctatgattttattgatctttcggggaatgaaatttcagggagtgcaattgggttggtgaatagtactgagtatttggtggggttttgggcttcggggaacaagttgaagtttgatttggggaagttaaggtttggggagaggttgaagtttttggatttgtctcgtaattgggtgtttgggaaggttccaaacagtgttgttgggcttgagaagttgaatgttagctataaccatctttgtggtcagcttcccaagaataagtttccggcaagtgcttttgttggaaatgattgtctctgtggttctcctttgccaccctgcaacaaagcataagtgtagtaagctttgttgttgatgatttcaagtgtttaatttccttttgctgctaagttttccaataattatgtaatttaataagtaaattgtaattttaactttcaatatatactatatatatttactttaaaacagtaagttgaatgggtataataattaatataatttgctctttttggaaggttggtgcaagatgcggtatgcatgttttctgtgtaatgctagtcctcgtgagcttatgcatgttttctgtgt

SEQ ID NO: 2496 - DNA, 1493 bp, Glycine max
cccctgaaatgatcttataattaaggattgaagaagtataataaacaaataagtatattattttggtcataataataagaaacatggactttagatgtattacttgctaaaaaaatatccttaatttattgtgaaagatgttcatttattctctatacaaattgattaacttgctagaaacgaggatcgaatggtgtgttagagaaatgtaataacttttccccaaaagaaaactttttacgagcaaatatgtaaagcataaattccatatattacctaaactacgttgggcttcattcagaatttggatttacatatatattacctaagaatttcattaacaacttttatttcattgactgattaacttatgaaaagcaatatctgaaaaacaaataccaaaccaagtcaaaataaacgaaaaatagaatgtgtagttttttccaatgttagccagccgacctaaagttcttgaccaattgcttacacacaatatcaaaatctcatctcatctaataataataaaccaagggagaatgagagtttcggaatcacatcagcaaacgccagtttcctcacatcataggaagcaacaatttaaatggtagtcctcacttctgcagatggcactgaccttgttcaccacttggtgtatgagacatgagatgcaagctattgaatgtgacttggaaactgcattccaggggttgtttgcggtggcaccatggcggatggcgtgtaaggatggttatgcatctgttgcatagactgaggtggacctgtcccccatccagcctgagaatgagacatcagagtttgctcagtaactggtgcgtactgagctccattgtaatgttgaggaggagggcccgtcatcggaactggatgttgccctaaaattgagggctgagcattcactacaggtggaggtacattaggaatggtatagtctctacttctctcattattcacctttatactaagatcagtatgacgtgaatacgagatgtgaagcttgcaaaaacctccatcatatatgcagtgtccttccaaggtttccttggccacaacagctgtttggatatctggatattgaatcagagcctgtaaaccaccattcttgtcaaacattgcaatcttttggacaggtccaaaggcagagaaaaccatgtgtaagacatccaaggttacagtatactgcatgttctcaatagatgcaagaagaacattactctcggcctccagtctcttcccatccaaacccaccatgggctgtccacttccctccatggcagattgagcaacaggaaggtaaggattagttgtagtctctgcttctgttgactttgaaacttgacacttaagtctgaatgtccagaatatgtgatcttaaggccacatggtcctatatgttcaggaagcaggtacctaggtatgcttcttcccggacgcgtgggcggacgcgtgggcggacgcgtgggcggacgcgtggg

SEQ ID NO: 2497 - DNA, 1781 bp, Glycine max
ggtaataacatgatattacttcgtcatccatacaaaatcgattatactggattacatcttattctcaaacacatatacaccaaaacagaatattttgtttcatagttaagacactcaaaagttgttgaccaatagcttacagacccgttcaatattcaacatctgaaaaatgacagaagggaaagatgagaaggggaaccctaatttaaatgacagtcctcaattctgcataagccagcgctaaccaatgtagagatctatttgagacaaaggagatgcatgctattgagtacgatcagatcgatatgagggcaatgttgttgtaggttgtgctgtgttgtaacttggaaattgcattccaggggccatttgttgtggcatagttccagatggcatgtaaacattattgtgcatctgcattggcatagactgaaccgttgttgctggtggagctgtcccccatccagcctgagacccattgtatggttgttgtggagggcccatcatgggaacagattgttgccctaaaattgagggttggacgttcacagcaggggtattaggaatggtatagtctctgctcctatcattattgacctttatacttagatcagtatgtcgtgaatatgaaatgtgaagcttgcaaaaacctccatcatatatgcaatgtccttccaaggcctccttggccacaacagctgtctgagtatctggaaattgaatcagagcctgcaaaccaccattcttatcgaacattgcaattttttggacagggccaaaagcagagaaaaccatgtgtaagacatccaatgttacggcatattgcatgttctcaatagatgcaaggagaacattactctcagtctccaatcttttcccatccaaaccaaccatagcctgtccacttccctcgacagctgatggagcaacaggaaggtaaggattagtatagtctctgctcctgtggctttgaaactttacacttaaatctgaatgtccggaataagtgatcctaagggtacatggtcccacatgctcaggcagcagatacctaggtatgcttcttccatccaaagcatccttcgcagaggtggcagtctctgcatctgagaattgcaccagtgcctgaaatcctgctgtcttctcgaaagtagtaatcttatgcacaaatccaaaggctgaaaaaaccaagtgcaagacatcaatgctgacaagacgtgcatctgcaccctcaatcgttaccaacaatacattcccaggaacatctgcagcagttttgttattcactatttcttgcctatttgaatattgtaggtatacagttttccctcgtacttgagcaggctctgatgatgaggcatagtatgatatcattgcaatggcttgattcaaatctgcaaattcaataaaagcttgatttctatttgccccaacattgcattttgtgttaacaactttgccaaacggcttcccaagctcaatcagttcctcctctgtgcactcccacggcaagttcctcaaatgaagcacctttgacggcggctgagtgtaacggaactgtggctgactagataccgatgccatttcaaacaatgactcaaaatctgtcgaaaagaaccagaaaatttgcagccccttggactgagagaattgagaggacgagaagggctctggtttttttttttttttacgagttaacgggattggggttctcgaaaaaagggaaacgataaagaaggagcttctccgttatcaacaggagcaccacgggcaaagacaag

SEQ ID NO: 2498 - DNA, 786 bp, Glycine max
aaggattagtgtagtctctgcttctgtgactttgaaacttgacacttaagtctgaatgtccagaatatgtgatcttaaggctacatggtcccatatgttcaggaagcaggtacctaggtatgcttcttcccatccaaagcatcctttgcagaagtagcagtttctgcatctgagaatgccaccaatgcctggaatcctgctgtcttcctcaaaagtagtaatcttatgcacaaacccaaaggctgaaaagaccaagtgtaagacatcaatgctgacaaggcgtgcatcttcaccctcaattgtaactaacagtacatttccagcaacatctgctgcagttttgttattcactatttcttgcctattggaatattgtagatacacagttttccctcgtacttgagcaggctccgacgatgaggcataatacgatatcattgcaatcgcctgatttaaatctgcaaattcaataaaagcttgattacgatttgctccaacgttgcactttgtgttcacaactttcccaaatggcttcccaagctcaattagttcctcctctgtacactcccacggcaaatttctcaaatgaagaacctttgacggtggctgcgtgtaacggaactgttgctgactagacaccgatgccatttcagataataatgctaaacctgagagtggtaaaagactctgattcttgaaatgtttgccaaactagggttcccaaacaagcgctgttatgtttcctccgcaggagaagcttcagataacccaaccccggacgcgtgg

SEQ ID NO: 2499 - DNA, 1784 bp, Glycine max
  misc_feature (11)..(12): n is a, c, g, or t
  misc_feature (23)..(25): n is a, c, g, or t
aacctaaagcnnaattcaatatnnncccaccccaaaataattttttttttttttttaagttccaacgaagaaagctcttcatctccgcctgtttccaaggacaaataaacaacctcccccaacacaatttaatcccctcccagagtacaataggtgttaagttgtcctcagtaaatgtgtaataaagaatgatgcatctgagaaagaagaatatttgcagaagtaaaaatatttggatagatacacaggttccaacaaaatattatctcctaccggtggcagttttgcctttgcttaaatcagcaagttcttcaataagctttctctcatcattgctcagtcttttagggatttcaacttgcacacgaaccaattgatcacccctcatattgtctttattcaggaagggaacacctttcttagccataacaagtgttgtgttcggttgtgtcccagcaggaattttcaaatcgaccgttccatctacagtaggaaccttaattgtagtccccaggattgcatcaatatacgaaaccttgcaggtgtataaaatgttggtgtcatcacgtttaaggatgggatctgggataacctcaataactacaaagaggtcaccaggggaaccacctttccttccagcattcccctcattccggacccttagacgactaccagagtccacaccagctggaaccttcagacttatccgttttgatttccttacccgaccatccccagaacatgtattgcaaggtgttgaaatttctccagtcccattgcatgaagagcatgtcattgactgctggaagatgcctaatggagttcttgttgatgagacaacccggccttgacctccacaagtgctacatctggatggtgtagtccctggtttagcccctgaaccattgcaagttccacagctctctaatcggcttatctctatctctttttctatgccaaaaactgcttctttaaagttcaaaacaagactgtaatactcatcttcaccatcaattgctccattccaagaacctctggaacctgcgccacgattcatgccctcaaacagtgattcaaacagatcaaatggattgctgaaatcccccatccccattgcagaacctttaagcccagcctctccaaacctgtcatatatggatcgtttctcatcatctgataacacctcataggcattgctaatttccttaaatttttgttcagcaccaggttctttgttgacatctggatgataattccgggcaagcttccgatatgcactcttaatttcagatttactagcatttcttgaaaccccaaggacagaataataatcagcatttgctctaacaattaaccttgatcccttgcgatgattaaaagtttggggtgcacccacattgagtagtgtggaatcttgagaaaaaaagcttgaacttgttgcagccataaaacttaccctgccagtagaattgtggctggatgatgcaaccttgcccgtgatactggatcttagtaacagctgaggatgaattccccattgtgcagcagatgtactactaaaaggtgttattgccatctaatatatgaccttcgttgctgaacttctgctagctggtggtagtatttgtggttccctttttagttttttttaaccttagacgcttcgtttcgctctctctgagttgaagaggatgaggctattgccttgcctcgctcgttgaattgatggtggacaccctaataatattattgcgtttctcgggggggggggcctacgtagctga

SEQ ID NO: 2500 - DNA, 1551 bp, Glycine max
  misc_feature (1187)..(1192): n is a, c, g, or t
  misc_feature (1331)..(1335): n is a, c, g, or t
ttttttttttctttttgttttttttggctttataaataactttaaataaattagtatacatttccaattttgtctaaaaacaacacttgagaaaataaagatggcattgcacctgagctgtagtccttccccacccccacccttaaaaaaacaataacattgctaaggcatataataagttccaaagaaaaagaaagatctctagtttcttctgctcttcatatctgcctgtctataaataaaaaactagtaacctacatctatcaatatatgctaaccaatcccaccacagttctgaaatgaatagctgcagccccgagttgtgagtctcaaggtcaagaatgaaccatccatcataaaaggaaatgaggctagaaatacataggatacaggttcctcaataagttatctcctactggtggcagcagtcttgcctttgcttaaatcagctagttcctcaataagttttctctcttctttgctcagttttttggggatttcaacttgcacccgaaccaattgatcacccctcatattctttttattcagcaagggaacacctttcttagccataacaagtgtcgagcttggttgagtcccagctgggatttttaaatccaccatgccatccacagtaggaaccttaattgttgtccccaagattgcatcaatataagacaccttacatgtgtataaaatgtttgtgtcatctcgcttaagcacggggtcagggataacttcaagaatgacaaagaggtcaccaggagaacccccacgccttccagcattaccttcatttcggacccttaaacgactgccagaatccacaccagctggtaccttgagactgatccgctttgtctttctcactcgaccttccccagaacatgtgctgcaaggtgttgaagtttctccagttccattgcaagaagagcatgtcatagactgctgaaagatgcctaatggagtccttgtcgatgtgacaacccgaccctgaccaccacaagtgctacacttggatgatttagtccctggtttagcccccgaaccattgcaggttccacagctctctaatcgccgaatctctatctccttttccaccccaaaaacggcttctttgaagttcaaaacaagactgtaatactcatcctcgccctcaactgctccattccaagatcctctgcttnnnnnnatgccacccatgccctcaaacagtgtctcaaataggtcaaaaggattgctgaaatcctgaaatcacaaagatgtgtctttgagaaacaggaaatatgacaacaaagtcaaattcctcatcatctttaaaagtaacttannnnnatgcccattcctgaacccttaagtccagcctctccatatgtatcatatatggatcgtttctcatcatctgacaagacctgcaaaagaatttgaattacagaagatcaattacgagtagacatgcataatggccagctgtgttcaacaagctgtagatttacctcatatgcattactaagttctttaaatttctgttctgcatcaggttctctgcag

SEQ ID NO: 2501 - DNA, 948 bp, Glycine max
gacgtgacaacccgaccctgaccaccacaagtgctacacttggatgatttagtccctggtttagcccccaaaccattgcaggttccacagctctctaatcgccgaatctctatctctttttccaccccaaaaacggcttctttgaagttcaaaacaagactgtaatactcatcctcgccctcaactgctccattccaagatcctctgcttccccccatgccccccatgccctcaaacagtgtctcaaacaggtcaaaaggattgctgaaatcccccatgcccattcctgaacccttaagtccagcctctccatatgtgtcatatatggatcgtttctcatcatctgacaagacctcatatgcattactaagttctttaaatttctgttctgcaccaggttctttgttcacatcaggatgacaactccgggcaagcttccgataagcactcttaatttcagatttactggaatttcttgacaccccgaggacagaatagtaatctgcatctgctctaactatcaacctcgatcccctgcgacgatgcaaagtttgtgatgaacctttgtcaaatagtgcatgcaaggaatctcgagaaaaaaagctcgaacatggggcagccataaaccttatcctgcttgtagcattgttcctggatgatgcaatctttcccaacccagttgaccctgcgaaaatctgaggatgaatcccccattgagtagctgatgtattaccaaaaggtgcaatagccatctaatatattttcagcaggataatatgccaaaaaaatacaaaatttctcgatgaaattctgctagcttagtgggaacgagaacgagtgggtgtgggaattggaggatgaggttacagtgctgtttgaaatggagcactcttatttgctttgcttataccttataggatgacacagagaacctcgtggacgagtttc

SEQ ID NO: 2502 - DNA, 963 bp, Glycine max
gcaaaagtaaccccaaccaaacatgcactgtggtcttctcttctgttttgcaacaaataaagccatcgttcaatattaacccaggaaaccaatctaaatccaaggtgaagaagcatcaaataaaattccagaagtcaaaattttggatattgtttaacacaatatgtatttctaacagaaaaatctaccaaaaacaatatactccagtaaaccaagcagcatctcaggcttctgagattggatactcaaatactacatcttttccagtaagctttctataaactccagaaaaggtctccagcttgtactcagtgttgttgcgctccttggggtccaagaaaaccttcattatttttgagccatcaattctatatctggcccgtttgccaacaatctctgcaggatacacaacatcctccagcatggcatcatggacagcggtcaaagtgcgggttcggggtcgctgaacagcagagcctttctttggcggtcgcacgatcctccttgtggcaatcaagacaacatccttcccactaaacttcttctccaactctctgacaagtcgaagatgaatcttgcggaatgccttcctcaatctgaaaggcacatagatgactacagccttgcgattaccagccacatccatttgaatagcttggtttatgtagagatctttcaagtcacttttcagatcctgattggtgttctccaagtcgaacaagtactgtccaactgtctcctcaaattcagtgggctcggcatccttatccttgtgaattttcttcctcgaggtgtacattttgttcaatcagatgaagagagtgaggaacccttctgcttcagcacgagcgagcgaaagagagcgaaagagaaaggaggcgcttacaagggttttataaggaaaactgagaacaacgttcaggttttcccgggggggacgatgtataagggttttataatctc

SEQ ID NO: 2503 - DNA, 1869 bp, Glycine max
  misc_feature (1828)..(1829): n is a, c, g, or t
ttttttttttttttttttttgtttagtgcactaataaaatcatactataaaagtattaggcattaagcatggcaaactattgtaggacaactaatgattcctcataattacaattcaaaatttctgtgcctttgtaaacataaaattacttcacagtataaaattgtgcaaatgtgattacctaaatttcaacaagattcttttgactatagatttccatggactgttttccatatggacttctaagtaaacttcctacgtacatttcttttgctaagactaaggggaggagaatctttagcaatgacagaagagccagcttggctaacacgcaacctctttgacccacgttgccttgggtatgggtgaattttagccaattctcgcacacgatgtaccacattaaatggcaagggacgcagggcaagctcgtcattttgctcagcctctctcgaggttttctgtgcagaactggctctcaaaaggttccgccacttgtccctgagatctatgggagttcggtagcttgaagaagaaaacagaaacctctttatgtcagtccatcgaccaactccatattcagatatgccttcaaccaacttcaacacttcagggagagtccacatcttctgatgctttcttcgatctttccttctagatctttttgatgtcgaacattcatcctcggattccgagggaaataactccttgtcaggcgcgggtctctctttccggatccgccttttgcgaacttgcaactcaggaagcatcacatcactattttcattactagacttctcgcttggactctttttcaatgctttaattcttatatgaagtacatcacatgatgagtcacttaaatgttcagtttttgtaacagcagttggtgccttttcctttgaccttgaatttgaaaattcttcaatgtacctctgggtaggctttcggaatctcttctctctaagtacagcaggttggcctttttcaacaggaccttttcccttcttacaagtcaatataccagcagctaaatgactattgttttccaactcttgcagatgttgtatatcaagtgaaatgttgtatctgcaatttacttttgatggttgacttggattgttcctgaaggcaccatgtgcttcataggttattgtctcatctagagaatcatttttgcattcagattttgcaataggtactttggttgattctaaaaccccaccaacaatgctacttccgcttaatccggaagaatgactttcagaacttgaaatttgcaagagtgaaccttcaaaaggacctgagcctagtacctcctcaaatttgtcggcaaatccaaaatccaaaaaatattcttcacatgcaccagcaaaaccaccagttccttcaagatcatcaatttcaacatcatccagcaatccatcaaggacctccagttccaaatcatccttgtcattcaaagttgtatgagaatccaaactaccatccagggaagcatgaacgtttctaggttctgcaagcaaatgctcaacttccattacttcatcttgaagagcaggtacaaatgattcatccacctgaactctttggcatttcatattggaacacttccgcaaatattcttcccgatccatctcatgccctcgaagtgttgaattgaagacagagagagtgagagagaaattcgtgcgaatgttcgaaaccgaaaaaagcccaaccccgccaaaaaagcgtcacgaaacggagggatggaaggtgaggtgtttcttattcgacggaatcccaagtttttttaaatttttttttttttaatttttccgacgcnnacggacggcgtgggggtcgaaccccgggaaaatttccgga

SEQ ID NO: 2504 - DNA, 1483 bp, Glycine max
ggattgcctcctctggatttttgcattttgccaatgtttcggttgggacaccacctttatggtgcttggtagcattggatacagggagtgacttgttttggttaccttgtgattgtatcagttgtgtgcaaagtggtttaaagacaagaaccggaaagatacttaaatttaatacctatgatcctgacaagtcatccacaagcaataaagtttcatgcaacaataacaccttttgtagacaatcgcgccactgccctggccccccccctacttgtcgatatcaaattgattatctttcaaatgatacttcatctaggggattcgtggtagaggatgtgttgcacttaattacagatgatgttcaaacaaaagatgctgacacaagaattgcttttggttgtggccaagttcaaactggggtgtttctaaatggggcagctccaaatggcctatttggacttggattggataatatatctgttcctagtatcctagccaaagaagggcttatttcaaattccttttcaatgtgctttggacctgatggtgctggaagaatcacgttcggtgatactggcagcccggaccaacgaaaaacaccattcaacgtcaggaaattgcatccaacttataacatcaccataacacaaattgttgtggaagatagtgttgctgatcttgagtttcatgcaatttttgactctggtacctcttttacatacataaatgacccagcttatacacgacttggtgagatgtacaattcaaaagtcaaagcaaatcggcactcatctcaatcacctgattctaatatcccctttgagtattgttatgacataagtataaatcagacaattgaagttccctttttgaatctaacaatgaaaggtggagatgattattatgtcatggatcctatagtacaagtttttagtgaggaggaaggagaccttctttgtttgggaatccagaaaagtgacagcgtgaatatcattggacaaaacttcatgattggttacaaaattgtctttgatcgtgacaacatgaatcttggttggaaggaaactaattgttctgatgatgtgctctcaaatacatcaccaattaacacaccatcgccctctcctgctgtttctcctgctatcgctgtgaatcccgtggctacatcgaatccatcgattaacccacctaatcgatcattcaggattaaacctacctttacatttgtggtggtccttttgccacttatagccattttttgagcattcctatgcccattccatcatgtattatttaagtagtttttttttttttcattatagttgattacacgagaagcattattgcttccctttttttccaccagtcataatagcctctgatggccttgtgtatagcgtacccaacatagatgtaaactagagaaagttcagttcttatataatactccatccagtttctaattttaaaaaaaaaaaaaaaa

SEQ ID NO: 2505 - DNA, 1712 bp, Glycine max
  misc_feature (594)..(594): n is a, c, g, or t
tcagctacgtaggcccccccccccattttttataagtcgcttgctttttttcttcttcttcttcttcttcttttttcattcattcatttgtatttaatctacattacaacttttttttttcattcattcatttgtgttagccttgtatgtttatttataagttttaaccttaagtatatatcatttgttttctgttgatattttatacctattaacctgtgcataataagtgcagtatatctttatagagtgaatagcttctgtacgctttctgcttcaatgaaagactctaactaaatataaactgactggagctggttattgtttagctgtgtaagcagagttgtgtccataaacttagtcctgtatggagagaaacatgcacgttccttgctttctaagttttgtcattgactacatcaggacagtgtccccgattcattagtatgcatgcagatatatgaaggggtataggccttgggaaggaaaagaaggattttgctcctctaaataagggaggaaaaatttgagaaaatcacattccttgttgtttgtttccttcttttggaatttaactatgtaggggctctaagnctgattttgagagtgttgttaaatatctgctatagtggtattgcattgcagaattccttggatctgtaattgagactccgtccactactgcaactgctatgggtcttgtggttgtggcatgtgtcatacatcctcttgtcatctttgatcctcgcccccgcaaagaaccactaagttggagtactcgaatgaagattgctgttggagctgctcgtggccttgaatatctccattgtaaagcagatccacctgttatctacagggacttgaaatctgcgaacatcttgttagataatgaattcaacccaaaactgtcagattttgggcttgctaaacttggacctgttggagacaatacccatgtttcaaccagagtgatgggaacatatggttactgtgcgccagagtatgccatgagcggcaaattaactcttaaatctgatatatatagctttggtgtggttttgttggagttgatcactggacgtagggcaatagatactaatagaagaccaggagagcaaaacttggtttcatggtctcgtcaatttttcagtgaccggaaaaagtttgtacaaatggttgaccctctgttacacgaaaacttccccgtgcgctgtttgcatcaggcaatggctataactgctatgtgtatccaggagcaaccgaaattccgtccacttattggtgatattgttgttgcactggaatacctagcttctcatagtaatccctgaagtccatagacatggtgggcgcagctcaccacaacagtcaccttcagaaatggacaggatttaatattcaaaggtatctgattctagcttgagttccattttgtatgattttgggtgcagatttccttaccggtttggtcagtgtaagctaccaacttggctatttaaagtgttatgtgttattgctttaattaacttattgccacagcagtagtgaagataaacttcttgatatagcagtagtaaacatgtgaattgatttaattgcaatggacatgagtttatgcttgtttaggctttaaacttctacgaggcacctataacacgtttcttgtgacttgtttaaaaaaaaaaaaaaaaaaaaaaaaaaaaaaaaaaaaa

SEQ ID NO: 2506 - DNA, 1990 bp, Glycine max
tgccggtgtttcaaaactaacagacaaaacacaacacaaattcagattgtttcctacgcgtcttaaattttatcttcgaggttgcatttgaactttgcgcaacctcattattattaaattaaattcattgatccctcgcctagagaggggaaatccagaaatactctgattgacttatatacggatcttatttttttttattatttaatttaaacgaaatttagttgtctgtagcgccgatgagttgcttttcgtgctttgtttctcgccggaaagatgtgagaagggttgaaattgacaatggctctcgatctgctaccgctactgctacttcttcttctgagagtgaaaggaagagggaatcctcagaggggaaggggaagaagagtgtgagtagtagcagtaacaaaggaagtacggcagcggcaagtttcggttttcgcgaactggcagaggcaacgaggggtttcaaggaagtgaacttactcggggaaggtggttttggaagggtttacaagggtcgtcttgcaacgggagagtatgttgccgtgaaacaattgagtcatgatggtcggcaaggttttcaggagtttgtgacggaggttcttatgttgagcctgctgcacaattctaatcttgtcaagttaattggctactgcactgatggagatcaaaggcttttggtttatgagtacatgcccatgggttcacttgaagaccatctatttgatcctcacccagacaaagaaccactaagttggagtactcgaatgaagattgctgttggagctgctcgtggccttgaatatctccattgtaaagcagatccacctgttatctacagggacttgaaatctgcgaacatcttgttagataatgaattcaacccaaaactgtcagattttgggcttgctaaacttggacctgttggagacaatacccatgtttcaaccagagtgatgggaacatatggttactgtgcaccagagtatgccatgagcggcaaattaactcttaaatctgatatatatagctttggtgtgcttttgttggagttgatcactggacgtagggcaatagatactaatagaagaccaggagagcaaaacttggtttcatggtctcgtcaatttttcagtgaccggaaaaagtttgtacaaatgattgaccctctattacaagaaaacttccccttgcgctgtttgaatcaggcaatggctataactgctatgtgtatccaggagcaaccgaaattccgtccacttattggtgatattgttgttgcattggaatacctagcttctcatagtaatccctgaagtccatagacatggtggtgcagctcaccacaacaacctccttttgaaatggacataaattaatatttacaggtatctgattctagcttgagctcccatttctgtatgattctgggtaatgatttccttaccggtttggtcagtgtaagctaccaacttggctatttaaagtgtcatatgttattgctttaattaacttattgccacagcagtagtgaagataaacttcttgatatagcactagtaaacatgtggattgatttaattgcaatggatgagtttatgcttaattagacaaaaaaaaagtcatatattattgctttaattaacttattcccgacattgattttgcaacaccctagaccagactggagctggagtgttattgagtgacggtagctctgatataaaataaatgaaagttatggtatatatagagagagcggggatatatgcttgagattgtgcttatacggtactttcttcttttctctcgggtcttgttttaaggataaattagcggcaatatgggtgtagcttgtacctatttttttatttttttattttataactagcttgtacctatcctggtgatgccttgttgagctttagaccaaaactgaagctttttgttataaagtactgttatttaatatttacacaactccctc

SEQ ID NO: 2507 - DNA, 1270 bp, Glycine max
aacttagagattaacttcatctcagggagataaataacccatatttacacttagtgcaatgtacccaagtaacattctgacataaaatggtttttcgacgcgagggggataatgtcccaatttaagcaataatctcttaatctactagattttcttttctgaatactttctgcaagcccgcatctgcaaccaaaacttcagtaagcctgactgcagtgacgacaagtgaaactgacaaatgcagaaagttgacttgaggccccgaatagtaacccattgtaaaaagatgggagcataacgtcaaggaaaaacctattgtgcattataacttttggtatcctgtgtattccaacaggaatagcgagcactaagcaactatagactagattttttacaaagattatcacttactacgagtgaaccagcctgattgggttttctgtcaattttctccaaaccatcctcccacaatgaatcaaggtcaagattgcaaccaaataaagaagaggaatgccaacagcacaaccgccaggggccaaattcaccagagtcattccagcgacaacgtgaacaatgggaacaaaatattgatccactttgttcccctctgagtacccattaaatgcgatgaccattgagaaagtgtggattgtgaaaatgcaagagcaataatcgcagaaagaaggaaaaatggaacttttgaacacctgtcaacgaaatatgttgctggaccaaatgcaggagttaataggctgatgcagaagaacacagcatgggcaacaccatgacccaacccaccagccagagcaatcagcatcttatctgtcaggtgaagatgtggttttgatattctatcagcaaaggcatctaacatatcttgtaacctcttatatattttccaggagaaaagcctgagggcttcttgaaaagcaacagatgagaaaatgagtattccaaaaggccaccaagctgttgtgttgagaggcaaaacccccctccatattccagacagcacaatcaaacttataagccacagcagtgtgctggagagaacggtgagaatgaggaagggttttttggaaatgacagaaacgaagatggagagagagggtcctaacgctagcagagcgtaacccattcctgctgctaccgtcatcgctcgctctctaaggaacagcagaatctcagaagtaaccaaacacttcctaaactccttctctgctcagctcctcccactggaaaaaggtggaaaccaacaaaaacgagatcc

SEQ ID NO: 2508 - DNA, 914 bp, Glycine max
ttcgagctcggtacccccgaggaattccgatctcatttcctttggcttcaggataggcctaataagaaaacaaataattccaattcatatatgaacatttttgcctccttatttcttgaaaatgtggaattggaattcctttcctttggcttcaggataggcctaataagaaaacaaataattccaattcatatatgaacatttttgcctccttatttcttgaaaatgtggaattggaattccccgaggaattccgatctcatttcctttggcttcaggataggcctaataagaaaacaaataattccaattcatatatgaacatttttgcctccttatttcttgaaaatgtggaattgggatcccccgaggaattccgatctcatttcctttggcttcaggataggcctaataagaaaacaaataattccaattcatatatgaacatttttgcctccttatttcttgaaaatgtggaattggaattccccgaggaattccgatctcatttcctttggcttcaggataggcctaataagaaaacaaataattccaattcatatatgaacatttttgcctccttatttcttgaaaatgtggaattggaattccccgaggaattccgatctcatttcctttggcttcaggataggcctaataagaaaacaaataattccaattcatatatgaacatttttgcctccttatttcttgaaaatgtggaattggaattccccgaggaattccgatctcatttcctttggcttcaggataggcctaattagaaaacaaatgattccaattcatatatgaacatttttgcctccttatttcttgaaaatgcggaattggaattccccgtggggatcctgtagagtctacctggatgcatgcaagcgtgtatctacctttag

SEQ ID NO: 2509 - DNA, 1135 bp, Glycine max
  misc_feature (22)..(22): n is a, c, g, or t
  misc_feature (1124)..(1132): n is a, c, g, or t
agctacgtaggtcccccccccntagcttccacacaaagtgttatggatatgattgcttttttttctaaattttttatgactgctttcccacctattgtttggctttcaattttatctaaaatatttttttcagctttattgtggcagctcatgcgattcacaatgcttcaactgttgaaaaatttgagatctcattcccaaggaaaggagatcactgatgctgatatcctgaaatgggtgaacagaaaagtgaagagcactggcagaacttctcacatagagagcttcaaggataagagcctgtcatgtggactctttttccttgagcttctgagtgctgttgagcctaggattgtcaattggaaccttgtcaccaagggtgaaagcaatgatgagaagaggttgaatgccacttatataatcagtgttgcacggaagctcggttgttccatatttttgttacctgaggatattatggaggttaatcagaagatgattctcactcttgcagccagtataatgtattggagcctgcaacaacagactgaggacatggattcattcccttcacctgccggcactgctactaccaccacgcctgaagcatccccggcaccttcggtatgtggtgaagatgaaagttcctctattggcggcgaattctccaacttgagtgttgatgatgccacctctgacaccacagcaacttcttcgcaacccgagtctgacagtgtttctgcgggagatgagctgttatgagtcatctagttggcatgagatgagtgttaaatgtttttgttagagaatataacgagtaatgaccttgcaaagcttaagaaacgccttcaaaaaagttagggatgtaaacatacctttagaatagtatatgtgaatagtctgtacaaaaatatcttgttctttggagagaaatgcttattcagagggatcagaatgaataaagcttagaggggaagaaagaaatgaatgtgatcaattcacactactcccttatattgcctttaagtaggttccactactgtatttgtattttgtcattcgttacgttatgatggccaacaatggtgaccatttaccgtctccgataaacagaaaatttataattnnnnnnnnntca

SEQ ID NO: 2510 - DNA, 2083 bp, Glycine max
cccacgcgtccgtacggctgcgagaaacgacagaaggggacgcgtgccacataacttggatcactatttcttcttcttagttctcactctcactgtctccgtcgtctttttctccaaagtttcggtgctgacggatagaacactacctattcagccgccatgcacactctcctccgatccactctcaggaccaagactgcttcatctttagcatatgctgtggtttccagaagtgctcacgaaaatctccttcaggctcccttattgtctagatcaaatagcactgaggcttcattggcaaaggataattcctctaatgatgtaaaaaatggtcaagggtacaaaggtcatagtatgcttgctcctttcacggctgggtggcagtcttctgatttgcaccctctgatcatagaaaagtcagagggaagctatgtatatgacattaatgggaagaaatatcttgatgcacttgctggtctatgggccacttctttagggggaagtgagccacgccttgttgatgctgccgttgcacaactaaagaagttgccattttaccattccttttggaatcgaaccacattaccttctttggatctagcaaaggaactcctagaaatgttcacagccagaaaaatggggaaagctttttttgttaatagtggatcagaagccaatgacactcaggtgaaacttgtatggtattataacaatgcgcttggaagaccagataagaagaaattcatagctcgtgctaaatcgtatcatggttcaacattgatagcagccagtctttctggccttccggctctgcatcaaaaatttgatttgccagctccttttgtattacacactgactgtccacattactggcggtatcatcttccaggtgagacagaggaagaattttcaaccagattagccaataatttggagcagttgattctgaaagagggaccagagactattgctgcatttattgctgaacctgtaatgggggcaggaggtgtaatacctccaccatcaacttattttgagaaggtccaagccgttgtcaagaagtatgacattctttttattgcagatgaggtaatatgtgcctttggaaggcttgggacaatgtttggatgtgacaagtacaacattaagccagaccttgtatccctggctaaggcactatcttctgcatatttgccaattggagctgtccttgtaagcccggaaatatcagaagttatacatgatcaaagcaacaaactaggttcattttctcatggttttacttattctggacaccctgcagcctgtgcagttgcaattgaagcactcaagatctataaggaaagaaatattgttgaccaagtgaacaagatcgccccaaggtttcaagatggcataaaagctttttctgacagtcccatcattggagagatacggggaactggcttgattctgggcactgagttcacagacaacaagtcacctaatgatccatttcctcctgaatggggaataggtgcctattttggagcacaatgtgagaagcatgggatgttagttcgtgttgcgggagataacatcatgatgtctccaccatatattatatctcctggagaagttgaagagttaatcagcatttatgggaaagctttgaaagaaacggaaaagaaggtacaggagctcaagtctcagcgcaagtagcttaggcctcatgatggaataataaactctgctgcgcccacttccgggggaaaaggaaatattgtagtaacttgataagactttgttccaaccttttcgttattgtaaatgtcaataaattggtttcctagttgcttcctaattatatgttgtagttatacatatgcttagaataatgctcgttacacatctccacattgcatgtagcgtagcctctcattaatgacgtggcagcatcaatagtgcaagtgtagaaattttagtaagccaaactgtaataaggtgatggaaattgggcgaaagggaaaaatgggtggtcggttgtggttgttgaaaaccaaaacccccccgtcaaccaaagaatgggtgggcatggcccatt

SEQ ID NO: 2511 - DNA, 1861 bp, Glycine max
actcgaaccattactagtttagtcactacacttttttcactttctcgggaaaatcacagcgacgctcaggaaaaactctaaactgtgaaaaaaccactgcgatcaatggcaacgatcaaggccgtgaaagctcgccagatcttcgacagccgtggaaatccaaccgtcgaagttgacgttattctcagcgatggaagcttccacagagccgccgtgcctagcggtgcttcaacaggtgtttatgaggctttggaattaagggatggaggctcagactacctcgggaaaggtgttctcaaggctgtggagaatgttaattcaattatagcacctgctctgcttggcaaggacccaacgaagcagactgaaattgacaattttatggtacagcagcttgatggaactgttaatgaatgggggtggtgcaagcagaagcttggagccaatgctattttggcagtgtcacttgctgtctgcaaggctggtgctgcagtgaagaaaattcctctgtacaagcacattgccaatctggctggaaacaagactttggtactgcctgtaccttcattcaatgttatcaatggaggctcacatgctggaaataagctagcaatgcaggaatttatgattctccctgttggggcatcttccttcaaagaagcaatgaaaatgggcgtagaagtataccatcatctaaaggctgttattaaaaagaaatacggtcaggatgctactaacgttggtgatgaaggtggctttgctcctaatatccaggaaaaccaagaaggtcttgagcttctgaagactgccattgccaaagctggttacactggaaaggttgtaattgggatggatgttgctgcttcagaattttatgataacaaggacaaaacctatgacttgaattttaaggaagagaataatgatggatcacagaaaatctcaggagacagcttaaagaatgtgtacaaatcatatgtgacagattatccaattgtgtccattgaggatccatttgatcaggatgactgggagcactatgcaaaattaacagctgaagttggccagcaggtgcagattgttggtgatgatctccttgtcaccaacccaaagcgggtggagaaagcaatcaaggagaaggcttgcaatgcccttctgttgaaggtgaatcaaattggtagtgtaactgaaagtattgaagctgtgagaatgtctaaacaagctggttggggtgtcatggctagccacaggagtggtgaaactgaggataccttcattgctgacctctcagttggattagcaactggtcagatcaagactggagctccctgccgatctgaaaggcttgccaagtacaaccagctcctgaggattgaggaggaacttggttctgctgctgtgtatgctggtgccaaattcagagcccccgtggagccctactgattgtttagcccaagattactaagcatcatttaaataagattctattgatgactgcataggacatgtattttttgcgaaaaataaacttgtctactacttcagagaatataggttttccgggcgtggaattttgaagcgagaaaataaggcagtagatgtatgcctgatgcctagtttatttgaaatctagctttagggggtgtttggtgcgacaaattgttttccagaatcataatttttgggaattaaaaaattttggtcgtaaaatattttttgaaatatttagataggttttctgaaaattaaagaattatgtgatatttttatctgtttacttaattatttatcataataataacaattgatctaatagaagtattatgatattttattgtagtaaacgaaaattttaattcga

SEQ ID NO: 2512 - DNA, 1791 bp, Glycine max
tcgagtagctacgtaggcccccctgtctctccccgcgcccagcgacgctctgaaaaactcgaaactctgaaaaaagtaaaaaccgctgcgaacaatggcaacgatcaaggccgtgaaagctcgccagatcttcgacagccgtggaaatccaaccgttgaagttgacgttattctcagcgatggaaccttccacagagctgctgtccctagcggcgcttcaacaggtgtttatgaggctttggaattgagggatggaggctcagactacctcgggaaaggtgttcttaaggctgtggagaatgttaattcaattatagcacctgctctgcttggcaaggacccaaccaagcagactgaaattgacaattttatggtacagcagcttgatggaactgttaatgaatggggatggtgtaagcagaagcttggagctaatgctattttggcagtgtcacttgctgtctgtaaggctggtgctgcagtgaagaaaattcctctgtacaagcacattgctaatctggctggaaacaagactttggtactacctgtgccttcattcaatgttatcaatggaggctcacatgcaggaaataagctagcaatgcaggaatttatgattctccctgttggggcatcttccttcaaagaagccatgaaaatgggcgtagaagtataccatcatctaaaggctgtgattaaaaagaaatacggacaggatgctactaacgttggtgatgaaggtggctttgctcctaatatccaggaaaacaaagaaggtcttgaacttctgaagactgccattgctaaagctggttacactggaaaggttgtaattgggatggatgttgctgcttcagaattttacgataacaaggataaaacctatgacttgaattttaaggaagagaataatgatggatcacagaaaatctcaggagacagcttaaagaatgtgtacaaatcatatgtgacagattatccaattgtgtccattgaggatccatttgatcaggatgactgggagcactatgcgaaattaacagctgaagttggccagcaagtgcagattgttggtgatgatctcctcgtcaccaacccgaagcgtgtggagaaagcaatcaaggagaaggcttgcaatgcccttctgttgaaggtgaatcaaattggtagtgtaactgaaagtattgaagctgtgagaatgtctaaacaagctggttggggtgtcatggctagccacaggagtggtgaaactgaggataccttcattgctgacctatcagttggattagcaactggccagatcaagactggagctccctgccgatctgaaaggcttgccaagtacaaccagcttctgaggattgaggaggaactgggttctgcggctgtctatgctggtgccaaattcagagccccagtggaaccctattgattgtttagcccaagatcattaagcaacatttgaataagattctattgatgactgcatggcgcatgtattttttgcgaaaattaaacttgactactatcaagagaacataggtttttcgagcgtggaattttgaagcgagaaaatagggcagtagccaataaatgtgtctatggtttggcttgttataacaattatcatgtgtagtacaaattttggatgaattacgtctaaattgattttcctgcaaattactaattgtgaaatcgaaggcctatgctgtcgatcatgtggtgatctaagctctgctcgttcctcctttgaagtttatgtttgtcatcaattgacgcctaacttatttg

SEQ ID NO: 2513 - DNA, 1138 bp, Glycine max
  misc_feature (2)..(2): n is a, c, g, or t
  misc_feature (20)..(22): n is a, c, g, or t
  misc_feature (26)..(28): n is a, c, g, or t
tntcgtgcatgaaatgatcnnnaacnnntatgtgcccgagcccatcactttctgtctcgagaaagctacataagcttatgaatgcagttcatatgcaaggaatcttgacataaatttaccattatgatatctaaaattactttgcgttttaaaagaataatgatcagaaaaagcgtaacacattattgagtcaaagaaagtgcaccacaatcaaagaaggtcggctgtaatgtaattatctattacatatatagagtcttgccaagatgaatatcataaggtaaagaactccgggtgggaaatgcatcaaaaggaaaaaccgtgaccaccatcatgtgaaaaattagttcatggcacctacaagatccgaaaatgacatcccaatagtcctctagcttgccaaggtctaggtgtaatagttaagttgattactgtgccttgcctcataataacaactggtactgcacaacccagatttgactgagcctcggaagaaagcctttggagcaaattatcacctgcttccacattgccaaatttcaaaatttgatccccaagttgtaaaccatcctctactgctggtgatgcatctgctatctcgtctaccattgcaaatggtctactaatcaacacattcacatccatagagttgggagatcgtatcagaaggacattttgtgacggtgttgatgcaacagtgtccatatttgatgagacctgagtatctgaattcttgaatgacctatttccgagtcttgccgaatggagaatctgaatatttaggttaattttatcagttacttcgttgtggtcgctgcgcagctctgccaggcgacgtcgttcggctcgaacaacggggacgtcgatatcggaatggggaaaatcctcggaatcgacgagatttccggagaggccaggagcgcctggctgggagaggcgggcgatgatggagttcatctcagcctccaaggcgctgcgcttgtccatcagagacatggtttctgccttcacgttcgtcgccaccattgtcacgttccacaccaacgattgttctcaattccgactctgatagactgtatgttgtattttactgatttattctgtacgcactgtattgtgctggaatggaatggaatgg

SEQ ID NO: 2514 - DNA, 977 bp, Glycine max
tctttttttttttttaaaagagaaggaaaaataaacattagctgaagttgcacaaacacaaactaacaaacatagggatccgcatgatccttcttagtacgtacattggccactacagaggatgcctaaaggcacaattttctctttctcacaactagcacatgagaaaactaggattacagagtctggcaaacagaatatgagcataacaatgtacaaaaaagctgactaaacgtgtgaaaactgcaaaaaaaaagtgctaccgacacacttttgaacaatctcttaccccacaataggaaaaatgttaaaaagagtgtgattagcattcctcttttgagcatagtcactagaatgcatcatgagagctgcaagttagttagaatctccaggcttaggatgattaggaggtgaaggttttgggataatatatggattaagaggggttccatgctcaataggtcctggatttatagatgcctttgatgaacttggcactggatcaatgggattgtaatcatccagagtcacttgacctatatcatccttattgtaagagctgcttttgatagtaccactgccattttccttaagtttcctgcttactgcaatcgatgtggctttatcatcacagttggtagcaatgaaatcgggaaaccatgaggcagaagtgggacttaagaagttaaggaacgacagagttgctccaaccaccaagagcaaaacaaagaagccagaaaccatcttcatgttgtgatcaattactgcttatcagttacaaaataaatctcaagtggacaatgtccttaaagtgaagttactataaacacacacactacactacaaactatagtgtgtaacccttcttgaaagaaggaggcaagaagcaggtttagtcactgaaggttcatgagaccaaagtctacacctcagaacgcggaaagatggtaataagtttgaaggggtgggaaaaggat

SEQ ID NO: 2515 - DNA, 1050 bp, Glycine max
  misc_feature (5)..(7): n is a, c, g, or t
taatnnnaccttataaggaagaaagatcaagagagaagaaaaaaagaaacattagctgaaaagttgcacaaacacaaactaacaaacatagggatccgcatgatccttcttagtacgttccttctcaactgcctcttttgccaaaaggcacaattttctctttttcacaactagcacatgagaaaactaggattagagtctgtcaaacagaatacgagcataacaatgtacaaaaaagctgactaaacaacgtgtgaaaactgaagtccacaatcttcattttcagcatgaggaatgctaccaaaaaaagtactactaccaacacacacttttgaacaatttcttgttgcccataataggaaatatgttaaaaagagtgtatgaatagcattcctcttttgagcatagtcactagcttgaacatcaagttagttagaatctccaggcttaggatgattagggggtgaaggttttgggataatatatggattaagaggggttccatgctcaataggtcctggattaatagacgcctttgatgaacttggcactggatcaatgggattgtaatcattcagagtcacctgacctatatcacccttattgttagatctgcttttaatagtactactgtcactttccttaagtttcctgcttactgcaatcagtgtagctttatcaccacagttggtagcaatcaaatcagaaaaccatgaggcacaagtgggacttaagaagttaaggaacgacagagttgctccaactaccaagagcaaaacaaagaagccagaaaccttcttcatgttttcaattactgcttatcagttacaaacaaacctcaagtggataatgtccttgaagtgaagttactattatcacacacactacactacaaactaactatagtgtaaacccttcttgaaaggaggcaaagaagcaggttctagtcactgcaggttcatgagaccaaagtctctccccctctgtcgtcttctcgcagccgtacggacggtgggtccgcaccgggaatcccgagtccggaaacagcag

SEQ ID NO: 2516 - DNA, 1475 bp, Glycine max
tcagctactaggccccccccccccacaacacttccagtgatcatcttctccatccagaacgaacaaaaatggagaattcgacccaagaatcccacctccgatccgaaaactccgtgagctacgaatccccctacccaatctacggcatgtcgttctccccttcccacccccaccgcctggccctcggcagcttcattgaagaatacaccaaccgcgttgacatcctctccttccaccccgacaccctctccctcacccccaacccttctctctcctttgaccacccttaccctcccaccaaactcatgttccacccccgcaaacccccctcctcctcctccgacctcctcgccacctccggcgactacctccgcctctgggaggtccgcgacaactccgtggaggccgtctcccttttcaacaacagcaagaccagcgagttctgcgcccccttaacctccttcgactggaacgatatcgaccccaaccgcatcgccacctccagcatcgacaccacctgcaccatctgggacatcgaacgcaccctcgtcgaaacccaactcatcgcgcacgacaaagaggtctacgacatcgcatggggagaggccagagtcttcgcctccgtctccgccgacggctccgttagaatcttcgacctacgcgacaaggagcactccaccatcatctacgagagcccccaccctgacacccctctgctccgtttggcttggaacaaacaggacctgaggtacatggctactattttaatggacagtaataaagttgtgattttggatattaggtctcccactacccctgttgcggagttagagaggcaccgtgggagtgtgaacgctattgcttgggctcctcatagttccacgcatatttgttctgctggggatgatactcaggctcttatttgggatttgcccactctggcttctcccactgggattgatcccgtgtgtatgtattctgctggctgtgaaattaaccagctgcagtggtctgccgtgcagcccgaatggattgccattgcttttgccaacaagatgcagcttttgaaggtttgaggtgagtcgagggagaataaacacaattctagttactcaaacttgattgtgggatagataggactcctttcgcggatgctgcaacttcttagttctcgtggcttgtgtataagagtgagcgagttagtactatatataatactattgtagttgttgactgtaaaatagtttgccctcctcatgttttacttgtagcgaaattgatgatcaatttgtctgttgaggacagcttttagatacatgtatgtcctgttcaggatttaagattccatgtctgttgatgtggaagccataactattagtttcttagtaaacatgaaaaatcacatgtccagatgatagttgtaaaatgttcagtgtatgtattagcatttgattgtcaaaaaaaaaaaaaaaaaa

SEQ ID NO: 2517 - DNA, 1504 bp, Glycine max
cgcgtccatctgcctcggactgcggcccccgaacatttttgatcttccttcctctgaaacaagaaccaaaatggagaattcgaccgaagaatcccatctccgatcggaaaactccgtcacttacgagtccccttaccctatctacggcatgtcattctccccctcccacccccaccgcctcgccctcggcagcttcatcgaagaatacaacaaccgcgtcgacatcctctctttccaccctgacaccctttcggtaactccccacccttctctctccttcgaccacccttaccctcccaccaaactcatgttccacccccgcaaaccctccccttcctcttcctccgacctcctcgccacctccggcgactacctccgcctctgggagatccgtgataactccgtggatgccgtctccctcttcaacaacagcaagaccagcgagttctgcgcccccttaacctctttcgactggaacgacatcgaccccaaccgcatcgccacctccagcatcgacaccacctgcaccatctgggacatcgaacgcaccctcgtcgaaacccaactcatcgctcacgacaaggaggtttacgacatcgcctggggagaggccagagtcttcgcctccgtctccgccgacggctccgttagaatcttcgaccttcgcgacaaggagcactccaccatcatctacgagagcccccaccctgacacccctttgctccgcttggcttggaacaaacaggacctgaggtacatggccaccattttaatggacagtaataaagttgtgattttggatattaggtctcccactacccctgttgcggagttagagaggcaccgtgggagtgtgaacgccattgcttgggctcctcatagctccacgcatatttgttctgctggtgatgatactcaggctcttatttgggaattgcccacgcttgcttctcccactgggattgatcccgtctgcatgtactctgctggctgtgaaattaaccagctgcagtggtccgccgcccagcccgattggattgccattgcttttgccaacaagatgcagcttttgaaggtttgaggtcagaacaaacaattacacattctagccacttcattgtggcatagacatagcaacttctgatcacttgagtgactgagttatatatattattgtagttgtgcaaactagtttgccctcctcatgttttacttgtggcgaaattaacgatgttcaatttgtctgttaaagatggatttttaacctgttgtgaagtaagatttcttgtctgtgatgtggaagccatagctattagtttcttagttaacatgagaaatcacatgtagtatgtggaatcaattaccacacatccagattataggtcgtaaaatcttcagtgtttgtattcccatttgattttaaacaccctacctctgatatgtatggactatggatctgtattcttgagcttttgccataaaaaaaaaaaaaaaaaaaaaaagg

SEQ ID NO: 2518 - DNA, 844 bp, Glycine max
  misc_feature (831)..(832): n is a, c, g, or t
ggatgaaaatcgtcatatggtccatataagttggtgggcattcccgaaattgcatcccacttatgctgaattctgtaagcctggcacattttgatcccagcaatcttggcaatggcataccattcatttgtgggctctaagggtccagtaagcaaagcatcttccggaatcggttggggtgcaaatttggggtaaatgcaagaggaacccaaaaacaacagtttcttagcaccattgcgatatgcagaatcgatgacattggtctggatttggaggttgatggcaatgaaatcagcagggtaggtgttgttggcatggatgccaccaactttggctgcagctacaatgacaaattcaggtttttcataagcaaagaaggcttcaacatcagattgtcgagtgagatcaagctcggcatgggagcgcaagactagattagtgaacccaagttgggtgagcttgcgaccaatggccgagccaacaagaccccggtgaccagcaacaaacaccttagcagatttgtaagctagaaatgaattggatgacaattctacgttgttgtcttggcttcccatgctcgtgtgtgttggttgttttacacaacagttaagctattccaactttcaacttcaaatcaaacctcgaatttgaagcgaactaaaatctcttattgagaggctaaaacgaatggcgatgcgatgatacccaagaatccgacccaggttgagttggattccggcgacggtaagctcagatctgagagatcaaatcagaatctccttctctcactcacttcctcatcacttactctatgatggggggggggcctanntagctgactcga

SEQ ID NO: 2519 - DNA, 1593 bp, Glycine max
  misc_feature (1)..(1): n is a, c, g, or t
  misc_feature (8)..(16): n is a, c, g, or t
  misc_feature (18)..(19): n is a, c, g, or t
  misc_feature (21)..(26): n is a, c, g, or t
  misc_feature (28)..(30): n is a, c, g, or t
  misc_feature (33)..(35): n is a, c, g, or t
  misc_feature (37)..(41): n is a, c, g, or t
  misc_feature (43)..(44): n is a, c, g, or t
  misc_feature (48)..(50): n is a, c, g, or t
  misc_feature (54)..(54): n is a, c, g, or t
  misc_feature (57)..(60): n is a, c, g, or t
  misc_feature (73)..(74): n is a, c, g, or t
  misc_feature (76)..(77): n is a, c, g, or t
  misc_feature (79)..(81): n is a, c, g, or t
  misc_feature (83)..(84): n is a, c, g, or t
  misc_feature (102)..(102): n is a, c, g, or t
naatgttnnnnnnnnntnntnnnnnntnnntgnnncnnnnntnnaatnnntggntgnnnngcaggggaggacnnanntnnntnntaatagaattcatattgnaacaaaggcaatttgattggaaataccaactctctgttcatagtttttaacacgggttcttaatctcatgatctctagaaaacacggaaaaaaaaactgaaattttcattgcacataattggtacagaaaaattggtcaagtactgttctctggataattttttttttcacaaaaaattcttcgttgtgaaataacaagtacttatagaatttgacaccacatattctgtttaaccgaatcatagattgacgttctccaagtaccatttgtaggtatcagcaagcccatccttgagtgagacttttggtgtccaacccagacttgcaagtttggagctatccatcagcttccttggagtcccatctggcttcgtagaatcccaaacaagatcaccctcaaatcccaccacttccttcatcaactcggccaattccttaatagtaacctcctttccactccctacattcaaatgctcaagtccgctatacttttccatcatgaagacaactgcatctgccaaatcgtcgacgtgcaagaattccctcaatggacttcctgtgccccacaccaccacctccttggcaccattgacctttgcctcatgaaacctcctcatgagagcaggtaacacatgtgaattctcggggtgaaaattgtcgtatggtccatataagttggtgggcattccagaaattgcatcccacttatgctgaattctgtaagcctggcacattttgatcccagcaatcttggcaatggcataccattcattggtgggctctaacggtccagtaagcaaagcatcttccggaatcggttggggtgcatatttggggtaaatacaagaggaacccaaaaacaatagtttcttagcaccgttgcgataagcagaatcaatgacattggtctggatttggaggttgatggcaatgaaatcggcagggtaggtgttgttggcatggatgccaccaactttggctgcagctacaatgacaaattcaggtttttcagaggcaaagaaggcttcaacatcagattgtcgagtgagatcaagctcggcatgggagtgcaagaccagattagtgaacccaagttgagtgagcttgcgaactatggccgagccaacaagacctcggtggccagcgacaaacaccttagcagatttgtaagctaaaaatgaatttgatgacaatgctacgttgttgtcttggcttcccatgcttgtgtgtgctggctgttttacacaacagttaagctattccaacttcaaatcaaacctcgaatttgaagcgaaataaaaaccttttattgagaggcttaaactaatagtggagcggtgatacctaagaatccgacccagattgagttggattccgacgacggcaagctcagatctgagagattaaggcgagatcaaatcagaatctccttctctcactcactcactcactctatgctgctatcggggggggggcctacgtagctgacga

SEQ ID NO: 2520 - DNA, 1654 bp, Glycine max
tttttttttttcccgaataaaattttcgagaatgtaaatacctgtggagattttttttttttttttttgatgtgtttcagaatctcgttaagcagaagcagtaattaaacaagcccttgggataaaccaaatttggaatctaatatatgaggaaattaatgggatcgtttgtatagtgaagttcacaaaaaatcaacaaaagaaaaagaaaagatgatttactaagaatgtataaacaaagaaattgtcaaccatccacgttaaacaggaaccggaaaacccttcttagccatgctatccaaaacatcgttgagggcttgacataggcccacaatctgctggtcccatcgctgcaactcttcagtgtcatcatcaaaatgtatgacagcctcaacctgatcgatagagcccctcatcctatcctcataaatcattcttgatgctatcttctcagccttgtgaggtgggatccccaacagtgtgcctagctcattaaagctgatattagtatagagtttgctagcactcaaaagattatgctcaatcatagcacggtccagcacagtgaaattgtctggaagaagagcttgctgatgtggtttcaattcttctgcaaaagcatcaatttctggttttctgagaattctctccaaatacaccttctgcaatattggatagatcttcaactttgaacaccgctcatccttgtacaaagtggcaagaacacgagaacgttgaggtcctgcagctgccaatatcgtgcatgtaacagcagcagataaagcttgttcaagagcttcctcattaatctcctcgtctcctatttgccttttctcaatttgagatatatcataataccgtaatgctgcttccaaaaacttcctcttcaaatctaagatccttgcatagcaaaccttgtactttaaattcagtacttcatgctgactattgctgaccaagaatgatgctttattaataaaagcttcagcattgacagcatcatcatcctcaagatataaacaagcaatttggacacactttgacaacctgaatgcatcatctatcaccctcattcctgaatccaggtcaataccactgagcatttgagctgctttagaccattgcttctcagattcataaagctcagcaagtttctctctaataactaaaacctgctcttcgaatgacacaacacgaggctgaatttgggcaagggcgtaatgagcaatctctttctgtatctcaggctccaatcttcccaactcttgagcaaaagtctgcaaaagctgccgagacactactaatggaacatcatctgataacatgtgatctatgaatttcctagcctgaacaatgtcattagatgaaatgacagcagcaagtatttgcttatactgctctatcttctgcctctggtcagtaatcgcagaggcgcttgcaaaagcactctccatcactatcggcgtagtgcgagtgttgagcgtcgccaacagttacaggtttcgccggtggagattgtgattcctcactcctccgtcgtaaattggaatcaacgacactctctcaagtttcaactctgaactcaaccctcttcaccttcatatgttgtccttcgctctttatttctccccttctgtcgtcttctcccgcccgt

SEQ ID NO: 2521 - DNA, 2351 bp, Glycine max
tgctcaatcttctaatcaatttgtaaaaataaaaaaaaacggagtgatctagtcttcagttttttttttttttttgcgtgcaaggaagctattagattaatctaaacagagcgaacaagatggcattaagcatttccatctcaagattaaaaagcaatttagactcttgaatgagcctgattatttatgaccaaatttcactatccacttttgcttttcattgttactatggcctcaagaatgggataactaagaagcattacataggtgactaggaaaagttgaccaaacatttcttcaaaatccttcacattgaaattgaatagtctccatataccaacaaagaagctaacaatgttggctatgagtaataggaccaatggagccatgaacacagctgcaccttggaaatcgaacctaccttgctcatatttcttgagcttctctttgtcaatggctttgtttgacaagttgaatttcaccttgttcaaccccagccacttcttgattccatctataattgcaaatatgctggtaactgacttcagaatccaaattctttgttcatcccaccacatagccacagagccatccccagatagaacctcaatcaaatgttgaatttgagtagatacatacacaaatgcaaacactgcaaaccaagggtccgtggcctttggaaacacagtgattcctttgaggaggcacacttgaggtacaatgccatagaggatgaagacaacagcataaagggatgacattgtcatgaagcaataagtgaaggtgtgaattatggacattcttgaaaatccataagtgaatgggctgtatttggaggagacaccaagcaacaaaagttcagacaaccacttaaccaactgaagcatgccttccttgatgtcagtgggagcacaacctaagaaacatggtgttttggggtaaagatatgctgatttccatcctctgctgtgaagaagatagccagtaatagtactctctagtaatatgccatatgagaatcccacctctgtgccccaatttgtgttattttcgtaggaacaagaggccactacttgagcttctcttaacatttcatctcttgaaatattctttttgctacttttctgtccacggatggccttcagtgattcaatgtatgcggtagacttgccaaagtacttttgtgcatccttcagatagtcgtctttttggtttggacttccaaatagtaaagcacttctacttaagtaattgccgctgcctgaaagacctggacctcttagtccatccatgccttgccacatagtcttaaaagcagttctagattgattatcatagatgtcttttttgctaaggttgtgaaacatttgagggaattgaacaaatgcaatatatttggacgtttcaggatcaagaaagaagcacatggcttgtttggcagaggttggatcattgctatacatatcacaatccactgctagaacataaggtccattactgattaaacctgagactctgagcaatgcgttgagggctcctcctttgaatttgtgaggaagggatggccttctttcgcgagacacataaacaacaagtggcattcccggttggtcatttataatctcaatacgaggaggtctgtcactcacaatacgacgatttttagggtctgagccaaatttctcgatatttttctgcatcttctcgtatttagccttgatgaggtctcgttgtgtactgaatccatcgtggcgaagagtgtgttgatcctcctccccaaagggagagaagaagaccttgggacaccttgacttgaccccataaatgttacagaacggaacccactccttggcgaactcagcagcctctctgatcccatagagagtaacgtcacagccgccgtcgtcggagagatacacggcaagcttgtcggaggggtaatccatggccaccgcggagatgatggtgtccatgacctccacggtgggctccttctcgggatccagcgtgcacacgaagatgtcaagccccggcagcttctcatccctcggcagcttctccgtcatgacgctccgcgacaccggccgccaccggaaggcttggttgaagaaccagagcaccgagagaagaagctccgctacggtcatcagaagccatggcgctgttggaggttccagtaacaagtgagttatgcggtagtaacacagcgacaacactgccactaagtggatcagtatgtgaagtctgctcagtgccaaccatgattgaaccgtttcaacgtggtacgtgaacattgccatatcttatgttttcttctccggggggggcctacgtagctgacccgacggacg

SEQ ID NO: 2522 - DNA, 966 bp, Glycine max
  misc_feature (966)..(966): n is a, c, g, or t
ggaattcggcacgagggagagagagagagagaccccccccccccccctccttctttttttgtgtagaaaaattattagattaatctaaactgaacgaacaagattgcattaagcaatttcatctcaagatacataatcaatttagactcttgaatgagcctaattatttgtgaccaaatttcactatccactcttgcttttcattgttaccatggcctcaagaagtggataactaagaaccattacataggtaactaggaaaagttgaccaaacatttcttcaaaatccttcacattgaaattaaatagtctccatataccaactaagaagctaacaatgttggctgtgagtaatagaaccaatggagccatgaacacagctgcaccttggaaatcgaatctaccttgctcatatttcttgagcttctctttgtcaatggctttgtttgacaagttgaatttcaccttgctcaaccccaaccacttcttgattccatctataattgcaaatatgctggtaactgacttcagaatccaaattctttgttcatcccaccacattgtcacagatccatccccagagagaacctcaatcaaatgttgaatctgagtagatacatacacaaatgcaaacacggcaaaccaagggtctgtggcctttggaaacacagggattcctttgaggaggcatacttgaggtacaatgccgtagaggatgaagacaacagcataaagggatgacattgtgatgaagcaataagtgaacgggtgaagtatggccgttggctgggggaacccgtaacgtgaatcggccctgaaattttgcaggaaaacacccaaccctcactaatggttcaccagctccccatttaatcccaaacttgcaacccaataccccttcccattgcaaggcccaccagcgggttatccccccaccctctaaaaaaaaaaatgaggtatcactcn

SEQ ID NO: 2523 - DNA, 1406 bp, Glycine max
acggctgccagaagaaaacaaaaaaggggttttccttattccaatagcgaggcgagacatcgattccaaaggtgcgtttctgctgtgctagggtttctgcatcttccacctccgtcgcgatgaaaccaggcttcatctgattccgatttcccttcgctccttctcctccttaacattcatcttcttcgattcctctacaaattatgattattattatgatgaactccatcttcgcctcgcataaccttcgcgtcttcggtcccggcttgaatcccttcgcaccttattgcatcgccaatcactcccttttcctttccctttcctctcgctaaattacaattccctttctttttcctctccaacttctccttctccgtttctccgaacatgtaaattcggaggacaccgtctttgattcggtctatttttttgggggttactttacttcggttacgcgtcgtcgttttgcttttctttgtcgtcgtttttgcgttgcgttgattgctgagaaagaaagaaagaaagaaagatgctggaggaacagcctgttgttttgttcaggaagagcccttccaggaggcgcttgagatctgcttttgctaccgatgataggggttggacctcgcttcatgttttcgctcgaaaaggcgatctcaaattggttaaaaaacttctcaatgaaggaatggatgtcaatgtgtctgcatggggccccaaatcaaaaggggtgacccctctccaccttgctgccgaaggtggtcacattggagtgatggatgtactacttgagtgtggtgctgacattgatgccagaactaagggtgcttgtggctggacgccgctccacattgcagccaaggaaaggaggagggatgctgtgaaattcttgatagagaatggagccttcatgccacctgatatcagtgatagcagatttaacccaccgcttcattactgccccggactggaatgggcctatgaggagatgaagcgacttcgtcaggaagacttgtctgctggagagacatgttacagctctgaaagttaatttgcttttcagggatttggttggtgtttgatagtgtgtttggatgccattcagaggagatcaaagttaatataactagcttttgcgtcacctttacaaatttgacatgaaaatatgctgatacgtacattcagaaagcgtatccagacatgcactgtatctgtattgtatgaataaatgtacaattgaaataaaactactatgtagtgtatggggatgttttactattttagcatcttggatgcccttgtttatggaaacaattatgtacgattattaatgtgatatgctgtgattgttgatgttttcaaaaaagtgttgtagactatgttcaaagtattgctattgttattctgtt

SEQ ID NO: 2524 - DNA, 1155 bp, Glycine max
cgcgggataaaacattccaacacatttctcctataaacaataatatttagctgacagcagtttcaaactaagcaagttacaatattattgttgtttacattttgttctgtaaaattaggggagtacaataatgatacaagattacatcgtacccttaggcttaaaggggcgtaactagtttgtgtcagttgccaaaatgtcataaaaacctcttttagcttttaagcactatgacaacctatataacttcacagtttatatgtgtgtgtgtgtgtggtggccttctctttgtggcaaagctagccttatcagttctccgaaaaaataggctagccttaccaaagtattcactgaatcagcatatgcaattcatgaaggattaaaggatcattctttgaacatgacacgttttagtggtcacaccgcgacatgatgcactgctatgtctggtgcaaaagctcttctatggattcaaattctttaagattattaactacatgatgaattttggcagatagcttttcattgtgctcttcaacaattttcataaaagaagtcaactgttcttgatatgttgcacacaaccgttttttatgccgaagctctgctgttaattcctgaattttcttatccttttcatccattgtttggcgtgcttcacgtggagagactactaatggatgattatgatccttcacaaactttgttatcacccattttccagacttattatatttgatatgaatcattgccttacaaccttcccttgtgctggccctaggtttacgaactgatgcaaatttccctcggatgctgacacaataaccctctttattacatccaagtctgcgggcaagaatcctaccatccctttctgagcgtcgacaagacatcacacgcataacaaatcctaaacgccgggcatattcatcatagaatatcttagcagcatcttccgattcaaattccagccctcctatggctcctgaataacatgatcatcccaaatacccccccctccccagaaaaattctctagactctaccacccccattggcaccacttcctatggtccttgggggtcctgaaatccctactaactcaaaccccattcccagaaacctccgaatccccattacctcaaccaaaggggat

SEQ ID NO: 2525 - DNA, 1630 bp, Glycine max
gtgattagttgcgtgagggtcacagaggagcacattggtttggttggtctcctttcagtaccaataccaagcaagcttagtgaagaatgatgattactagatttgagtctcatctcaggtgccactcagtgtacggaacagtgtcataaccgttttcgcaacagtccaatctctgaaccttggtatttcggcaacgcttaacataacttgtttttctctttctctttctcaaccaatttgtactcgtcattattattattataaatcaatagaaagacaggaaccaaaactaattaaaaaccacattcacattattcctccgaagatgacagtgacgagtggagaagaagaaggcgccgttggaggagttcagatccaacacaggagcagaatggtgctcccagattttctccagagcgtgaatctcaagtacgtgaaattaggttaccactacttgatctccaacctcgtaaccttattccttgtccctcttatcctcgtcacgctcattcaggtttttcagaccaccgacatcgaccacctccgccacctctggctccacctccagtacaacctcctcaccatcctcacctgctccgccgtcctcgtcttcggcctcactctctacgccgtcactcgcccccgcgccgtctacctcctcgactccgcctgcttccgccccgccgaccacctcaaggcccccttccgtagcttcatggatcactcccgcctcacgggagacttcgaggagtcctccctggagttccagcggaagatcctcgaacgctctggcctcggggaggaaacctacgtccccgacgccatgcactctattccgccccagccctccatggccgctgccagggccgaggcggaacaggtcatgtttggtgccttggacaacctcttccaaagcaccaacataaaaccaaaggatattggtatccttattgtgaattgcagcttgtttaaccctaccccctcactgtcttccatgattgttaacaagtacaaattaaggggtaacattaggagctttaatttgggagggatggggtgcagtgctggagtcattgctgttgatcttgctaaggaccttttgcaggtccataggaacacatatgctgtggttgttagcactgagaacattactcagaattggtactttgggaacaagaaatccatgctcattcccaattgcctttttcgcgttggctgctccgtgctgctgctctccaacaagccggcggatcgaaggagggcaaagtaccggcttgtccatgttgtgaggactcatcgcggtgcggacgacaaggcattccggtgtgtttaccaggagcaggatgatgcagggaagactggtgtttccttgtctaaggatttgatggcaattgctggtggagcattgaagaccaacatcacaacacttggccctttggtgctgccaattagtgagcagcttctgtttttcgtgactctgctgacgaacaaagtatttaaggctggtgtgaagcttacatacccggatttcaagctgcaattggatcatttttgatcctgctggggccaggcttgtattaataatttggaaaaaaacctcacgttgcttccttgacatggggaggtttca

SEQ ID NO: 2526 - DNA, 1970 bp, Glycine max
gccacagcaaatcttataatattcttagttatttaccttttttttttttttttttcagacaaaaaagatgcattgttgtaaacattaaatcgacgactctgggagccaacaagaataattcgtgacaacaatgttatattggaggtttcacaaagcaacttggaaactcacaattttgacagaacaagaatacatattaggtaacagaaaacattcttgccctcattgtcatacagtatcccgaattcttcccaagaaatcctaaacagctgtagggccgatttgatgacgtcttcaaaaccagcaacagttatcgatccaaaggagaaagaactaaagctgatgctactatataattagctgctatttatcagatatacaactgatcctagcaagggaagaggatgggacatggatccctttctaacctactatttgataaatccagttttttcatcttttcttcacaccaaaacagttgttctctagtcatcctcgtcatcctcagaacccttgacaggatcttcacgtcaataaggccaagcaaaacctgaatgtcctcgtgcttttggggccaagaattcttcttccaattttttttctttctgcgcagttccttcagcttcaccactttcttttcaagagtcgactgaatctgttgtagaggagtatcaagctggttctgattggtagcaccacttgactttttcttgtcccttttcatgaaaaggtggaatgtaaggatagaactttcaattatcccgataagatcaggagcaagaactctcatctctgaatcatcagtcaattcatgatctgaacctcgtatattaggaacctgaagcagtttaggcaaattgttcctagtgcgagcataaatttcagctcgacggccctgctcaaaaggttcattttcaataaacctttgtaatagaacctggaactgttgaaactcttgtgcactatggttgtaacaggtaggattatcatgttgccaagatatcttctgactcatatgagagtactgacaatgaagcgcctcccaagtcaagcaaatttgacctacatatgctgtttcaatatcctggtaggggtcatgctcaggctgttgaagatgttcagtctcatcatcaggttcttcaaattttttcaaggaaagacaacgaaggggagaagccagcttctttgaagcagatcttggagatggagttgaagtatactgtgaacctttgccaacttcactaagctgttgagtgctcatccgatcaaagaacggcattctttcacagtacttttcaaatacagcatcaaaaccacgccaccattgctgaccttctgcctccacatccctccattcatttgagcatgtctctccggcttcctcttcctcttcatcctccccttcctcagggcaggaatcttcttcaggaatcaacaccataaaactgtttcttctcaattcttttagcctcctcttaacctcattggtaataaaatcatcgtcatcctctgcttcacctgcagagtctgcgttttctgatttacactgatcaggaccatcggtgttcagctttggttcctcaggctcaggcactgccttggggggggggggcctacgtagctgcgcgttctgagattttctgaactttttgattttcaaaaactccatgctttatcaccttactatgctttatcaccttactaccaaacaaaaatgcaagatggagagcattgagcatttacagagatcagagccaccgacaggacagggcaacttctctccttccgtatcatctacattcaacttctgaaagactgaggcggacgcggggggaaggcataagtgaaacaaaccctagggagagagggcaggcctagagagaagagcaaaatagtagtaaatgtgagagagggtactgagcactgtgttttgttttgtttcgatttgattttgatctctctctcatctc

SEQ ID NO: 2527 - DNA, 948 bp, Glycine max
atcatttccccccgcctccgcccactccatcgcccacgcgtccgcccaccgagctgaagaaaacctaagcttagaattagaaacaaagaaaagaagaaaggaaagaattgatcgttgaaaatgcagggaggaaagaaagcgggagagtccattaaggaaacagctacaaacattggtgcttctgccaaggctggcatggagaagaccaaggccactgtccaagagaaggcagaaagaatgacagcacgtgatccggtgcaaaaggagttggcaacccaaaagaaagaggcaaagatgaaccaggcggagctggacaagcaggcggcgcgtcagcataacacggcggccaaacagtccgccaccacggctgggcacatgggacatggccaccacaccaccggaaccgggactggaaccgccacgtattccaccaccggggaatatggtcagcccatgggggcccaccagacgtcggcaatgcctggccatggaaccgggcagcccacgggccatgtcaccgaaggagtggtgggctcacatcccattggaaccaacagagggccgggtgggaccgctacagctcataatacccgtgcgggtggaaagccgaatgattatgggtatgggactgggggtacttaattaatgatgattatatcatcaaggtttattggcaatagtttaataataaggtttattaaatgtagttagtttggggtatggcttttgtacttgtttgtttggttatctttgtttgtctgcttttctctccacttgttatggagagacttgggtgtggttatgacagtgttttcactacgtggaaacgttatatgtggtaaacttgtacttgtatcatttcgtgataataattaaataaaatagtggttgtgtaaaaaaaaaaaaaatttttttagactagttctccaaaaaaaaaaaaaaaaaggt

SEQ ID NO: 2528 - DNA, 744 bp, Glycine max
  misc_feature (1)..(8): n is a, c, g, or t
  misc_feature (11)..(15): n is a, c, g, or t
nnnnnnnnttnnnnnttaaagataagtggacatgcattataaggggtacaagagtctccactgatagtttaacacttcctacaacaccatgataaacatacccctaagataaagactacctaaggttccttaacctaaaatacctaccattcctaacaaacagtagcactaaagctttaaaacatatattttatagaactagctagtttcctagctatattcactactacatcaaaaaacacacacacacacactaaaacaactacaacaaaacacttcttcctcacaatttttttagttttttaggtaattttaaacttagactcatctatttctatgccttcctcttcagcacgttctccaccagacttgtccatggtgctgagtcctcctttgcgtcccatctcttggtacccttctctccccatctgttccttccttgtctgccctcctttggtccccatttcatgatacccctctgaccctagctgctgcttcctcgtctgccctccacggctccttccttcagcaagatgttcttgagcctcaagactcttcccaccagttcctccaggaacaacagtttcaccttgccttgccttctcatcaagttcttcacggtttgcttgctgagattccatgttaattacttgcactaagatcttttacttctcaaagaaaaaacttcacgattgttcacacatcgagcctaccccagcgatgcagggcatgtcatagcatatt

SEQ ID NO: 2529 - DNA, 700 bp, Glycine max
cagatagaacttaagttctatagcatctaatagtgaaagagattaactaataactagatgtctcaacatttgtacaatgcatcataattcatcggaaaaaaattgaaaatgagtccaaaggaactcaaaattacaacatgttactcttatgatttatctctaattctccatcatccatcacttcaattttcccaaagatcttggagggtgctgcaaatcgagccgagaaggaccgagaaacattatccgggtcagtggaatagccatcgtcgaagttctgtaagtaggaggtaggatcatactggacatgaaacacaggtgaaggtctaaagaatctcctcctttccctcttgatcttcctccacaatgctttccagcttcccatcttcaatctggtcaccaattcgttgacacacacaattggatcgtagccaattctctcataacttgaccaactcaaattgctgttgcttcttatggtgctcagacagtgacaattttcaaggttcatggtgtatagaactagcacagagaaccttgggagcataaaatggtttaggggaccaaggtcggggaagtgcatgcaccctggctatttatataatgaaaacataacaattaacatacccctctttttatcaactcatcaccaccacctcagcacagcaagtacttacaacaggataggatccagaaaaaa

SEQ ID NO: 2530 - DNA, 1783 bp, Glycine max
ttttttttttttttttttttttttttttttttttttttttgacttctaaatgttgtgttgttattagaagccttcatcgcctaataagacaccttaatttgaataattcatacagaatggtactggatgataactaagaaccatacttctatgcttccaatgaatccaatgaccattttcatcagtgtttcaaattaagcagtaaagcatccaaccatgaagtgtcagtgtctagttgctgaatatttattatcagatcccacaatctttaaatcgacttttctagcaattgccttagacatgctaaattttatttcttctctttttgggatacaaattgatggctagtggggaagggaaacctgactcggtgcttattgctttgttgcatattcagcttgtccactaataaacaagttcttgggggacgaggccattagagtagttaactgggaagaagcagggttttccgccaggttgatgtttgtgctagttgcaagaggggtgggttgtgtaaaaggatttccaagcattggaatgaaaggtgcatgagaaattggcatgggtggaacttggttagggaaaccaaacatgtgaactctgttgtcagtgataccatgcaaaggtgtaatagggaactgagggaggctacaaggcatggctgtgcctggcctgaaccccataccaagtcccattaactgatgtaaatggggtgtgttcatcatatgatgagcagcattaggtagcatcatgaacggcatacaaaatccagcacccattgacatcatctgtaactgaagctttagggtcttaagatattcgatggcatcatcaagcattgaagctttgtccgtcttattgcaatttggtatgagctccttcaatatacgcatcctcttgttgatcttatctcttcgcttcctttcacataaattatgaacttctgcattcctacttctcttgacaccggtgccttcccaagcaggcttttccttcactacatcttctggttcttcatcattattgcttaaatacgttgagtcatcgatatcatcatgtgtcctgctacacacgtttctgttatttgaggctccaatggagcatagggaagaagattccaacaagccttcatcacagtatttttgtttagtatcatgagcttttccctttgctctatgtcttgctgagcttgaggtttggttaaaatattgaccacgagatccatgaatactatcatgaccaacagcttcagattgctcatcaggaggtgttgtttcctcacttcttggaaccatgtttgatgtatcagaatttaaagggttcttttgtcttcccggtgatcctttaggtgagtttatcactaaggaacgatcaagacctttgctgctagaattagcagcctttgcaaacttaccagaattttggtcattgctttgatgagaatttggttgagaattgtccaaggcagagtccctttgaactgggaagtccatgagggagtatagtgagcttaaccttgcactttttgcattgaaggaaccttcgcacgagggagtcattcgtgtgacgacacttgatgttgatgatgaacctccttgctgcacgtgaagttgaccattttcccataccagctcaagggaacctttgccataactggaacataataaaaccacacacttttagtaactaaaaaccataaagaagagaagaaaaaaagaagaaaaaaagacaaacttgcttgttgaatataaaaagagaatgggggggggggcctacgtagcga

SEQ ID NO: 2531 - DNA, 2300 bp, Glycine max
  misc_feature (2264)..(2268): n is a, c, g, or t
  misc_feature (2270)..(2271): n is a, c, g, or t
  misc_feature (2274)..(2275): n is a, c, g, or t
ccacgcgtccggacctcacaaacccacaaatatgatcaccttaacagacttctaccatgtcacggccccgatggccccgcgccgtcccgcccggccgctagcctatggctcagtgaagtggtggaagattttctcccctgaccaggcccctggcatcaaccgttttgtggcactctttgcagtgcctcttctctccttccacttcatagcctccaacaacccttatgagatgaacctgaggttcctagctgctgacacccttcaaaagatcataatactagtcctccttgcagtttggagcaacatcaccaaaaggggttgtttggaatgggccataaccttgttctctctctccaccctcccaaacactttggttatgggcatccctttgctcaaagggatgtatggtgacttctcagggagcctcatggtgcaaattgtggtcctccagtgcatcatttggtacaccttgatgctcttcttgtttgagtttagaggtgccagaatgctcatctctgagcagttccctgacactgctgcctccattgtctccatccatgtggactctgatgtcatgtcattggatggaagacaaccacttgagactgaagctgagatcaaggaagatggtaaactccatgtcactgtgaggaaatccaatgcttcaagatcagacatcttctctagaaggtctcagggtctctcttccaccactccacgcccttccaaccttaccaatgctgagatatactctttgcaatcctctaggaaccctacgccgagaggctctagtttcaaccacactgatttctactccatgatggctgctggtggcaggaactcaaactttggtgcctctgatgtttatggcctttcagcttcaagagggccaactccaaggccttctaactatgatgaagatggtgggaagccaaagtttcattaccatgctgctggtggaactgggcactaccctgcacctaaccctggcatgttctctccctctaatgggtccaaaagtgttgctgctaatgctaatgccaagaggcctaatgggcaggctcagctgaagcctgaggatgggaatagggaccttcatatgtttgtttggagttcaagtgcttcaccagtttctgatgtgtttggtgcccatgagtatggaggaggtcatgatcagaaagaagtcaaattgaatgtatctccaggaaaagtggagaataatcatagagacactcaagaagactacctagagaaagatgagttcagctttggtaatagagaaatggacagggagatgaatcagcttgaaggtgagaaggttggagatgggaaaccaaaaaccatgcctccagcaagtgtgatgacaaggcttatattgattatggtgtggagaaaactcatcagaaaccccaacacctactctagcctaattggtctcacttggtctcttgtttcattcaagtggaatgttgagatgcctgccataatagcaaagtctatctccatattgtcagacgcagggcttggcatggccatgttcagtcttggtctcttcatggctttgcaaccgagggtcatagcatgtggaaattccacagcagcttttgccatggctgtgagattccttacaggtccagctgtcatggcagctgcttccattgctgttggactcaaaggtgttctcctacacgttgccattgttcaggcagctcttccccaaggaattgtcccatttgtctttgctaaggaatataatgtacatcctgatattctcagcacagctgttatttttgggatgctgattgctttgcccataactctagtgtactacatcttgttggggttgtgaatgaaagaaatgatggatgatacagaagattcacgtgtggcatccatgcaaagcttggttgaggttgttgagaatgagagaaaaaaaaggtcataaagcaacaatagaaaagaagcatcacgagaatttggataggaagaagaaccccaggatcagttttttttatttatttgttttctttttcttttttgaatgaattgccctttcttagtgaaaattaatgtaaaatcatgatgtagctaatttacaaaatgattatctcgttaaaattttatattataatgacctcggattccatgtcactcatcaattgaaggataagaaagcatgagaaacttagttgatgaaaatggtagtgctatgatcatttttcccaatataatattaaacttcatattgctttttctttcccaannnnnannaannaaaaaaaaaaaaaaaaaaaaaaaaa

SEQ ID NO: 2532 - DNA, 2393 bp, Glycine max
ccacgcgtccgctccaactctccaaaacttgccacttcaaccttcctatatattccttcctccactctctttctttacttcttctgcggcccgtccgcgagccctgttgacacacacccccaaatatgatcaccttaacagacttctaccatgtcatgactgcaatggtgccactctatgtggccatgatactagcctatggctcagtgaagtggtggaagattttctcccctgaccaatgctctggcatcaaccgttttgtggcactctttgcagtgcctcttctctccttccacttcatagcctccaacaacccttacgaaatgaacctcaggttcctagctgctgacacccttcaaaagatcataatactagtcctccttgcagtttggagcaacatcgccaaaaggggttgcttggaatgggccataaccttgttctctctctccaccctccctaacactttggtcatgggcatccctttgctcaaagggatgtatggtgacttctcagggtcccttatggtgcaaattgtggtcctccagtgtatcatttggtacaccttgatgctgttcttgtttgagtttagaggtgccagaatgcttatctctgagcagttccctgacactgctggctccattgtctccatccatgttgactctgatgtcatgtcattggatggaaggcaaccacttgagactgaagctgagatcaaggaagatggtaaactccatgtcactgtgaggaagtccaatgcctcaagatcagacatcttctcaagaaggtctcagggtctctcttccaccactccacgcccttctaacctcactaatgctgagatatattctttgcaatcctctaggaaccctacaccgagaggttccagcttcaaccacactgatttctactctatgatggctgctggtggcaggaactccaactttggtgcctctgatgtttatggcctttcagcctcaagagggccaactccaaggccttctaactatgatgaagatggtgggaagccaaagttccattaccatgctggtggaactggacactaccctgcaccaaaccctggcatgttctctccctcaaatgggtccaaaagtgttgctgctgctaatgctaatgctaatgccaaaaggcctaatgggcaggctcagctgaagcctgaggatgggaatagggaccttcatatgtttgtttggagttcaagtgcttcaccagtctctgacgtgtttggtgcccatgagtatggaggtcatgatcagaaagaagtcaaattgaatgtatctccagggaaagtggagaatcatagggacactcaagaagactacctagagaaagatgagttcagctttgggaatagaggaatggatagggagatgaatcagcttgaaggtgagaaggttggagatgggaagccaaaaaccatgcctccagcaagtgtgatgacaaggcttatattgattatggtgtggagaaaactcatcagaaaccccaacacctactctagcctaattggcctcacttggtctcttgtttcattcaagtggaatgtggagatgcctgccataatagcaaagtctatctccatattgtcagatgcagggcttggcatggccatgttcagtcttggtctcttcatggctttgcaaccgagggtcatagcatgtggaaattccaccgcagcttttgccatggctgtgagattccttacaggtccagctgtcatggcagctgcttccgttgctgttggactcaaaggtgttctcctacatgttgccattgttcaggcagctcttccccaaggaattgtcccatttgtctttgctaaggaatataatgtacatcctgatattctcagcacagctgttatttttgggatgttgattgctttgcccataactctagtgtactacatcttgttggggttgtgaatgaaagaaatgatggatgatacagaagattcacgtgtggcatccatgcaaagctcggttgaggcttgttgagcatcagacaaaaaaaagggggtcataaagcaacaatagaaaagaagcatcacgagaatttggataggaagaaccccaggatcagttttttttttttaaatttatttatttgttttctttttcttttttgaatgaattgccctttgttagtgaaaattagtgtaaaatcatgatgtagctaatttacaaaatgattatctcgttaaatttttatattataatgtcctcggattccatgtcactcatcaattgaaggataagaaagcatgggaaactttgttgatgaaaatggtagcggtatgatcattttccccaatataatataaccttcctattgcttttaaaaaaaaaaaaaaaaaaaaaaaaaaaaaaaaaaaa

SEQ ID NO: 2533 - DNA, 1617 bp, Glycine max
attttactattttttgtttttgcgtgaccaagttggttaaaagaatggggttctgtatatttgattacaattagtaaaatgataatgttttgggtggaccttctaatacgatattatctattgaggaaatattcagttattaaacgagtaatggcctcctccacaggcacatatataaaaccaaagtgttgatggtgtaatgaaaacagttcacaaagataatggtacagtgagtatcacatttaaaaaaaaaaaaaaaaccttcaaatccacattagtaatcgtcaccctttgatataacttctttgcatgttggtcggagtaagattgtatgttcgaattgtgatacatagcttcctttcacatcacatagaggaggataaggagttgcttcgctctaggcaatctcagtgggatatgaccaacatcaaaatttttcatgtagtggctgcattccaggtcttctcgtacatatcctttccccgttgatgcaaaggtttcaatagcaaaaaattcaccctcttccatctttgtctgctccccacccttcacaatgggaaccgattttccagcatggatttggtagcgaccaatgctatgtccattcaaattccgtatactcttaacttgatacaccttcccgttaatctcaacttcataagattccatgacctcttgaattgcggcaccaatgtcacaaaggcgcacatcaattccagcttccttaatacccgtattggttgcttcacgagatgcttcaagtagtggatcaaacatggggttgaatgccacggtaaaagcgcagtcaactatatatccatcaacatgggtaccaaaatccaatttcatcacatcatcatactgaagtatagtcttatcccctgaatttggggtccagtgagcagcaacccaatttaaagagcatcctgtggggaatgcaatgcctgcttgaaggccatcctctgatattagcttacgaacagtgttctccaatgtttcacatatgtcagtcatcagcattccaggctttaaaatgcctttaatatatttgcgaacctgacgatgaacttctgccgctcgacgaactgaattatataatggcttctgcaggcgctccagttctctcttctcctctgatgtagttctccataggttatcgtctttgtactgctgaatttcaccttcaggaaaatctccagatgggaaaaggtcaataacagaaattgatggtggatcagtctgttgcaagagttctttctttttcttgcttttagatttcttctttttcttctttgaaacttctttagtgtcatctcctttttgtgatggtggagaaagctcagcatcagcatcagcatcagcagccctttctacatgacttggtgttccattttcttctagcatattgtttaattgagaaataagttcctccgccatgaatgaaagaagacctggttgggtgctgagacttggtgcggtggcggaaccttaaggatagagacaactagggttccactctgaaggaacggtgagagtccagagcaaaacgcgccgacgcaccccgcctccgcccacgcgtccgcccacgcgtccgcccacgcgtccgcggacgcgtgg

SEQ ID NO: 2534 - DNA, 920 bp, Glycine max
tttttttttttttttttggaccttctaatacgatgtttatctattggggaaatatccaattattaaactagtaatggcgtcctccataggcacatatataaaaccgaagtgttgatggtataatgaaaacagttcacaaagataatggtacagtgagtattaaatatatatatatatatatatatatatatatatatatatatatatatatataaaacaaagcaaaaaaacttcaaatccacattagtaatcgtcaccctttgatataacttctttgcatgttggtcggagtaagattgtatgctcgaattgtgatacatagcttcctttcacatcacatagaggaggataaggctgaacaatgccagagtcacacaagttctttaatgccattaagtatttagtctcccctaggcgatctaaataccgcctacaaaaggccaaagtagagaagttcttgttaatagttgctaacagttgcttcgctctaggcaatctcagtgggatatgaccaacatcaaaatttttcatgtagtggctgcattccaggtcttctcgtacatatcctttccccgttgatgcaaaggtttcaatagcaaaaaattcaccctcttccatctttgtctgctccccacccttcacaatgggaaccgattttccagcatggatttggtagcgaccaatgctatgtccattcaaattccgtatactcttaacttgatacaccttcccgttaatctcaacttcataagattccatgacctcttgaattgcggcaccaatgtcacaaaggcgcacatcaattccagcttccttaatacccgtattggttgcttcacgagatgcttcaagtagtggatcaaacatggggttgaatgccacggtaaaagcgcagtcaactatatatccatcaacatggg

SEQ ID NO: 2535 - DNA, 1986 bp, Glycine max
  misc_feature (141)..(141): n is a, c, g, or t
ttttttttttttttttttttcaaaccaattagctaataaattgaaagaaaccagacaattatctgcaatggtacaattttccaagcatcacttcacttgatagtttcaaagaaaataacgaggcactttaaatttataagnctaaagggttcatcaacgatttgactggctttatgcggaaataaaacagtaataatcatattattcgggtatgggcaaggaaaccttttttttttccccaagtagaaaatttacattgaacacaacttgaagctctatttccacttgctggccttttttcaaatattgtggaggatgggagggaatcaatttatgaagaaaaaaaagggaaaaggagacacaaagtcaaaagtagttaattttctaccattgacaagcattgaaaaatcacccttctgagcttcaagttgactgaaatccttctttctgataagccgacatctttgaggtctgcaaatttacatggttttatggtttgtcatccattgatatgatttgtggtgccactttgcccgtctttcacattttctgttctccaagagggatccatctgcggaagttgatattcatctggtttcaaagccaaggcaaaatcaggcaatgttggtgctgtctccatgattctctcataggagtacagatcacggtttattcgcaccttgcttgaagtatccttaggaattttctcgtaaagatatttcatagtcccccaaagtggtggatttcttgacaatggaggtactgcattgaatgcttcacacaacttcttactttctttgaaatactcatcagctgcttgtaaagaagctacagccatcccatgagatttctccgtgtttccctcatcaagaatcaatccgtgataataatatgctgcagcctttgcttcaatatacttccatttcacaaaaagacgatgtttttcaccccatccatttgctaatggaaggttcataatattatcttgagcctgttgccaatatttcaccatctcacatgcaagtctacgcggggggggggcctacgtagctgactatcaattgccattccaagttgaatatctacaccctgtcccaatgcttgtagacagagtgctcgaagaactccttctgcgagatccactggtaagtttctcatgggtacaaacctcagttcgccaggcaactgtggaagaacatgccttacagcacagtcaagatacccagctgcctttaagaagatatcaacagaagctcgtctgctttcttctgatacttttggctgaacggacgatacgtcataccaggcattagacatggttgtttcctctgtgtcatcctcttgattcacccaatcaaattgtactttgtattgtaaatggcttccattttcgactaatcccaaaagtactggcaagtaatcttcaagagcctgctgaagatcagccagtgttgaacctccatgttgggtggcacttttcctttttgttcttgtaattgtaggaccttcttggccagccattacaactatacgagttctaagagcagacaggcgctccactatattcttggacaagtaatcaccaagtgactgtgcaaaatcaacaggtttaggaattcttagaccgggaacatacacagaaacctccccaatactccctggcctccttctatttccaccagaatcctttggagtggacacgaagcaacccatgtcctagtactacaccttgtcgtttgccctggcagttcactggtcaggtcaaaagttctgctattctcatgaactgatagagtggcagcaatggagcaaagcagagtgaggcacccaattggggggggggccagaaccaaaggagccatttttaattattattgtggaacattgggatattgcttgtttttattcatacatcataagaataagatatgtgtgtgtgtacgacacagccaacaaagttgtaagttgtaacacaagcagccaaac

SEQ ID NO: 2536 - DNA, 883 bp, Glycine max
  misc_feature (818)..(819): n is a, c, g, or t
  misc_feature (833)..(834): n is a, c, g, or t
  misc_feature (838)..(848): n is a, c, g, or t
  misc_feature (860)..(862): n is a, c, g, or t
  misc_feature (866)..(866): n is a, c, g, or t
  misc_feature (870)..(870): n is a, c, g, or t
  misc_feature (872)..(873): n is a, c, g, or t
  misc_feature (876)..(876): n is a, c, g, or t
  misc_feature (880)..(880): n is a, c, g, or t
tgtattcttgtaatactagttcgcccaaagcatctatgaccgagtaccaaagtcaattgtcgttctttttctcgctctagcaacaaacactaattagcaaattgcaacaggaaaaattgtcagccttcaagatcatcatcgtcttgtaatactatcattcacgctctagcaattactccattcaagcaacacaagaaattagctgacgacaactaatagttcaaactattgcgacattctcaaacaaaaacttgtccttgtgaatagaaaaaacattaataccataggttgtacaaaaggtccatgccaagtaaaatgggcatcagattgcaggaagttgaccccccaaacttacggattgaattcaaagcaattgaaattcttctacaaaaggcccacacagcatggtagtcaacacatcagaatgcactcttgctgctaattttagtaacggtgtctacttcggtcccgatctctcccataatctctatctcgatcaacataatcccaatctcgatctcttcccctctccctattccaactgctaggcctctctttttcgcttcgctctctgttcctgctctccccatcattgcgctcccttcctctgtctctactttctctagcatccctatctatccctagttcctcaacctcccaaccagcacgccctgaaccaggaagcccacgtgcagcttcagcttgctgtgttttggcacggaattttttctttagatttccaaattcatcatacaactccccatcatcttcagcttccctcctgccgcctcctcgctcttctatttcctcttcatcannctctttgtaacctnnaccnnnnnnnnnnnttacaccacccnnnttangccnannctnattngtg

SEQ ID NO: 2537 - DNA, 1838 bp, Glycine max
tcgagcagctacgtaggccccccccccccgggagaagagtatggtctaatgtcttgagctggaagcttcggtttctctccattttctcttagggttttcactttcacccatttctcttctctttcgatctgcgcccaaagttagacattgctagggttttggagtagtggattagctcttttaggattaaggagtgtttctatcttcatggataaagacaaatctctaggtttgccacctccgtctggacgttattccggttactcgcccaccagaagtgttttcaatgtgaaatctgagccgtcgccgtcgtcatcgtcgacgacgtcgtatccgccactggctctgggaaccaccagttccgagtctagtcattttggacatggaatgtccacggattctagtgggtttagtcatgatattagcagaatgcctgataatcccccgagaaacagaggtcataggcgtgctcattcggagattctcactttaccggatgatattagcttcgacagtgaccttggtgttgttggagctggtgatgggccttcgttctccgatgacgccgaggaggacttgctttcaatgtaccttgatatggataagttcaattcatcgtcggcgacatccacctttcaaatgggcgagccgtctaatgctgtgggagcatcggcttcaacgccggggtcaggggcacccaactattctgcagagaatgttgtttttgggactattgaaaggcccagagttagacaccagcatagtcaatccatggacgggtcaaccaccatcaagcctgagttgctggtctcgggttcggaagacatgtcggcggctgattccaaaaaagcaatatcagctgccaagcttgctgagcttgccttgattgaccccaaacgtgcaaaaaggatatgggcaaataggcagtctgctgcgaggtcaaaagagagaaagatgcgatacattgctgagcttgaaaggaaggtgcaaacattgcaaacagaagcaacatctttgtctgcacaattaactctcttgcagagagatacaaatggcttaaattctgagaacagtgaactgaagctgcggttgcaaaccatggagcaacaagttcacttgcaagatgcattaaacgatgcattaaaagaggaaattcagcatttgaaaatattgactgggcaagttatggcacctaatggaggacctatgatgaagcttgcttcttttggaggggggcagcaattctatcccaataatcatgtcatgcacactcttttagctgcacaacagtttcaacagctacaaattcaccctcaaaagcagcagcagcaacaacatcagcatcagtttcagcagtttcagcagcaacatcagcatcagcatcagcagcaccaacaatcaagtgacttgaaaatgagagaaacttcacctactccatgccccaaagacaatacttcgtcagatgtaaatccttctggagccaaggattgttgagagttgagactgctcattgtcttctctatttgcttcgtagattttcctttgtcttgtgtcttagtgtgtttagcctttgttatattttttcattcttaaacagtacaaatggtcctagttagagattgagaataatacatttgcatctttggtattgtgtaatattaaagttgtttaatactctaaaaaaaaaaaaaaaaaatataggggtaggttcatgtgtgtttagtttgccttaaaagcagggagatataggtgaaggaaatcgtagaggctgcaaaggaaaagggggtttggtctgcccactgtcttcttggatagcaagtcccctaaaatgctatagc

SEQ ID NO: 2538 - DNA, 1830 bp, Glycine max
gtccaactcatcatcaatgatttcacttataaaaaacaaaataaaccaccttgctcctccaacacaccactattcttcactcctcctcctccctctctcttccaaacacacatcctcaaccatggcagcaccatcttcagagacaaagtcaccatcatcctcgaacacgcagcttccgctgaaaccaatcccaggcagctacggaatgccgttttttggagcaataagcgacagacacaactacttctaccaccaaggacgcgacaagttcttcgcgacgaggattgaaaaacacaactccaccgtgatccgaaccaacatgcctccggggcccttcatctcctcggaccctcgtgtcgtcgcgttgttggacggtgcctccttcccgatcctcttcgacaacgacaaggtcgagaagctcaacgttctcgacggcaccttcatgccttccaccaagttcaccggcgggttccgcgtctgcgcctacctcgacaccaccgaacccaaccacgcactcatcaaacagttcttccttaacgtcctcgccaagcgaaaagactcttttgtccctctgttccgaaactgcctccaggagtcgttcgcggagattgaggaccagttgagtaaaaacaccaaagcggacttcaacactgtgttcagtgacgcttccttcaacttcatgttcaggttgttctgtgatggcaaagacccttcgcagaccaacctcggttctaagggaccgaagctcgtggacacatggcttctctttcagctggccccactggcaactctaggcctccccaaaatcttcaactacatcgaagacttcctaatccgcacactccctttccccgcgtgcctcacaaagtccggctacaagaacctctacgaggcctttaaaacgcacgcaacgacagcactcgacgaggccgaaaagctaggcctcaaacgaaacgaagcgtgccacaacgtcgttttcactgcagggttcaacgcctacggagggttaaagaaccagttcccctacgtcttaaaatggctagggctaagcggcgaaaagctccatgctgacctcgcgcgtgaggttcggcgcgtggtgaacgacgagggaggtgtcacgttcaccgcgttggagaacatgcctctcgtgaagtccgtggtgtacgaggtaatgcggatcgaacctgcggtgccgtaccagtacgcacgcgcgagggagaaccttgtcgtttcgagccatgacgcgtcgtttgaggtgaagaagggggagatgctgttcgggtaccagccgtttgcgacgagggatccgaggatcttcgaggatgctgaggtgtttgttccgcggaggtttgttggggagggggagaagatgctgaagcacgtgctgtggtcgaatgggagggagacggaggagccttcggcgagtaataagcagtgtcccgggaagaatctggtggtgctgctgtgcaggttgtttctggtggaactctttttgcgttatgatacgtttgagtttgagtatacgcaggctgggtttggtcctactattaccattaagtccctcactaaggcctctaccatctgagtttggggtttattatcttccttgtggcagcgtggttttagcttaatttttaaaaaaatgtatgtgtttttaactttttgtttttttctaaagacatgttgtaaaaaaaataagcgatgttttttttaaatttaatttggaccgaaaatattattattattgttatatattatatattaaaaacaattttatattaaatctgtgtgtacgtctatttaatagagcatagatatcttatatttaaa

SEQ ID NO: 2539 - DNA, 1481 bp, Glycine max
ttttttttttttttttttcgttgaagaggcaatgtataaggtaagggcatatattctttacagttaacaacaagaagctccttgtgttatttgagaaaacaaaagtgggtcaaaattgaactttcaattcttacagggcattgtatccttaacttactaatactatacactaacatcagaactattttttcttacatgccttttcttgaacttccaaaactcatctttctgcctcctcactttcacacccattttacttttaattataccaagcaaggaactccaatccttgtttttccgtgcaggtctggtctccagaagggcctgaagcgtctggtatgaaccaccatccatcatctgcccactcttgatcatctgcttgtgataaaaaaatgcccgccgaaaatctcgaactcggacaaaggcaaatatcatagttgaataagttacagaatcgggttttaatttaagaactgccatctctttcaatagttgtggcagctttgagtgttgccctccacgtgcgtatgcatttatcagcatattgtaagtcaccactgttggtttcaatccaactttcccaaattcagatattacctctcttgcttccatgaagagaccttgtttcgcaaaaccatcaacaagaatgttgaatgtcgcccctgttccttcaactttctcactgatcatcaacttccatatttccattaatgtttgagcatcacctgcatgcctaaatgcatttagtaaagtagtgtaggtttctatggaaggtttaataccttcgttttgcatgttttcaaatgctgcataagctttctcgtgcaagccactaaccgaatatgcatggatcagtgctgtataagactgtgaagtgggttttacaccaactttcttcatcttcgagaatgcatcggctgcagccatgtcactcatattcttttgcttgccatatgcaatgattagacaagtatatgatgtggcatttggcttcaagccaacatcctgcatttcttccaatagcttttctacaatcttgggttgcattcttctgctgtatgcatgcattaggatgttgtaggtagctgcaataggtttaatacctttagctttcatctcaacaaaaaggccttcggctgcttctatgtggttggatttacaaaatgcatccatcagagtgttgtacacaattgcacttgaagaaaccccttttttctccatttcagattggatgatgagagcttgcctcctcagaccctcaacacaaaatgaatttattaatgcacctaagacttcttcactccatctgaccccttttctgttcattttctcaaaaaattgccatgcatcttttggggggggggggggggcctacgtagctgaaaccataatagaacatgtcatatgatcaggatgaatattctctgtttccattgactcatacaccttccaagcatcttcatacctaaaacagcaacaat

SEQ ID NO: 2540 - DNA, 2272 bp, Glycine max
  misc_feature (6)..(6): n is a, c, g, or t
  misc_feature (11)..(13): n is a, c, g, or t
ccctgntgccnnnctagaaaaaattaataatcctgatactgacaatcgtatgctctatagtctattccatgtcttaagtagacctaaactgcaactcatgaatttatattcaaaaggactaaacctaaacagcaactcatttatctcaaaaaaaggagtatattttaaaataatctacctaagagtaatttcggcatctttagagagcaattcatccaaagaattactatgtcaatccatttatacaaggtaaaatttggctgctggctggccaatgatgaaaatttgtctatccatattttacagggtcatttcattgtacatgagaatttaattaagttcgcagaaggggttaagtacaggtagcatatattagagtactttagagaaatctggtgggcatgtactcatttatccggagaggaagacggtaaaactcatcatttctaacatctcccttcctattctggaaaggaccccaccatggaagtcctctgtccacagctgtttgtttgccttcaagtgtgttgtcaacaagagtcccaacaattatagccacagttggggcagaagagaatatggtgttcaaaatgtcattaaaccatccaccacctgttctaactggaccatgaccatccggtgcagtgttcatgacaaaatattgtggtattgatatcgcaaggaacaaggttaggcccagaacatagatatttcttatggaattggtatttgcaaactgtataaaagaaatcccagtagcagccacgataccaaataaaacacagtatatggcagcaaatatcggtaggggaatcgatgcaaaaaaggctccaaatttcccaaaaatagagaagaagatcataaaaccacatgatatttgcactactcttcggctccctatgtgtgtcagaccaagtaggccaacattttcaacagatacagtggtaccaacaatggaaccaaatatgccttcaagcagcataccaatgccctgcatcccgatgcttcggctgagcacatgtgcaggcggtggtgttgcaccagaaagcctggctgcagcaaagaaagcaccagttgactcagcagaagagacaagtgctgcccccatcatcccaaagacgtgactagctctgaatatgggggtaccccactggaacggatacggaactttaatccaaggagcagaagacataaggtacgagcgatctgtgcgacagctcacttgggtctgtgatttagcagtattgtatgcaccagccacagtaaggatagcagcaaatgcccagatgacagcaatgcagagaagtaaagcaaacctctcaagtacttgaagagcagcatgatgaagcctcttcaaatactgttgtgttatgaccagtagaatgagcataggtaatccaatctgcacacagtttgctaccaatggaaagcccctggcaaacaagccaagacccgccacacataccaaaggtacaatgattatgggactaaacaaccttgtcaaatttccccacgtcttactaaacccaaggaagatattgacgaaagaagaaacaataagggatccttgaattgttctgattgtgtagataaacctctcatgctcagaagggaatgtcctgtctgtgtaatcattgattatggacaaaactggaagcaaaaaagcaaatgatccacccatcaccgttggaagcctcgacccaaaccaagtctgaagcagtgtgttcaacccagacataaacaacaatgactgaatcacacgagccttgtcaccatggtccccacccattgcaggaaccagtgtggttgcaatcagaaccgttgttccaagcatcacaatgtagtgctgaaaacccagtagaattgccaccggccatgaaggatttgagtggatgcaatagtgaagctgcgagagttgttcagctggatgccaaacggggcctctagaaagtgctagatttggcggtggtggacctgccggaggtgcctgaaccggtggcggtggatggttgtggtgctcttcacccatctgatttttctcgaagagtgtttgaaaaaaaagagagcttttgtgttgtgtattgaaaagcagagaaatcaaaaggaagcaaacaaggctttgaaagaatggatggctagctttgaaacaaaggaaagaaaagtaaagtaaattaattaattgaagtgtgagaagagtctctttctcatttcgaaaaataagggggcttataattaattaagtaactaagtaaagagttgctcgagccgaatt

SEQ ID NO: 2541 - DNA, 1276 bp, Glycine max
cagattctgattaatttaaaacacatttaattttgttttttcaaaatgaaagtaatttcaatgttgttttttttttttttttttctaaataaccataaggtcaaacgaattaaattcaaacattactaaattatatcagataacatgacgttgtctccaatgtgaataagcaaaacccataaacctaaaacaatatgtaactcaggtaacaaaaccttgtgattgggctaaaatactaaatagaactgcaaatgtaagacaaaaacacttcagaccttttagtcgaacaaactgaaacccatatcatcatcagactcctccttctcttctactttcttttcttcctttgcttcggcagcaggtgcagcagcacctccagctggtgcagcagcaacggcaaccgctgcaccgccaccagacactgcagacatcttttcacttccactagcaattagctcattgaagtcttttcccttgacttcagtcaagagcaactcaatcaactcattctcagcctcagctccaactgcgccgaggatgtgtttgatgtcatcggcagaaggggaaggattccctcccaacactgcgagcaagtatgcagcgacgaccttcatattcgctggattgcgattgcgatttcgcttctggttttggtgttagggtttgtgcagagcgagactaagctacacttcacagttgggaagcaatggattcgttctcaaatccatccagtggttcgtcgcaccaattatctgcgcacgatctcaaaaatcagttgaagaatcaacttgccattgagtatgctcaacaatttcttgagactgtgggaagaaagtgttttgagaagtgtgttacaaaaccaggttcaagcctcggtgggagtgaaagcagttgcatctctagatgcgttgatcgatatattgaagccacaggcataattagcaaagcgttattcagttcacaatgaaaataaatcttgtagttgctcagcattttgtctactaatttgtagacattggagattatgtgttatccgggtttttcgtttccctttttctatttcccattataatagacaatcatgcatttttattttataaataatatttctgaagatttagttttcaaaaaaaatgattgatgtgcttttcgtgtcatagattttatctagtaggataaaactttgttatggttggtaattatatacttgtaagcgatttcctcatagttgtatttcatcaaacacaattttattatctaagacctcaggattcag

SEQ ID NO: 2542 - DNA, 924 bp, Glycine max
  misc_feature (917)..(924): n is a, c, g, or t
aatggaatcataaatctaacatattcgtttaagatatcatcaagaaataatataattaattaaaatgtatgaaataaaaaaataaatgtaaaaaaatttaaaattagattaaaattatgaatttttattttaaaaaataaaagattaaatatttatattttaaaatataaaattaataaattttataaaatagaaaaattaaaattatatttaaaccttttatttcgatcaaaattttaataattctaactcggagaagtagaatgaatggagcctgtaagttgtaatgtgggaatgggctggactacaagcccagcgtccgaaagaaatgctgaattagggtttttggggttatttaacaattgccaggctgcttctattaggcggcaaacatagagtttctaagctacactacacagtcggggaagcaatggattcgttctcaaatcaatcgagagggtcgtcgagccaattatctgctcaggatctcaaaaaccagttgaagaaccaacttgccattgagtatgctcaacaatttcttgagacagtgggaagaaagtgttttgagaagtgtgttacaaaaccaggttcaagcctcggtgggagtgaaagcagttgcatctctaggtgcgtagatcgatatattgaagccacaggcataattagcaaagcgttatttagttcacaatgaaatggacaaccccagtaaatcttgtttttgctcaacattgtgagtactaatttatagacattggagattatgtgttctccgggttttttcttccccattttctatttcccattacaatagacaattatgcaattatttttcattatacaactagtgtatgtcccgtgattcacgtttatttccaactctctgtttccttaaatgaatttatgttctaataaaaaannnnnnnn

SEQ ID NO: 2543 - DNA, 1639 bp, Glycine max
tttttttttttttttttttttttttttttttttaatagaatccagtgactaaaacccctgatggttttgcacttttatttcatgtaaaatcattgttcaacatcagagataatacaatttgacggttaagattgaatgtaggatggcataaccaatatgatttagatttcactcctacatatggtaaaatcaccataatgaacaactccctattccaatcttccttaatgttgctcaaaatgggaaaaagaatatagtcctgtcatttatagttctttggcctcaagccatttctgagtggtctccttacagccactttaagtgagttcaagttttcaagaatatatattagatatttcaaacacatgtagtgcagaacttcatgtaaaaaggatggttttccacaaatccttgttacaagttttaacgactaagaagctatcagtgacattaattgttgttccacttcttcccagttcttaactctggtcaccagtggatgctgatcaacagactcgttcttgcaccaaggatatgagttttcataatcaaaaagtaagactctaattccaacatcagcacactctatggcataccgtgggttatcatcaataagaaccttggcatttaaagacctacaaatttctgactttggtcttgacacaccatcaagagcaaagtggttaccaaagtgaatctcatgaaacagtccaggataattcttctctagccactcaattgtgtggtccttaattgcattctgtcgtgatgttacaactgataggctacaaaatcttgataacttctgaagagccatctgagcacctggaagagggtggatccctgacttgaaatatggtgtcttaaaaaactcatgaacacggatatcagcttcatcacgtgaacaattccatatcttgcagaactcatacacatgatattcagaaactgaataatttgatgaatatcgatctgcaatgaacttgttgagagctgacacaaagtttcctaatacctcatcaacatcaacagcaaccacaagtttctgggacaatcgatgatcattgaaacaaggaggcttggcaggacatccatttatagatccattatcaaccttaaccaaagtagcatcactctcatcactcctaacaaaattcctttgctccaaatcagccagcatcggctggcggcaattcgatgcaaagccacgggaccttgcctttgccctcacaaagatcctatcactattagtactactacagctaccactagtgtcaaagctacaacttctaggaccaaaagcaatgcttctgctaaccccaaaaacatcagcataaacaagattatggagaaatcggaaagacaggtagctaccacgatcagaagaagcaagagaaggatactgagaaaaggccttgctcaagtgggaacaaggatcataaccaactaaataagccataatattgttgttatggtgaaggtgatgccgagtttgctgatacaagtagcgcacagggccttcacaactccttaatctaaacataataacaccagaatcttgctctgatattcaagcatcaccactaaaagaaaagaaataaaaaaaaaaattgaagggggggggggcctacgtagctga

SEQ ID NO: 2544 - DNA, 1405 bp, Glycine max
tttttttttttttttttttttttccttttttttttttttttttactctaaatacaaatgcattatatattaggccatcatcagttttctagtactataaacagtcaacagataaggaaccaatttgcagctcaagatagtcaaccattgggtcactgtaataactttaaatgaataaaatgaagtgatttccaaatttctttcacccttgggctctcaatcaatgacataattaggagccactgctaaaattcggtaatttcttggtgcgcctgggggttctgctgctgctgccgcggcttccccattatctacaactatcaaatggccctctctccgaattaagctctctataatagctttaattttggaaatttcagcttgcacctcatccatcgaactgtagttgtttctctcattttgttggtctacgtaccattgaatcaaatctttttgcctcatcccagacaaaccgtctccttgcacaacagcctcttcatgctgtcttagacgcataataagggcgctggtaactctctgataatattcatcactcataatgagttttctcacttggggtttagatccatctgctggatttccattatttccagtggcttgctgagctgcatcgtttcccacttgatcattaccatttccggcagcttgctgcgctgtatcattcccctcttgataattagcatctctattattatcattttcattgccaccacctgcaccatcattgtggttttgttcttgaaactcagacagatcaatctcactggattccacacttattatggaagttttcagcagttttactgctagacgaacatgacgaggttgtacctcattgtccaaatgacaccgtgcaatggcctctgacagtctgattaatgcctccaactgcctaactgtcatacggtatgcaaccctactcccaggatttgtatcacctctacggagagcaacataagagtctaccaatagttttctggcatcgggcgagagctttggtttaagagtttttgcataagctatataacgcttcagttctgctgtagtgaatgctggagccagagcaccttcacgcttttgatgaactctcacaatatgatgagctatgtggtagtctgtctgatcgtctgggtcgtcaatcataacatatacgagatcaaaccttgaaagtatagctggtggaagggccacattgtacttaagtggtttagatttatcatagcgtcccccagcaggattggcagcagcaagaatggaagtacgagcattaagtgttgcttgtattcctgcttttgtgatactaatagtctgctgttccattgcctcatgaattgcaacctgatctctgatgtccatcttgtgggggggggggcctacgtagctga

SEQ ID NO: 2545 - DNA, 2605 bp, Glycine max
  misc_feature (2502)..(2502): n is a, c, g, or t
gagagaatctagagagagagagagatagaggggtttttttttaataagattgttgttgggtttggttcttcatttgtttactttgaagtggaggtgtggggagagaaagttgggtttctctctctcgtatctggaaaaagtttcgatttttgaggtggggtttgagggatttagggtttgggttgttgggtcgtgagtggaatcagcaactatgaatatgatgcggaggttgaagagcattgcttctgggaggacttccatttcttcagatcctggaggggattctaactcaaaaagggccaagtttgaaccagaaactgaagggaaggccgatgagaaaacaaataccattgaaacaatctgcacagatcaggaacaacctatagacacatcaaaagaaacttccaatgtaggcacatccgatgtatctacagtagctagaactgagaagtcaggtttcgatgagcttcctaaagaattaaatgaaatgaaaattagagatgagaaaagcaaaaacaacaatgaaaaggatatagaagctactgtagtgagtggtaatggaacagaaacaggacaaataattacaactgacattggtggtcgagatggacaaccaaagcagacaatctcttacatggatgaacatgtggaatgggactggatcttttggatgttgccttttctgtttcaggcataagcgccattgaaactggggaatctgttgccataaagaaggtgttgcaagacaggagatataagaatagggaactccaggttatgcgcacagttgaccatcctaatgttgtcaaactaaagcactacttcttttcaactaccgataaagatgagttgtaccttaacctggttttggagtatgtacctgaaactgtctacaaagtttcaaaacactatgttaggatgcaccaacacatgcctatcatttatgtgcaactgtatacctaccagatatgtcgtgcgttaaattatttacatcaagtgattggtgtttgtcatcgtgacatcaaaccccagaacctattggtaaatacgcagacacatcagttaaagatatgtgattttgggagtgcaaaggtgttggttcccggtgaacccaacatatcgtacatttgctctcgatattatagagctccagaacttatatttggggcaactgaatacacaactgctattgatatgtggtctgttggttgtgttttagctgagcttctcctaggacagccattgtttcctggagagagtgggattgatcagttagtagagatcattaagattttgggaacacccaccagagaagaaataaggtgcatgaatccaaactacaatgaatttaagtttcctcagatcaaagctcacccatggcacaaggtttttcacaagagaatgccacctgaagccgtggatcttgtatcaaggctgcttcaatattcaccaaatctacgttgcactgctttggctgcatgtgctcatcccttctttgacgatctgcgggacccaaatgcatgcttgccgaacggccgaccactacctcctttgttcaacttcacatctcaagaactggcgaatgcacctgaagagttgcggcaacgcctcattcctgagtatgcaaggagttgaatcaattccaaagttgaaacatctctagggcattgtaaatgggttttgaattattggacaccctctcggtcatcgcccctgacctgcctgttctgttctgttcttcagcctcttctctgcacaagtcacaactgtgactatacaaagtgagaaacctcaacaccttggaaagttctatcaagtaacttgtaaagatctgcaggtgactcgaatggataaagtggtactacctggtgatacagggttgcaagcctttttttttttgaagtagtttataaatttggtgcctcagttgtgaaagataatgagttctaagttctaacaatcttgtaagcatgttttcatatagttcaagttcgtttattaattattactttattccttgaagtggaccaagtggaatcctcaattgaataggcttcgcttcttcacaaaactttattctaaaaaaactcgaggcaaaatcccaccggagacgaggcccgccgagagcgacagtggtggtgatagtgggccccggcccacgatcaagatcaatgttatgcacggatcctctcaacacgagttccacctcccggcccaatcaacttttggggatgttaagaaactccttgtcaataaaactggtttagagcctgtagagcaacgacttttcttcagagggatagaaaaggtgataacctacatttgcaccttgaagtgtaaaggatagtcaaagcttttgcttttgaaggcactgctagcaaagagaggaaacttgaggaaccagaaaacaaacgaatgtcttaagctttgaggctattgctgtgttagagctgagtggacagctctcaaataggtgactcccctagagtagctataatgggngacaaagctccccaaagaattcttggctgcagactggttatagaattgctgaaatggatggatagagctgagggaacaaaatgcaaaaaaaactaggtgatgg

SEQ ID NO: 2546 - DNA, 1179 bp, Glycine max
tacggctgcgagaagacgacagaagggggcctctggtcaagttcagtccagtgcccgcactacatcgcaaatttttctttttcttctcccctttagatgagtaacgccacagactccgccggcaaaatcccaccggagacgaggcccgccgagagcgacagtggtggtgatagtgggccccggcccacgatcaagatcaatgttatgcacggatcctctcaacacgagttccacctcccggcccaatcaacttttggggatgttaagaaactccttgtcaataaaactggtttagagcctgtagagcaacgacttttcttcagagggatagaaaagggtgataacctacatttgcaccttgaaggtgtaaaggataagtcaaagcttttgcttttggagggcactgctagcaaagagaggaaacttgaggaaaccagaaaacaaaacgtaatgtctaaagcttttgaggctattgctggtgttagagctgaggtggacaagctctcaaatagggtgacttccatagaagtagctattaatggggggaacaaagcatccgagaaagagtttcttgtgctgacagagctgcttatgagtcaattgctgaaactggatggtattgaggctgaaggtgaagcaaagttgcagagaaaagctgaggtgaatcgtgtgcagaaccttgtggataaattagattctctaaaggcaaggaacgccaacccttttagcaacagtagcaatgctgtcaaagtaacaacccaatgggaaacctttgactctggaatggaaagcttggatgctccatccgataacccgtcttccacaaaagtaactcaagaatgggagcggtttgattagctcggaaaccgtttttggaacatctaagttataaatgttgtacaacatcatattactggcccttcatcatattagaggtcttggcacaacgatgttgccttgtgatatggtaggctgaaattttaattgcagaaatgttctctccgctgaggtaaagttgcatatgtttgatctatctcgtgcacttatttttaggcaaaatatgtaaaccaaattgtattcttgttacttgaatatattattgcatcttccgatcatttggtttgtcttctgtttgcaaagttgttcataatttatgtttttattggaggcgttcatttt

SEQ ID NO: 2547 - DNA, 2011 bp, Glycine max
agaactagtctcgagttttttttttttttttttttttttttttggttactttgaagggccgggttggggagagaaagttgggtttctctctctcgtatctggaaaaagtttcgatttttgaggtggggtttgagggatttagggtttgggttgttgggtcgtgagtggaatcagcaactatgaatatgatgcggaggttgaagagcattgcttctgggaggacttccatttcttcagatcctggaggggattctaactcaaaaagggccaagtttgaaccagaaactgaagggaaggccgatgagaaaacaaataccattgaaacaatctgcacagatcaggaacaacctatagacacatcaaaagaaacttccaatgtaggcacatccgatgtatctacagtagctagaactgagaagtcaggtttcgatgagcttcctaaagaattaaatgaaatgaaaattagagatgagaaaagcaaaaacaacaatgaaaaggatatagaagctactgtagtgagtggtaatggaacagaaacaggacaaataattacaactgccattggtggtcgagatggacaaccaaagcagacaatctcttacatggctgaacgtgtggttgggactggttcttttggtgttgtttttcaggctaagtgccttgaaactggtgaatctgttgccataaagaaggtgttgcaagacaggagatataagaatagggaactccaggttatgcgcacagttgaccatcctaatgttgtcaaactaaagcactacttcttttcaactaccgataaagatgaattgtaccttaacctggttttggagtatgtacctgaaactgtctacaaagtttcaaaacactatgttaggatgcaccaacacatgcctatcatttatgtgcaactttatacctaccagatatgtcgtgcgttaaattatttacatcaagtgattggtgtttgtcatcgtgacatcaaaccccagaacctattggtaaatccgcagacacatcagttaaagatatgtgattttgggagcgcaaaggtgttggttcctggtgaacccaacatatcgtacatttgctctcgatattatagagctccagaacttatatttggggctactgaatacacaattgctattgatatgtggtctgttggttgtgttttagctgaactactcctaggacagccattgtttcctggagagagtggggttgatcagttagttgagatcattaaggtcttgggaacacccaccagagaagaaataaggtgcatgaatccaaactacaatgaatttaagtttcctcagattaaagctcacccatggcacaaggtttttcacaagagaatgccgcctgaagccgtggatcttgtgtcaaggctgctgcaatattcaccaaatctacgttgcaccgctttggctgcatgtgcgcatcccttcttcaatgatctgcgggacccaaatgcatgcttgcctaatgggcgacctctacctcctttgttcaacttcacatctcaagaactggctaatgcacctgaagagttgcgccaacgcctcattcctgagcatgcaaggagttgaatcaatttgaaagttgaaacatctctagggcattgtaaatgggttttgaatgaatagacaccctctccggcatcgccacccgcatgtccaggtctgttcttcagcctcttctgcacaagtcacagctgtgactatacaaagtgagaaacaccttataaagttctatcaaagaacttaaaaagacctgcaggtgactcaaatggataaagtggtactacctggtgatagggttgcaagccttttttaagtagtttataaacttggtgcctcagttgtgaacgatattctaacgatcgtgtaagcatgttttcatatagatcaagttcgtttattaattattactttattccttgaaatggactaagtggaatcctcaattgaataggcttcttcgcggctccaaacaaataggaaccccc

SEQ ID NO: 2548 - DNA, 1712 bp, Glycine max
attgcatctaatgaatctagggtttatatgctgcacgagttggtggtgatcgaaaagaatatacagttgtattagaatcgagaaaagcgttaatctccgatggcttcgtccagggacaaggaaccagcgccgccacatcatcacccacctcttctgagcagcctcgtcgtccgcccctcccatacggatgccgccgcagccgccggtggtggtcgggctgccgatttcgagcccggcgaactccaccgcgatcctcctcccccttattcccgctccgatcgatatcccgatgaacctggatatagaattcgtgcaggttcctcatctccagttcaccgaagagatgcagatcgccgttttgcttctgattataataacttgtcacgaagccgtggttatggtggtgggagagatccaggaagatatcgagacccttcacctccgtatggacgaggtagagtagggggcaggccaatgggtagtggacttgctagaggggaaggcaacaatagaaataatcccaatgtgcgtcctagggagggagattggatttgtcctgatcccttgtgtaataatcttaactttgctaggcgggaccattgtaacagctgtaataggtctcgtaatgcacctgctagaagtcctcggaggtcttttcctgcacctccaccacttcatgctcctcctagacgctttcctggacctccgattgatcgctctcctgaaaggactttgaatggctatagatctcctcgtgggttggcaagagatggccctagagagtatggatctgctgctctgccgccactcaggcatgaaggcaggtttccagatccccatgtacgtagagagcgtatggatttcatagaagatgcttacagggggagaaacaagtttgatagaccacccccactggactgggataatagagatcgtggaagagatggcttctctgatgaaaggaaaggatttgaaaggaggccactgtcaccccctgtgccttttttgccatcacttcctcaccatcgaggtggtcggtgggctcgtgatgttagagagagaagccgctctccaataagaggtggcccaccaccaaaagaatatcgtcgggatacgttcatgcatcgtgcaagagatgataggcatgataggcatggaatgggacgagatagaattggaggaatgtattagctgcggatgtttaatgtactttgcgaatgtattagcttcattagttgagatgaagaatttgagagattagttgctgaatcttcagaattggtcacaatgcattggaaaactttttgactttgtgcgcacacaaattgcgtggtttatgattttatcggtttgtttcattccacttaatcttcacttcagatttgtcaatatgtttagtacgtggttttttactccaaatctttgagggggaatattactaggcttttattcttttgtccctctgactgcgagatgaaattaggacacccacctataggctatagcctagaatattaaacaacacagcaattattcttttcggctctgcatctacttggaagtaggaaatatggtttatttatgccctcaggaccaaccagtaaatatagcaaaggcggttatgtccgtactgcactcttgcaaattcagttgttgtaacatactatcctcaaccaagcagtttgatatggaggctttcaacgatgatacag

SEQ ID NO: 2549 - DNA, 1392 bp, Glycine max
aattagctaccccaatattgaaatttaagtataaattgagtgccaatctgctgggctcgagttttgtttttcttgtttctctctctgctcccaacaaaagcatactggttgtaccacttccgatcctgagaaaatagtcaaacacagaaaacattttatgatgttacttgaagttggttgatgcctttcgattctgctcataaaccatcacattaacaaccaaccaacaattcgcaacacagcattaacaaactgttctacacatgtatcttcaaaatcattgtataaaattcagaccctttacttatttataaacataagcctgatattgaccaccaaagtaaactagtttgttttgtttatcttgtcaaaagagagcttccttctttgataagaacaaacacactgccaccatcgccccttgagatacgcaattcttcgtcgaggtatgtggtgagtaaccaggactgagcattgctgttggaaattgggatcttcaagggaggcctacttgaaattgttttcactaccgatgtggctgtgtcttggacagaggtaaggatgcctttgaaaagtgtaaggtcaatcttttgacccagaaattccacattttccggtatctctaatgagtccgtaagctgtggagtgccaattatgccttcctcaaactttatctgcacacgttttggacttcgaacatcaaatttggcattagtactaattgaggtggtggccaaaggaccagcgaactgaacagagttttggacggtaaaattcagcgagtcaataatctgggatatttcctctaccttgaccaatggtagtgttccacttgacaacaatgggaataaacctgcaaaggatgtatacgcgagaatccattttccgttgagaagagtcaaggcgtcggtgggaacagggttagggttcttggcctcgagctgtgtgatgagttcaacgatctccgctctcgtttcgctcgttgctttcagtccacgatcggtgccataaaacgaatccaccaaggccttcttcagcttctccgtctccgtctccgacttcgtcggtttctcctccaccgctacgccgccgccgtacgcctcctccttctccggcccccactcgtcgtcgctcgtgaccgctcggacacgcaccagtagcctcggccttccgacaggtttggtccaaattccgacgctgctgcgtggtggcgaaatagagggtgaagagttgagcgggggcatgcagaggagtttgttgaggtgagagagagacgccattgttcagagaatagaacagaaccgaacgaaactgagaagggaagtgctggattttataacgacagctgaggtttgagaaattcattgtcctaactcctaagcgttgacgacg

SEQ ID NO: 2550 - DNA, 1265 bp, Glycine max
agtcaaaaccagaaaacattttatgatgttacttgaagctggttgatgcctgtcgcttctgctcataaaacatcacattaacaaccaacaattcgcaacagggcattaacaaactgttctacacatgtaacttcagaatcgttgtatataattcacaccctttacttatttataaacacaaaccatatattgagcaccaaagtaaacttgtttatcttgtcaaaagagagcttccctctttgatgagaacaaacacactgccaccatcaccccttgagatacgtaattcttcgtcaaggtatgtagtgagtaaccaggactgagcattgctgttggaaattgggatcttcaagggaggcctacttgaaattgttttcaccaccgatgaggctgtgtcttggacagaggtaaggattcctttgaaaggtgtaaggtcaatcttttgacccagaagttccacattttctggtatctctagtgagtccgtaagctgtggagtgccaattatgccttcctcaaattttatctgcacacgttttggacttcgaacatcgaatttggcattagtactaattgaggtggtggccaaaggaccagcgaactgaacagagttttggacggtaaaattcagcgtgtcaatagtctgagatatttcctctaccttgaccaatggtagtgttccacttgacaacaatgggaataaacctgcaaaggacgtatacgcgagaatccattttccgttgaggagagtcaaggcgtcagtgggagcagggttagggttcttggcctctagctgagtgatgagttcaacgatctctgctctcgtttcactcgttgctttcagtccaagatccgtgccataaaacgaatccaccaaagccttcttcagcttctccgtttccgtctccgtcggtttctcctccaccgccactcctccgccgtatgcctcctcctccttctccgggccccactcgtcgtcgctcgtcaccgctcggacacgccccaccggcctcgcgaaatcggcgaccatcctcggccttccgacagatttggtcgaaactccgacgctgctgcgcggtggcgaagtagagggtgaagagttgagcggcggcatgcagaggagtttgttgaggtgagagagagacgccattgttcagagaacagaaccgaacgcgacggagaaggcacgagctggtagcttactaacgacacgtgagctttgagaaattcactgtccaaacttctaacgttgacacgttgtaaaa

SEQ ID NO: 2551 - DNA, 1624 bp, Glycine max
gcctcaaatctgtgccttttactttctattcttgctagtcaaaaaggatttaatgcttgcttggtatccatctatttttctgtttgttttcttcgtaatgttttttgggaccactattgtttttattccaaaaattgatcgatgcctaagagtaaggaattctaattatttccatggaaagattttaaaaaaattgcagcaatgatttatgcatcaactttgttgatgattgaatcaactgttaaatgcttcaattcctacatcaacgttcctgtggatgacagcatctctactaggaaagttatttcttgcatgaaagatagatgcccgatataatggacaccccggccacggcagcaccaacagatgtaacgattcttgttgcagagacaactggtttaggagatggaactgtcattagatccttcatcaccacaggttgcttccaatgcttctttattccctgtagatggccctttccaacaacagcaacaactgagctattctcactcgccacttttaataatgtggaggacatgtattgatctcgttcatgcacaagagtctccattaaagttggaaactccttactcatttcttgaataacaagtgttagcatgtcactgtcatccatttcattcagcatcttattaagatcatcagcgttggataaaaaaactgcttggaaaagtaaagagtataaaaattttgtcttatgccaaaggggcatcttactccatgttctccttaatgttatctgtacaggacgatcaccaagtatcactctgccaccatacttgatggcttcttcataggccacacgaaactcagagccaggaaatacctcaagcttactagcaatcttggcaaggaaccagccataaagtacttcaaacatgttatgttttttcttcaacattgtaaccatttctcccatggtgggtaccttaagattttgaagggtaagcactgccacccgactcgagcacaattccaggaagacaacctgaggtttcagaaaattcactatagcttgaacttctctgctcgattcctcggagacatgagcggtgccgaccaagtaaacgtcgcagacgccgccttcggcagcggactcgcacgacaggacgagcacgtttcttgagagctccggcgagagcgtggctggacggcgatcggagtccggagcggagggagcggcgtcggcttcggaaggctcgtcgattcgaaccatgctctcggagaggctctccatcttcagatccgtgacgtggacgaagtcctccgccgaggcggcgggcgcggaaggttccggcggttgcgggtccatcgtcgggcggaggagagggtgcgttcggcggcggaaggtggcggaggagagtgtggagagttgggggagagagagggtttgggaacgataaagtgttggttttggtgtgaagaagaggggtttggggcgatgagagagctgcgtgactctagcgagttgagtgcgagtgaccaggtgagtcataagctgtgaaagcgtaaatgattaaggtttttctctcagagtcagaattcagaaatcaaatgggaatagtgcggacgcgtgggcgcgcgccccggcactccgcggccgagt

SEQ ID NO: 2552 - DNA, 820 bp, Glycine max
tcttacgcgtccgcccacgcgtccgtacggctggagaagacgacagaaggggacaaccactcaaatctcaatacctcaattcttcgctttaacgaaaaaggacacattttcccttacaatggcacgaaccaaacaaactgcgcgcaagtccaccggaggcaaggcacctcggaagcagctcgccacaaaagccgccagaaagtcagctccggcgaccggcggagtgaagaagccgcatcggttccgccctggcacggtggcgctgagggagatccggaagtaccagaagagcacggagctcctgatccggaagctccccttccagcgcctggtgcgcgagatcgcgcaggatttcaagaccgatttacggtttcagagtagcgctgtttccgcgcttcaggaagcggcggaggcttacttggtagggttgtttgaggacactaatctctgtgccattcacgccaagcgcgtcaccatcatgccgaaggatattcagcttgcgcggagaattagaggcgagagggcttgaggattttttaatgatttgtcactgctaggatacgttaaaactggatctggtttatgtagtttgtggttttggtgtatttattcgaccgtaagggttgtggttgttagtatgaagatgtagagttaacattatctggctaattagttggttaatgtttactttgaatttgctgtttgtgtgaatgaattaaaagggttgattgcaatggattttggttatttttaaccctttttacattttggcttgcataataacgaataaaaatttgagttttaaaaatttaaaaagacg

SEQ ID NO: 2553 - DNA, 1754 bp, Glycine max
tcgagcagctacgtaggccccccccccgtgaccttcttgaccaaccacacaagcaaagtgtcttctctttctcttcctttgctttgcatccatcgttaataggattgcattgcattgaattaaaaaatgcagagcagaggatcgagtcacagagtctccagtatgggcaataatcgatcccgcattcccgcgctcctcatctccatgttcgctgctttcgcttctatctacgttgctggaaggctgtggctggacgcagagaatcgcgtttatctcatcaaagagcttgataggatcaccggccagggacaatctgctatatctgtggatgatacattgaagatcatagcctgcagggaacaacataagaagcttgatgcccttgagacggaacttgctggagctaggcaagagggctttgtttcaaatcccttgatagagactaatggaacttactcgacgagaaggccgttggtcgtgataggtatactgacaaagtttggccgccagaagaatagagatgcaatccgcaaggcatggatggggagtggtgcatctttgaagaaaattgaagaaggaaagggcatcattgtgcgatttgttattggtagaagtgaaaatcgtggagacagtcaagataaagacattgatcatgagaataggctgactaatgacttcttaattctcgataatcatgtggaaacaaatgatgcattcccaaagaaggtcaaattgttctttgctcatgctgcagacaaatgggatgctgagttttatgcaaaagtcaatgatgatgtctatgtaaatattgatgccttgggagctacacttgctactcatttggacaaacctcgtgtttacatgggatgcatgaaatcaggcgaagttttctctgagctgaaccataaatggtatgaaccagagtggtggaaatttggtgacaaaaaatcatactttcgtcatgcatcgggagaaatgtatgttatatcacgagctttggctaaatttatatcaataaacagatctattcttcgtacctatgcccacgatgatgtgagtgctggatcctggtttattgggcttgatgtgaagcatgttgatgaggccaagttttgttgctcatcttggtcgacaggagcaatctgtgccggtgtttgagttgattccagtgcattcttgtgagcagacgacaaacgtaattcttaggagtcatcaattgttagaaggtttgcatcctaagattttttaatatctactggaagcgaagtgattcatagagatgtctgttgaaaagttgcttctgattatagacttgatgtccatcgaacaatatagtttcattagcttatgagcacgggtggcaaggtgtgcggttgaaggtttactagcagctattactataggtatgcaacgtcgtacagcaaataaaaaaattcagcttgtcacctataaggatttttattttttttactagagctggccacctataagttggtttctatcatactctgtttctttccttcatttcatgagcgtaggggaagatgactcctgagtagaagaacttccaaaaatgtactagtgatatttataggaacgacaatctctcttgcagtaaagggaacttttgtttttgtatatgaaataggcagggaaatttgagtcgtaattatgttttattcatacaattcgcaatttgaatcatataattcatcatttgatacaaaaaaaaaaaaaaaaaaaaaaaaaaaaaa

SEQ ID NO: 2554 - DNA, 1516 bp, Glycine max
ggcagccatgttcttaaccagaagcgcgctttttcgcttttcaaagtctctcccttatgccccttcactctcccttaaaccctccatggtcaccttctcctctactcccaattcaggctggagaaatgcagcagaaggaggaagaagagacggaagaaccaattggacgtatgattctgccgaggcaagacgcgaggcagatgaaatgtctgagagtgccaaagaaacgatgaatgaaggctatgacagggccaaggatcaagcgcgggaagccaaagacagaacaaaggatttcgcacacgacgcaaaggagaagacaaatcagcctcaaagtcaccaggtatctacaattctgccactgctgacaacaaaaccggttccaaggtcggagagtacgcagattatggttctcagaaggcgaaagaaacaaaagatgcaacgaaggaaaaagctggagagtacacagattatgcttcgcagaaggcgaaggaaacgaaggacaagacaatggaaaaggctggagagtacactgattatgcttcgcagaaggcgaaggaaacgaaggacaagacaatggagaaggctggagagtacacagattatgcttcgcagaaggcgaaagaagcctcggactatgccggtgaggctgcacagaaatcaaaagactatgctgcagagaaggctaaagaaggaaaagatgctactgtgaataagatgggagagtataaagattatacggcggagaaggctaaagaggggaaagatacgacgttggggaagcttggggagctgaaggactctgcggctgatgcggcgaagagggcagtgggttacttgagcggcaagacagaggaaaccaaagagaaagtctcggagacggcagaggcgacggctaataaggcggcggagatgaaggaggccaccagggagaaggctgccgggactgcggaggcggccaagaacaaggccgcagaggtaaaggacagagctgcagaaaccgcggaggcggccaagaacaagactgccgagactgctgaggcagcgaagcagaaaaccgcacaggcaaaggacaacgccaaggaaaatgtgagtggtgcagatgaaggagcaaggaggaaaatggaggacctaaggcttcgaggtaaagggtatggaagtcatgaatctgcaggggggcgtggagataaggtggtggtgatagtgctggcgcggcgaccaggggcatttgcggcttcactgaaagcagcggatcagattgcgggacagaccttcaacgatgtgggacgcttcgatgaagaagagggtgtcgtcaatgtggagcgccgcaagaaataaaataaaacgtcgtctatgatacaaatatagacgcagtttatattatagtatattatcatgatgtatgttgtttactttttggtttgcttctttacaaaaaatgtgtatgtgtatggttttgaagattggttctagactcgtgggaaccatttcagcaataaaaattttgcgcgttcttgta

SEQ ID NO: 2555 - DNA, 1077 bp, Glycine max
  misc_feature (2)..(2): n is a, c, g, or t
gncacacccaagagaaactccaaaaaacaagatatggcagccatgttcttaaccagaagcgcgctttttcgcttttcaaagtctctcccttatgccccttcactctcccttaaaccctccatggtcaccttctcctctactcccaattcaggctggagaaatgcagcagaaggaggaagaagagacggaagaaccaattggacgtatgattctgccgaggcaagacgcgaggcagatgaaatgtctgagagtgccaaagaaacgatgaatgaaggctatgacagggccaaggatcaagcgcgggaagccaaagacagaacaaaggatttcgcacacgacgcaaaggagaagacgaaggacgctgcggggtcgatgagggacagggcggagagtgcggcggagaagacgaaagagtatgcttacgacacaaaagagagtgccaaggacgcggcgggaacggtggcggacaagagtagggagggggctgagaggacgaaggagaagacggaggaggtggcggcgtcggcgggggaggcgctgaagaacgtgggggagaaggcgaagcagggcgtgcaaggggcgtgggagacggcgaaggacactacgcagaagatcaaggagacggtggttggcaaggatgatgatgatgatgatgatcatggtgatggtcatggtggtcttaaggatgatgatgttgtggagatgaggaggagagttggtaagagattaccatgagaagggttattagagaacacagaatcaatggcttcatttagtacttccatttcttactattatgccgtatctatgtatttatgtttctagtgatgtttttttctttttttttttcaacatgcggataacttggggatatcaaggttgttagttaatatgggcataatctttttgtccagccatgatatcctcttggaataaaagtttatatattaatcataaaaaaaaaaaaaaaaaaaaaaaaaaataaaaaaaaaaaaaaaaaaaaaaaaaaaaaaaaaaacaaacaaagaaaaaaaaagaaaaaaataaaaccaaaaatggggggggggccttttaaaa

SEQ ID NO: 2556 - DNA, 928 bp, Glycine max
ttttgtgttttttttttttttttttttttatttttttaaattcaacacaagtttcataacctgattttaatatataagtgagtctttacagcaagtgttgagagggataagatccataaaaaagttacatcaaagactaaatatgtcagcactcagatattgtctttgctatcacaaggtaaaaaaatgaaaatgagaagtatacagaatttccctcacctatgctgcaggataatcaaatcccttgttatacattgctgagatcttatgttctctgggtacaaaatactacaaacaatctcaaattaaagaacagaagattattttccctttgcaaatttctcaatcattaaatgttcattgacaatatcaaaaaatgggaagtctctttgagggtcagaataacttgctttgcataaatgatgtcacacaggctcactcaagtttccatgccttttaaccttcaatttgtgatcttcgcatgaaagtcttaaaattctgaccatcagctttacaccattaaaaaagaaaaggagcactgtctacagaggaacatcgacaccacggctatgccggtcacggctattcgtttccatgaatcctgtatgcaagcttcttctccttctaccgtgttttaaccttgttcctcttcttctatgacctgaatacaccacaaaaataacaaccaagaaacctactccagaaaatgcccacaagaatatcacccaaaacctgaaagaactaggcatctcgtctttccgagcattcgctgattcctccgattgatttgttgagatattattgcttactgaatcatcatttgcatctatgctgttgactcttgagactccattttcctcttttttgtcctcttttgatgttgacaaggaattattaccccttctgtcgtcttctcgcagccgtaaga

SEQ ID NO: 2557 - DNA, 764 bp, Glycine max
cagcaggttgtttgaagtgaatattcaaagcaatggctccacccattgattcaccaaacaagaagcttggtacatcttgatatttcttttgttccttaatttttgagaaatgctcgatgacatcattcactagactttcaaagctaggaatataaccatgaagaccatcagaaaggccaaatccagggtaatccaatgcaaatactccatatccagatgatgctaacttccttgcaactccttcaaagtaaaatgtgcaagtatctgcataaccatgacagtaacaaatgattgctttcaaatgagaactttctggaagccaacttttagagaatatttttaatcctctggagttcacttcataaacctctttcgtcttcaccccatctgatgataaccgaaacaagcaatgatcaatggcaagttgaatatccttaaaagcctcacgagcacgccgtctagcgggtgcctcatccaagttggacagaaaaatcgtttgcaactcttcactcatatagtttactactacttgttgttcttttgtggttattgcagccattgctatttagctccttaaatactaatattgtgactaaaattattattgaagaaaaagaaagagagaaagtgtagatagcaagttgaggagtggaaattatgtgtctccttccatcagcagccagtagctgggaagtgggaagttagaacaaagagagaaagagagaggttcctaaagtgaagggggttgggagtgtacactgcac

SEQ ID NO: 2558 - DNA, 2100 bp, Glycine max
ttttttttttttttttttctgcggtaaaatggaatatttgatataatttataaaaccaaaaacgattttacaatgcatttgttcaagccataaccggagatctatatatttaaagaatctgaaacagtgcacctttactgttctgaactttggataacaccacactagctcctaattcaaaaacacaactcaaactagaggtgtcctctaaaaatttattcaactagggaaacaaaactaattttcccaatcttaggttatgggggtaaatgaagactaccaggatcgtaaattccagcaccaagagctatgaaaacccaaaatacgagaatacttatgacagcctttctcaacagctggtcagaattgctggtttggtggccatctaattcattagattgatgcagtgatggcaaacccctattgtcactgatatcctcctctctatcaatccggctggtcccagttgcatgaggttgcagaatatcccagttgccaattttagaacatctcatgcaagagcagctgcctccaagatatgatggtagggtcggaaaattgtcataaagtaccttccgatatacctctcctcctaacttcaacttcttcctagtagatggctttaaaacctgaataaaagtctgggcaataacacgaacaattgctggaagtcggatgataaacaaacaaccaagacgattaggaaagtgttctagcagaagggaggaacaagatctcaacattttcataggaattctcaatggagataacccttcacaatccaccaatactgtaatttgagggttgcttgcatcaaccaagtgcaagactccgtattctacctgtgatataactgcctgagcaaattgaagtctatcttcagatgccaaagagcgacaggctatcccaagccgtacaatgaggcaaggtctgtgcgaaaaatcagatccatgccagaaaaccatatttgaccacgtttccagctcttcccctgaaagaaatctgtaactgtcccgccaacttattgtcttcttgattgaggtaaggaagcatgaagagtcattattagaagctgtgtaaaatctgtggagctcatcatcattgattctttctggcaaactaatcccttgattttccagctcttgattgagtagagtcaaccagttttcatattctaaaacttcaggatctatctcacaatgacttgtattcaaattagcctctgctggagatagttcggcggatgcttcagaatcatgcgaagcaacacaatctgaggttccatcactacattgtggttgatcagtaaagacggttgcaatagaaaggactaatagaggtcttgatagtacctgcatgcttttcaccaaacccctgaagggtgcccacctctgaatccatttgaatggtggatagacaaggatttggagaccctgtaggcctcgccatacacacggacatttactcctggagaatctcctcacggtttctaatgcagcaagttttagtagaaaaaacgtgacacgtcccacagcactgcttccaaagtcaccatgggttaatgacacaaggtgttcataatttctctgtgcaaagcctttaggccgtgatgcaaccagaagttttttgtacgtttctttcccattaacaacaacactgctttctttagaattagaactcaagctcgagttagaattatccatcctatctcccatgtaaactgaaggcatgtcagcttctctgaaagaaacgtgtaattgtcaggttggggaggttaggaatggatgtgaaaagtgatgtaacggattttgattttatagggcgaagaattgaattgaattgatgagggtgtgaggttgttgatgatgatcttcgttcgtcgccgatttccaccgaatggttcttcgttaactttccgagttacatcacagtggcggggcgtgggtttgcaagagggaccggaactgaacctgattctgagacgtggacggtggagatgcgttgattcagacgtcattgtccctccatctgttattcaacagtctaactccatctctcgtcagcagacacgcaaaacgccagactctcgcggacgcgtgg

SEQ ID NO: 2559 - DNA, 801 bp, Glycine max
acccaaccccccctccccctctaaattatctttcccaaactgctcatatcattaaataagtgacaacaacagcttacacaaccatatgtttcttcccatagcttcctatgatcttatactaatgcctacatatgcatgctacacaagcagcaccataacctcagttacacactatataatatatataaccacagacataatacaagagcactagtacattaaagaagcaatttctagccattcccttgtcatgtcacgtggcctcttattctaacactgctaacataaacatcatatgcaccaacctcactgcaccctagtgcagtctgtgttggggctgatctggtagggaatgttgaccccacatttcttgggaaggttagcagcaaggttgaggttgaagtcagagtagttgaagccactgttcctaacaccgttcttgatgcagttgcaaacagcttggcggtctggtttggtctgagccatgccatagagatttcttatcccattgcagcactgttcaggaacattggttccaccatacaccacataggagatgcatggggtcaggttgctcacaacctggccacatgtcatttccccttgtgccattggaccgagagccaggcacacaagggacatgatgaagaaaatcctagttgacaaactagccatgagaaaaagaaaaaccctagatggtggtggttgtggtttttttttcttctagggttagggtttgaaggtgtggtgtgtttttgtcgtcttctcgcagccgtacccttctgtcgtcttctcgcagcc

SEQ ID NO: 2560 - DNA, 894 bp, Glycine max
  misc_feature (850)..(850): n is a, c, g, or t
  misc_feature (858)..(858): n is a, c, g, or t
  misc_feature (861)..(861): n is a, c, g, or t
  misc_feature (879)..(885): n is a, c, g, or t
  misc_feature (890)..(894): n is a, c, g, or t
ttttttttttttttttttatatttcccaaattgctcatatcattaaataagtgacaactacagcttacacaaccatatgtttcttcccataacttcatatgatcttatactaaagcctacataattaagcatgctacacaagcagcaccatgacctcagttacacactatataatatatatatatataaccacagacataatacaagagcactagtacaagagccttaaaaaagcaatttctagccattcccttttcgtgtcacgtggcctcttattctaacactgctaacataaacatcatgcaccaacctcactgcaccctggtgcagtctgtgtcggggctgatctggtagggaatgttaaccccacagttcttgggaaggttagcagcaaggttgagattgaagtgagagtaggtgaagccactgttcctaacagcgttcttgatgcagttgcaaacagcttggcgatctggtttggtctgagccatgccatagaggttcctgatcccattgcagcactgtgcaggaaccgtggctccaccatatagcacataggagatgcatggggtcaggttactcacaacttggccacatgacacttccccttgtgccattggaataatggttgcaccaagagccagcaggcacagaagggccatcaagaaaaccctagtttgcaaactagccatgacaaaaaccatagttggtagtactgattgtgtgttgtgggtttttttctttcttctagggttagggttcgggtttgaaggtgtgatgtgttttgagaaactactcggggggggggtgcctacgtagccgagagggggggcccgtacccaatacgtantcattccnccncccgccccgctccccccnnnnnnnccccnnnnn

SEQ ID NO: 2561 - DNA, 879 bp, Glycine max
tatctccgcaccccagccaatcctcccttcatatggccaatagtagtcatagccaagtcatttattccccaagcccacataaaactcttcataccaagaacaccagcacttaagagcccctcaagaatacttgtattaagtgcattttcagggattaggcctccccaaaatccaacatcaacatagattttatcctctgcagcatcaagcttaagttttagtttttcctttgacacggttgtaggataattgttcagaggcatgtcaaccactgtggttacgccaccagcagcagcagctctggtaccagtatcaaatccttcccactcagttcttcctggctcatcaagatgtacgtgcacatcaatcaagccaggcatgataacagcatctccataatcaattacttcttcttgcttaggcttcccctgaatagcatgtccctcaacgacagatattattttcccatcatttatctccactgaaccagaaatgatcccttgtggggtcacaatacgtttgctggatatccagaagtggcgatggggaagaaggctgcacttatcccgcggtaactttatgagaggaaataactgtgctgtgtaagaatcctgcaagtagaagaacactccaaaggaaacaaggattgtaagcaaaggcaacaccctccacaaaaactgatccatctctcactctcactattatgctctctcttctttatgaatttatgctatgattattacaaggcactctcttctcctctctgttagatgacactgaaaactaaggggttactcacatacatgattttaacttctatggtatatcatatcttcctcaagaaaaaggtactgtatatcatatcaaccggacgcgtgg

SEQ ID NO: 2562 - DNA, 1024 bp, Glycine max
cataatcataaagccaaacttatcgtctatttctgattatgttattgactttcaacaaacatgacgatggttgccatcaaattttgtaaaagataatgataatggctcaacctttttttttttttttctttttttttttttttttttttttgaaggggcaataattcaaataatataaaaaccaaaaatggaaagctgaaaatggtaactctccatgaaaactcaattatggtgaccacatgctgctcaacaaaatcaattactgctacagttgacaatgaatgggttgataaatttgattaattgagatgttcggatccctagcttcagatcaacttcaccaccacccaaccaaaagaaatctggagttagttttacaattgcttcatccaaaatcaccgggatgtctgttttcatgccaatacaagtcactgcattgtgcccatatccagtcaactccattgatgtctcctcaggagctagcctcatgttgaatttcttcttcgcgatacttccattgttgagcgaatacagaaaattcttgacagcctcagcgttgaagcgagcggtgtactgaacgacaacgacatagtatttggaattcttgcggtcgctgcaatcgacgacgttggcgggggcttgcgtgttaacgagaacgatgcttttgcagagatggtggattgaggcggcggagagggcgtcgcgacgggcttcgaggggccagtcgtagtaatcggaagggactctcttgaaggagaaatcgggaacgccgttgctgcgcagaatggaggagaggcgagccacggtgtccgtggcagtgtcttcgacggtgtcgttttgggaagagggtgatggaagatgcgaacgctccagtttcgatatgcgttgcaggagctgggtttggactcgctccagttccgcaagggcttcctccattctcattcgcgctgggtgttctgcaatcactcgctcctgcttcaacaatggtcagttttgccatttccctcactcatccgtcgggaat

SEQ ID NO: 2563 - DNA, 2275 bp, Glycine max
aaaacgaatctggaacgtgaattaaattagatataacttgaaatatattacactttttaatcatataataatatggtcaaccctatgtatgatcagtcacctcacatcaaactttacagtgtcgaaaacttatgcatcagaacaccttggacttgtaattttgacttaaataaaataacataacaattaaagggaaaaataaagcatggaacttttattggtttatcgtgttgggaaggaggcaacgagcccaagtattgaccttcaccaaaaataaccaacatttactcaccacagttctctttattccgaatgcttactgctttcataattgtttgtgtttgtggccacaattcacccttccattccaacttatattgggatgtcaagtttaatctggccaaaaaagctgaaacattaaactcagaacttccaacaccaatcgataaacattcaggtatagcttgttatatccttaaactccggaattaaagaaaatatgcagcattcaagtcagaatctctatacacaaggcagccatactttgttgtttcccccggatctgcctaacatctccacaactctacatcaccacatgatatgtttacattgggctcttgacacaaaattccccattttcccacagaagcagtttttccatatgaggggaaaaaaacgaacaattgggtatcccaccagcagcattacattgtgccataatccagattttcccaactgaagggagcaactgagcctacgaaagggcgaccacggaagaacacacaaacacatacacaaacagctgcaacagctagcattgaataaataaaggggcggtgaagcaaaccatgtgaacctggaactcttctgttgtagcgaatttctgcattcgcacacttggcacaagaactctgacctcgtttgactaagtaactttgcttttgcttaagctccactctcagtgactgttgctctattgcatttgcaattgttaccgaaatttcacccctttgtctgtcagcaagtttacgggcgaccagcgcattataagagtcattattcctcatcatggcataggcatgtggactctgtccgtttgcatccacaagggattcccaacacttcaacccaatctcctgtgggtcacttgttaaagagtcaacgacactctcagaaccagatgtgcatgctgccaagtgcaagggtgtaataccaccaggaccctcaagattcggtggaaatacgtatttcctggatgtaccattgttgcttggtatagaatagtggatgagcaaatcaaccatgccaacgtactttcctttcactgctctatttaagagttggattgcattcaacatctccactgaccctgttgacaaccattccccttgcaagtgtttaccaaccagcacatccagaagggttttgactagcatgcaacagtttctttccacagcaaatgtgagtacaaatttgaacctgtcaagcgaataatatggaacctcatgcacatatgagaatctttctctttggaacagccagccaagctcattcaagaaatgcaaagcctcctcccttgatcttggccttccaaaatgatgttcatgctcctctgaaatggcatcacatattttttcctcctcgtcaaattcagactcaagtggtctcaattccttgcaaatggtctcatcagctattatcactggaaaactgttgcccttgaaaccattttcaacctcaataaaacagcgacccagaacaccatgcgatacatcctgaactttaaaagcactcaactttatcttatcatacatcacaccagaatatgcagatcctattacttctgccgatgcgtaagagccggtacctgtacagtgaatctttgtgcctggagttgacaggtttctacccttcaatgaaatagaggtttcctgtccactaacaattgccaaaggcgacacagatatcaactctggtgacttccatgttctccatggtttgcatatgcgtatcttcccatctttgtgtgaaacaaactgactgccagaatgaactagaaaccttccatttctccaaaaatcggaatctgaattttgaattaaagaatgaacatgttgaaggaagttttcttctagtttctcccagtcagcagaagacattgaagcataaattgataggaccacacaaccaggccgtatgtagctctccatgtctgatggcctattagatagccaattgtaaatctgtgggggggggggggggcctacgtagctga

SEQ ID NO: 2564 - DNA, 1827 bp, Glycine max
ctgggtcagccccgcgcccgcgatttagatgccgcttgtttatcaacaaataaacttaggcgcaaaccaataactaaataaaacaacaaactcaactatcttcgaatcccatctacacctaggttaagaagaaagatctcaaacctctgaaaaccctgaaccctctctttctcttcacatcattctaaacccattctgaaacccctcacattatttcctccaaccatgcttcgcatagcatcaaagctatcatctaggttttcttcctcttctactgccctcactgcaaacccactattccccacaagactctctccaattccctcttcatcgttccgaccattcaccaatggcttggaattggaggccaacatggtcgtccccgacgccatcaagatgatcaactacgccttgaggcactggaggaccgataggtcacttggggcgtacaggatgggcttgtctgtgttgaagatttgcattaccaatgagttgactgagggcaaggagccaaagcgcgagaattcgaagggaatggccatgcttgctatgtccactttgttgtttgaaagaggagagtacgcagaagcgattgagaagctagagggtgttcaagagttaacaaattcttacttgggtgttagagttgctgctcttgaaactcaggctgggcttcatctattgatgaggcaggatgatttggcagcagtggttgctgataagtgcatgaagatggtggagaatcaagagaaaccactagaatatgaggaacgatttgtagattatgaggcacaatttgttcgtgctaaagcactaaaagggctgattgaacttgtcaatggcaatgctgactcagctgaagatttcttcgacaagtctctccgcgagaagtattgtgatggtactgctggtctatcatatgcggaattcctacataagatagggaactatccaatggcaaaggaggtttaccgaaatgtcgtacaaggggctattgaagtaaaaaatgctggcagaccatacttaggagctggtaacatgagcgtggacgaattaattgtagggtccatgtttgctttaggacagctggaattacttatgggtaactactctaatgcagagtgccatttgacacaggcattaagtagggcagaggaagcctatggagactctaaacatcctacggtgggggttgccttaacaagcattgctcttttgtatcggcgtaaagcaatccaggaacattcaagttcgctgttagttcaagagggtctctaccgaaaagtgatagatattttgaaggttccaacaatggaaactgagtctgaagatgctgcaccattggtagatagaagtgatatagcagctcttgcaacaggtgcatatgcagaagtacttagtgtccaagaaaagagacaggcagaaggggagaagatgaagaacttggccgagtctctatggaaacaccgttggctatctctagctaatgctattgattcagacaagaatatcattgattctagaatttgcaggatcctgtaaattggtctattttctgggtacccttttgttactataggttctagttggaccgtgatacatgactaagaccatggattaatagtgcagagttactttctacagtattgcttggaatagaaatgtcgtgccgacatatactatgatatccacggtcggccgatgtatatttagaccgaattttaatgaggtctttttaatattcacttaaattatttgtagttgatgttttaaatgttttgattgggaagttatttatttaactattgaaatccattttggttattt

SEQ ID NO: 2565 - DNA, 765 bp, Glycine max
aggggcctttttttttttttttttaaatccctaggcactagattcaaagagaacgaaaaattcaattaaccactacattgtagccctacaccggaatccacaaacttccataccaaattgacccacagagtctcaaatatgacattacattggccttgcctccacataacacaagataaataatagaaatccaaaataagcatggtttatcattcctctaaaaggcgaatgaagtaaagtcgttacaaataaaagcttaacaaataactgaaatgaaatgtgattattgaagttcaaacactggcacaaaagagggttttttttttgtttttgttttttgatgagcacaaaaaaaggaattattttttgttgtagcgagctacctcatcatcgttggggaagaaacccatgagtctcccagcggagttctggtaagcatacatgaacccacccatcacaccgatcaaaccccctgtcaccatcgaaggacccctaattccaggcttaatcccggagaggtagccgacggtgacggaaacgccggtgattgtgacgaatcggagatagtcgagggtgttgaagttgccgacgactttggtgaaaggagggttgcgatcaatgactgggtactctggcttcgtcgatgcagtgatgtctgtgttcatctttcctccttccttctaatcgctgctacaacacaccgcactgaattctgctacaaaaaacctcaacaacactacactctctgcttccgcggacgcgtgg

SEQ ID NO: 2566 - DNA, 842 bp, Glycine max
ttttttttttttttttattttaataaaattcttattccattgctgataaaaggcacaaaaaatttattcctagacacttacattcaaagagaatgaaaaattcaatcaacaactacattgtagccctacaccggaatccacaaacttccataccaaattgacccacagagtctcaaatatgacattacattggtcttgcctccacataagagaaattgtagaatcccaaacaagcaaggtttaacattcctctataaggcgaatgaagtaaagtcgttacaaataaaagcttaacaaatagcagaggcgaaatgtgattattgaagttcaaaaaatgctacaaaagtgggtttttcttcttcttcttcttctttttttttgaaacgagagacgaaaaaaaaggattattttttgttgtagcgagctacctcatcatcgttggggaagaaacccatgagtctaccagcggagttctggtaagcatacatgaacccacccatcactccgatcaagccccctgtaaccatcgacggacccctaattccaggcttaatcccggagagatagccgacggtgacagaaacgccggtgatggtgacgaatcggagatagtcgagggtgttgaagttgccgacgactttggtgaagggagggttacgatcaatgacagggtactctggcttcgtcgatgcagtgatgtctgtgttcatctttcctccttccttctctcgctgctacaacacacacgcactggatttctctactacaaccttaacaacaacacttgctgctgcttgcttccccttctgtcggcttctcgcagccgtacggacgcgtgggtc

SEQ ID NO: 2567 - DNA, 1534 bp, Glycine max
ccgaatgccgcggagtaaggtgatgttgccgcccacgaaggcgccgaaggtgacggcggttttttttttgtctttttgaagtctcaaaaacacttgcacaaagattgcttcaaatgcaacctttccaacaattaacaaggcattacaatgaagtcaaattccaagtaatgtaatgtaacacctaaccactgctatatgaaaaggaaactgtacacataaaagggaaaaatatagagaaattaagcataacaaccaattgccctgagggtagtagtagagtagcagatccaagcaagggattgcaacaaatcaagcctttccaactcctagagtaagctccaaatcatccattccaacctcgtgtattctctcaccctcccagggtttgactctgccattctcgaagtcaaaatcggagcctcctctgactcgctccgcaacagaaccccacagcatgccttcctgggcagcgatctgctgcatggcgggtttcatgaggttaaaggtgggagaaggaggagcggccgccatcgtcgtctgaacctgaaaactaacccagcgcccagaggcggagtcaacggtggaggcgtcggactcatcgcactccgggatggtggaggtggcgaggtggtggcggcgagaggggctggaaggggcggaggtggcaaaaagagggtggcggagggaggcgttatggagggagtcgaaatcagccttgcgcttagagctacgaggagaggagagaggtggggtgacgggggcgctgttggatatcctgagaggagggaggttggcggggatggaagttatgttgcggatgaatgggatgagaaaggaagaagggtggtttccgtcaatgcgcgtggggcttgggaacgaggaagaggttgggctagcgtggtaggatggtacaggactcgggtatgacgaggattgtggacttggctgaatcgaagaacacgcgcttatgtttgccactgttcctccaatctcactcgcgctgggtctcttgcatccctttcgataagtggtgccatcctcttccacgatccaaccagcttcggcgcatagagctttcaggacctcgttgttgtcacagtgcttcggaagcttgtagttcccctgagctcgaagaccggtgtagatcttagcggcgatcgctcttcgtctcctctctctcctcttgttgttttctctctccttccatgttggcaacctccccgtcgatccgccgccggtcatcgttccggcgaaacgaagcttgtttgttccgacacctcttctagcgtcggatgcagaagaagtgaaagatatttgttttcgtttgtgtgaggattgaagtttctttctttctttcttgtgctgagatgagatgaagaagcggaaacagaaatgttgcttcctttttagattcttctcttctctctccctcccttttcacactgccgtccttttcacttcattaattttctttattaagaaaaataagatattggactggagatcgggggggggggcctacgtagctactcga

SEQ ID NO: 2568 - DNA, 1430 bp, Glycine max
cttttttttttttaagtataattaagaatatgacctcgtttcccctggtcttagtaagtcaagattgaagagtctcaaaacacttgcacaaagattgcttcaaatgcaacctttccaacaattaacaaggcattacaatgaagtcaaattccaagtaatgtaacacctaacaactgctatataaatgaaaaactgtacacataaaaggaaaaatatagagaaattaagcataacaagaaccaattgccctgagggtagtagcagatccaagcaagggatgatttcaatagcatcatcaaatcaagcctttccaactcctagagtaagctccaaatcatccattccaacctcgtgtattctctcaccctcccagggtttcactctgccattctcgaagtcaaaatcggagcctcctctgcctctctcggcaacagaaccccactgcatgccttcctgggcagcgatctgctgcatcgcgggcttcatgaggttaaaggtaggcgaaggaggagcagccgccgccgcagccaccatcgtcgtctgaacctggaaactaacccagcggcccgaggcggagtccacggtggaggcgtcggactcgtcgcactccgggatggtggaggtggcaacgtggtggcggcgcgtggggctggacggggcggaggtggcaaaaagagggtggcggagggagtcgaaatccgccttgcgctttgagcttcggggagaagaaagaggtggggtgacgggggcgctgttggatatcctgagaggagggaggttggcggggatggaagttatgttgcggatgaatgggatgagaaaggaagaagggtggtttccgtcaatgcgcgtggggcttgggaacgaggaagaggttgggctagcatggtaggatggtacaggactcgggtatgacgaggattgtggacttgcctgaatggaagaacacgcgcttaagttcagtggtgttcctccaatctcactcgtgggtctcttacatccctttcgataagttgtgccatcttcttccacgatccagccagcttcggcgcagagagctttcaggacctcgttgttgtcgcagtgctttggaagcttgtagttcccctgggctcgaaggccagtgtagatcttagctgcaatcgctcttcgtcttctctctctcctcttgttgttctctctctccttccacgtcggcaacctccccgtggatccgccgccggtcatcgttccggcgtgacgaaacttgctccggcacctcttgttctactgctgggggtagaagaagtggaggatatttgtttttatgtgtgtgaggagaaggacttggtggattcaagtgatgaagaagaggaaatagaaatgttgcttcctttttagattcttctcttctctctccctcccttttcacactctcgtagttttcactt

SEQ ID NO: 2569 - DNA, 2110 bp, Glycine max
tttttttttttttttttttttttttttttttttttttttcttcttgttttgaatgcatacatgaatgcatgtatgcaaaagtaaaaattaagtcattcccagttccaaatctcaagctgaaatatgttcatgggatcaaagtcatcattgtttcacctggtttctgatgaagaggagaaagacggactttctaaaagtgggtcaatcgaatacacagtggcaatacatcaagtcaaaacattttttttatcacggtgggtataagctccaaggctaggaatttaaataatgttttcaggattcaacataaaaaaattgtaaaggctaaatatttgagcaattaactgttgggatatgattttatcatggcgcaatcctaagtgggtcacgaggaaagagtgatgttttgcgaatgttattcaggccacagaagagcatcactacacgctccaaccctactccaaagccaccatgtggtggtgccccatatctgaaagaatcaatgtatgtagatattgttttgacatcgatgccacaagctgctgcacgttgttccaaaaattctggcacatgaacacgctgagctcctgaaattatctcctcacctcgaataaagacatcaaacgagttgctgtatgcaggattgtcgtagcaaggcattgtatagaatggccttacagccaaagggtaccggtgaaggatatagaactctgtgccatatttctctgagactagctgacccaatttcctttccgcttcagtattcaagtcaccataaggttcaatttctactccaacatccttgagcatctgaatcccttcttcatatgtaagccgtagtgtcgtccgcagatacttcaaaggttcaaatggatactgagacccgacagcttccagatccttcttacaattctggttcaaactgtcaaacattgcgacaaacaatctatcgactatatccataacctcaaagtaatgcttcttaatctccatttcaacatcaagacctgtaaactcacacagatgcctgtgagtgtaggaatcttctgctctaaacacaggaccaatctcaaaaacacggccaaaatctccacaaatagacatttgcttgtgaagctgaggtgactgggccaggcatgcaggttgacctttgtagtccagtctaaaaacagcagctcctccctcactagatccggctatcaactttggagtgtggatttcacaaaaaccttcagatactaagaattgtctaaacgcatttccaacttgagactgaatgcggaaaatcccttgattagctggcgttcgcacatcaagcaccctaaagttcagacgtgtatcctgattaacacgaacaagttgctcaccagcctgaagagccgtctcgatttcaacttcacttcgagcagcatcctcaagattaataggcagagtaggtacagccctactgacacaatacaacttcctcacttgaatttccacctgttgtgtggcgcctttgatgggagcggaggggatcgaaacaacgccttcgacatcgacgatggactcgcggctgagtgcagcggcgaacttcaccatctgcgggctcaccgtatcggcctgcgcctgcaccaagcattgaacggtgaagccattctctctgatgaccaaaaacgccatcttcttcccgacggggcgaatcgcctgcgccctcccgcgaatcagcactgacctgttctccagcgcgccgccgagcgcctccactcgcgtccactcgccgacgtctgccgatgtcttagactgcagctccaccagcggcacgtcgccatagtttccgccgagagggtcctcctcgtcgacggagaggttggccgtggcggcggatgcggtggcgatttcctggcggcggcggagcttctccagcttcgcggcctccttcttagccgcctttttgctgacttgggcctccgatgatgcggcggcggcggggtcttggaactccgaagacgacatcgttttggaagtgggtgtgtgggttttgggagaggtttctttgcggatggtgtggggggggggcctacgtagctgatttagacaatgagagaaaattgctagggttaaatttttc

SEQ ID NO: 2570 - DNA, 1550 bp, Glycine max
tcgagtcagctacgtaggcccccccgaaatagttaaacactctctctcactcaatggcttggcactcgttcctcttattagcgacggccattctcgccgttgtgtgctccgccgtgagcggttgctcgccatcggatagggcggcgctgctggccttccggaaggcgctgagcgagccctaccttggcctcttcaactcgtggacgggctccaactgctgcctcgactggtacggcatcagctgcgacgccaccaccggccgcgtcaccgacatcaacctccgcggggagtccgaagaccccatcttcgagaaagccggtcgctccggctacatgaccggaaaactctcagaggcgatctgcggcatcgacaccctcaccaccctcgtcgtcgctgattggaaagacattgccggggagatccccacctgcgtcaccgcgcttccctccctccgcatcctcgacctcatagggaacaagctctccggcgagatcccggccgacgtggggaaactctcacgtctaaccgtcctgaacctggccgacaacgccctaagcggcaaaattccagcgtccatcacccagctgggctcactcaaacacctggacctcagcaataatcagctctgcggcgagattccggaagacttcgggaatctgggcatgctgagccgcatgttgctgagccggaaccagctaaccggtaaaataccagtttctgtctccaagatttaccggcttgcggacttagacttatccgcaaaccggttatccggttctgtcccgttcgaactcgggacaatgccggttctatccacactgaatttggatagtaactctttagagggcttaattccttcgagtttgttgagtaatgggggtatgggcattttgaaccttagtcgaaacgggtttgaaggctccatacccgatgtgttcgggtcacactcgtatttcatggctttggatttgtctttcaataatttaaagggtcgggtaccctcttcgttggcttcggctaagtttatcgggcatttggatcttagccataaccatttgtgtggatccattcctctcggagcacccttcgatcacctcgaagcgtcgtcgtttactagcaatgattgcttgtgtgggaaccccttgaagacttgctagttatagtgggtgacccgggatccgaatacgtacccggatagatacccgatttgtttacaaggtgtggtgtaataattttattttattttgttgttaagtggtgtaagtgtaatataacgttttagtgagaaagttgaaagagagaaaggaaaagaagtgagggcataggcatctgcgtgcacgtgcacgacaagacaagggtttcaaggaaggaattcatgtttgtgtgggaggtcaagcttatttgaaaattattcctgtgctgcatgtgagcttccttgttttactagtataatgtaaaagaagatatatggataatgatttcattactgttcttcctttactaaaaaaaaaaaaaaaatgataaagatattacagaaaactaattataag

SEQ ID NO: 2571 - DNA, 2357 bp, Glycine max
  misc_feature (809)..(809): n is a, c, g, or t
attataaaaaaaagttaatataaaaatagaaacataacagttttccagtaaggcctttacatgcaacagactctgcctacgaatcaattagcttgcttacaaaagataaacagcaaattaattgaatcaagttaaggctgacagaagattatgtttgtcagcgtcatcaaacgtcaaaattttcaacatttaagacaacaaaactgattgagcagatacaactgatgctgctactgttagtgttaaaaagttaaataaataaataacagaaaatacatttacaaaatacaaagtatggccaaaaaatatttacacattcggcaataaactgtgttaatattagtcttctaccgtctggatctcacccatcatgatcctgttactcacgacattgaatcccaaaactgaagagctgaccttttttcctttcttgccgcctttcttctttccaacttttgagaaggatccatcagtgtaacctagctcctgtacatccgtatttgcagatatcatgcctccagcagctttctgatcattcccagtttgaaaagctatttccaaaacatctgatggtagcaagtccatgtaattgaggaatttatcaatgaattcacgatcagggtcatatgatcccaggttttctgtgagaaatatctctgcttcagatcttgtctgcttcaagcaaaactcaaggaaacttgtatcttttgtcccaatgagcctcgcacattcattctcacaccaaactctgaagtccatggcttctgaaatttaaatacggaagcaagtcactatttaaactatcatcnaatgacccaatcaaaaggagtagatatacataaaggggctaaattagacagaattgccaagcaagaggaaattggaattaacagtgttgaaataaaatgaatgaacaacatatcattaccagaattcttggtcattgcatcttttttcagttttagcagtgattgagaagaggcaggtgatgatgatagagattgctcagttggtttgccactcccagatttttgtcgactcaatgatccaggtgaattacctttcatgggaacacttttagaaccccagctcccctgcctagcaagttgagggaaatttgactgcttattttcttgcttggattgctcgactggaccccaaaacatatcatcatcccctctgtattttgacagagaagcttgggagtttatctggctagaaggtgcagtttttgatggagatgaagctgaaattgggcgtgaagaaccactactccgtgcagcttgggcagtttgtgatttttgaggagtaggcagttgatttgggagtactgcagaggacttcttctcctgctcctttagaatgtcccttaatgatgttggtttaggaatcctagcagaatcggtagtccatgctggaggaggagatgggcttgttgtctctcctttccaaagaacaaaatctcccaaagagggtcctgaaggaacggaaggcagtagttctttctcctgctgaacagaacgggagctttttaccttttcaatgtggcttgaacttatgggcacttcattagaagcaactggcattgaaaccttagctcccgaactcttcaacttcgcagattttttccggcttcttttagtgtctttagcttcaataaagtctccatcatctactggttctgagtgaacagctatattttgtggggggagcatactgtctggaaccttgtcatctctttcactagatttgggtacaagatcttctgccaatagatcatgtaatgggcttttcttgcttttactattttgagatttttcagctttagccagatattcagtattttctgcttctctgttactatcacttgacaccttcatagagtctggattggcgacaactccaacccagggagttgttgagctcatggaattgacaggagtagcaacctcagatacaagcttttctgtcagtgactttttttgttcttccagttgaatttctaagagagattttgccttgaaaccaggagcaggtttccaagctctcgctgaaggtaattcagtattctgtgtggcaacagaactgactgcctttaactcattttcgataactgttttagtgttgcttcctggaatattagtaggtaggccactaacttcttgattatcatctgtttctgcagtagcagttgcagattgtttatccttaccctttgtttgttgcataaatgtttcatgagctggttcacaccttgttggcttcactataatttggcttctcaggttctgatttctttgactgctgcaaagggacggggggggggcctcccctaacctgacccgaagactgagatt

SEQ ID NO: 2572 - DNA, 1369 bp, Glycine max
taagataaaagtctgataaaaatttttttttttttttttgaaaaaagaaaatcaatcttagcaccaacgtaaagattccacataacaatgtgagggcttcaagggtaacatttttttctcataacttggcaattattgctccttttattttgtttccgtaaactaacatctcttggttgctaatataacaaattattcaaccatatagcataattttggcaggatcagagcttagatcttgtaggtttctcatcaaaaacaatcatcaccttcccaataactttcctatctttgatggcagaaaaggcaaggttggcctctgacaaggggtaagaatgagaaatatggatggaaatcaagcctcttgccaaccaagacagtagctccttgagtgaatcttcgagaacacctgggcggtgtattttatagctaccccagtaaaggccatgcactgtccaattcttaacaagagctatgttagcagggattaaaggaatttctccactcgcaaacccaattatgagaatgtgagctccccatttcagaagccgcaaagattctttggtgagcttgcctccaactgggtcatacaggacatcaatccccttgagctttctagcctgaaggaactgtttgatactctgagtaacattttcattacccaagtccaccacatgatcaacaccaagagatttcaagagctgcaccttttcagcaccccgagcaacagcaatgacaatggccccacatgcttttccaatttgcacagcagcaagtcccacacctccagctgcacccaaaaccaacaacactctgaccggagctcaattgggccctatgaacaagtgctacatgagaagtgccagacgccacagcaagtgccccagcagcaacaagatcacaaccttggggcacttgaaacaactgggactcgtcaacgacgatgaactgagcgaaggagccgaggccggcgaaggagcaaacggcgtcgccgactcggaatttggaaactttggatccaacggcgtcgacgaagccagaaaaatccgaaccgggaatgaagggcaaagagggtttctcttggtacttgcccagtatctgcaagtagttggcgaagttcaagcttgtggctttgattctcactcttactgcagtgggagaatcgagttggggaattggatgattctttgacagaactattgggctatcatcgttgtcttccaaagataccgttggatcacccagttttctgcacaacagtgcctccattttttttttctctgttgttgctgtctttgatttaccagaggattatttcatgtaaaaaaaatttgttggtagatttcataatagaagtcaatctcgagcc

SEQ ID NO: 2573 - DNA, 1181 bp, Glycine max
cccccttactcacacacacacaccattatcccatcgcaactactactactataggtacttactactttgcctagctcctctttctctctcttcccttttgcactgaacttcactctctcttctatatcaagggttgatcacataacctcaatatatttctaataataattgatatagtttgagttattgtttcgagacacacagaaagagagagagagagagaatgggtagagggagagttgagttgaagaggatagagaacaaaatcaaccgccaagtaactttctcaaaaagaaggaacggtttgctcaagaaagcttatgaactctcagttctctgtgatgctgaggttgccctcatcattttctcaagccgtggaaagctctatgaatttggaagtgttgggactaccaatactattgagcgataccaacgtagctcttttactcctcaagacgaacacgttgaatgtgaaactcagagctggtaccaagaagtttcaaagctaaaggcaaagtatgagtctcttcaaaggacccagaggcatttgcttggggaagatcttggaccattgaacataaaggagctgcagaatattgagaaacagcttgaaggggctttagcacaagcaagacaaaggaagacacaaatcatgattgaacaaatggaagagcttcgcagaagggagcgccatcttggagacatgaataagcaacttagactcaagcttgaagcagagggatttaatcttaaagctacggaaagcttgttgagctttacttcagctgctggaaacagtggctttcactttcagcagcctcctcaaaccaatcctattgattaccagcagccagaaccctttttgcaaatagggtaccatcaatatgttcaatctgaggcatctaatgttccaaagagcatggcttgtgagactaacttcatgcagggatggatcctttgatcaatcttattaattgaattaagtatatgatgatttaccttattgtctatatcctttttagattttttgtgttttggctgttgttaaatgtacctttgtcaccagaaaagttgcaaacttgtttagctctttctgtaattggatacaagtactacagacaatggttttactatatgtttaagcaatgctattgtttttaactttgatgctttgaacctat

SEQ ID NO: 2574 - DNA, 1391 bp, Glycine max
tcgcggccgcccgctttttttttttttttttttttttttttttgtgtagatatgcactttgccagtttgcctctcattattgtagtgcactagcacaggctatttatagttcaatacatagcagaattgaatactaagcgagaaagagaaagaagcagcaaccgatacataatcactatggtagtagcatttaatccgtaaatttgaacatttcttcaatacggcacttagctctacacttactatttacataacgaacttcaggaatgacagtttctttaaaattcaacgtgcagcaacttggcctttattgcaagggaaaaccagaaaaacccttttgccttggctgaagaggcagtcagatatttagatgaaatgatttaagcctcgtcattttcctcatcgtcaacttcatcaattccaacccaacgtgtaaaagcaaatagaaactccttgaagttaaccattccatttttatcccaatccatttcttcaaatcttttcatggctattcttccagaagaacgctcccctgatgtagtttcgtttatagcttggaccatctcatttttgctgacatatccatccttgttcttgtctaagaatacaaatgtatcaaccaaagtctcaaatgtgccctccagctttggcatcccaattcgtgatttagcatgaagagctgcagggtcattcttgagaaggtagacaacacaaagaagtacaataaactcattgaacttcattcccatatcctcgttaatatcacatgcttcaaaaagatcatttatttcctcctcggaaaaagaaatttccagcttactgaaacactttttcaactcctcttgatctattgccccattagaatcctcatcaaactgctcaaatatggctttgcattttctaaggctctcatcaatctttgggaatttcaagattatagtgttgaatgatttcacggaacttccttgagattccctccgctgcattgcttcaaccattttagcctcgagcttagtttctggcatcgatccctttctaggtgattcactctttcccagtgcacctcccattgcctatcaataaaccaaaaatggtgcctctatgaccaaggagaagaaggagcaggagtttgttcccaagctccttgggttgaaatttgaaacagaacaggatcaggagaagaagcagtggaggagatccaacaactcaaactggtgaacaacctgaaatgaaaaaagaacaaaaaagaaagaaaaaagtggtttctgggtggaagaaagatgcatgaacattgacacagatgaataccaaacttggggggggggggcctacgtagcggagtttgttaactgagtctgggccttgtgtcacagcctacgtttgtgctgctc

SEQ ID NO: 2575 - DNA, 2490 bp, Glycine max
gaagctaaaaatcacctcatatagatcatgaattgttacagatggtgatacaaattacaatgcaataatataccttggaattttattttcagcatcggctctcctttgtttggaaatggaattgttcaattccaatttcattagagaaatttggaaatacattttagatgcgctacgcattttagtaccacagaccaatgggaaacacacctcccggcaaccaaagatcaaacacccaccattgactagattggatttaacaaaaactacccacaagttagatctactaagtgtgtgtttggttatccgttcaaccatcccaaccgtctgttcatttcaaagttctctctcacatacttctccgttcaatggtctcggagtgcatgctgccaacaaaccagacacacactaatacgcaggataccataataaaaaggataaaacttagagatgcactttctaaagtgtttttggtattgttttctaattaaaattgaagtttaatctcggtaatctgcataataaagatttgtattgaatatcaacacaagttaccgaggtgaaacttcaattttgattagaatataatatcaaaaacatcttatgaactgcatggcatctaagttttgtcctaaaaataaaatcctacagtactccgaaattagcaatgtattacaacaactttgcaggataatttcaccagtccaacagctaccacctaatgctgatagtgatacacaaatatttaaaaaattcattgtttaaatggaagataccctaggaacatcgactggaaactggtcaatctcatcaatccaaggactcttctccttagaagggttgatggtcctgagagccttccacactgcactgttacacttgaatccagaaccgaatgcaatttgccatgttctgtctccctttttgatcctccctttggcctcagtgtaagccagctcataccaaagtgaactgctggaggtgtttccgaatcgatagagtgtcattcttgaaggctccatatgccaaggagatagctgcaagtttttctccagttcatccaaaacagctctaccaccagcatggatgcaaaagtgttcaaaagctagcttgaaatctggaatataaggtttgatcttcatcttgaaaattttcttccctactaatgtggcaaagaatagcagctgttcagatgttggaagtacaagaggccccagtgtagtgatattggtttttaaagcatcaccagcaaccgccatcaaatcttttgacaaagtaacaccaaccttgccattagcatcttcttcttgggttacacagctaaagcacttttcatcagcacccttatgagtgcgaaccgtggtgaccaatcggtatttggatcttcttctatccgagcttttattggagagcagaactgcagctcctccctggcggagcccccacttccgcgcacgcgttgaccgatcgtttccaaaataccaattcaacgtgatattctccatgctaatgaccaatgcataggagttgggattggcttggagaagatctttagcaagatcaattgagataagcccggcactgcaacccatcccaccaagattgtagctctttatatttccccgaagcttgtaatgattgacaatcattgccgaaagtgatggagtagggttgaacagactacaatttacaatcagaattccaatgtatttaggctttacagcggttttagctaaaagctcatcaatggcaccaaacatcacggtctcggcttcttttctagcttctttcattgaagggttgggaggaatgttgaggacggcctcaggaaggtaagtgttctccccaaggccagatctctcaagaatcttccgctggaattcaagattttcctccgtgaaagaactggtcaaccgggactgctctataaatatttttttcgtgcacttccgagattcttcaggcttgtaacaggagaaattgacaaggtacacaggtcgaggacgagttagaaagtagagggtggacaggaaaacaaggagagttaagcaaagaataacagatatcaagttgtattgtagatgctcccaaagatcatacaagtctcggagggagaaggtagaaagctgggctgcaatcagcaccacaaggggggaaaggcagaggtacattccatgggtgatgaggtaatgataaccaagcttgacatacttcaacttaacagacttcttgaaatcaggaaggtttcgcgagtgaagatgccatcaagggtttatctggctttgcatctgtcattttttgccctgttcagcagggccagctgctcccggcggacgcctggctgtctagctttaaccaaaaggcttttttcagcatagaacatcgtacaatggcaacaaattggcaccacaagatcctttttagtaagaatttctactaatatacagggaataatcgcgaatataaagcttgctttctttaatatcaaga

SEQ ID NO: 2576 - DNA, 678 bp, Glycine max
ttttttttttttttttaattatgaaaaaagaaatacttgattgaaaggatattactagtacttggatacaattttcatgatcctatagatagaaaaatgaaggaccaaattctgaaaagagagagataagaaggattcaaagacgagtagctagctacagagtgaggttgagatccagagagtgagagtgttggtcgtcgtgcttacgttgtttgttgtctgtgccaccggcaagcggcgaaggagatgtagatgaagttgggaattgcatatattgttgtcctctgaattgaacctggtctgtgaaatcctcccattcgaatgatggcacccaaacacggtgttgctctgttcccgccttcatcctcttctccttctcactcttgtctaattcctgaagctcctttcgtcgtcgatcgcgcgcgtctcggtacctccgcaacagcgcgtaaaacttgtccatcttcatctcttcgtcttccacctcatagtcttttccctttctcttcttattttccatgattaatgaatctgcataataatatatatagtaatagccaaccgtgatgagttaaccaaaagaaagaaagagctgcatatataggaaatgaaagaagaatagataacagtgtctatcacgggatcgacgtagggcaaagtttaagtgttcattcccgc

SEQ ID NO: 2577 - DNA, 1729 bp, Glycine max
tttttttttttttttttttttttttttttttttttttttttttttttttttttttttttttttttttttttttttttttttttttattaggcaaattcttccacaaattcagtcataaataaatatgcaaacaagttttcattacatccgaattagcctactcataattctgcagaatgcagcatctacctaatcagccgataaatatatcagatactctaactagctgcaacttacaacactgaaactaaatcctatggtaataaacatcagacacgtttgaaacaatctttagataagagagagaacactgtaaacattaataaaacagctgagtcatgaatgttgtcagcaagagttcttgaggatcgagagtgagcgtcgaacatcaacttaactatcaggcaaagatatgttaatatcagtggctgactttcttgagtctggcatagagtgcatgttgacccagttgtctcttctaaaggcattgggaggagtgaggttagagttaagggttccagaattttgcagtacatgtgctccacccataacattcacatcctctttttcggcattggttggaggtggtggtgtaggagacactgcaatggttggagtaacagttgctactccataatcgctagactttgacttctttattttctgttcttgctggctgcttggtaaaaagcttcccaccaccacctgcacagggctggcagctacaagaagaccagcaactccgccacctacaacacggccatcagggctagccaacgagaccgacattccaccagtcctgcttcttgttccttggttatcagtaggcatgaatgatccagacaaggaaagtatctcaaaacggccctcataagttaaagtacccccagaagaatcaggctgacgaagtgtaacatttgaaatcacaccattagcagataagatacatatagctcgtggtccttgttgagaaaaggatatcaccttcatcgtgatgtcctcgccagcattgacagtgatgatatgcggcataaaatttgtaccatcagagcatgcattcaagtcacctagataatccaaaccaactttttttgatggcttatagtccatcccccgcattttcccccgcttcccggaggaaaagtcattagaaggcggagccgacgacgaaattggcattggtgacaatgccatagtgactgacccatcaggcccatatttcctcggcctaccccgtttcttcttaactgccgcgccatccaaccccgcactcacaggtgagacaccaacaggtgcagctgtagcagcagcaccaccaccatcagggacatgaacctggtttggagcttcactccttggcgccacatggtaagctgatggagcttctgcacctatcactgtaaccccagaactaataccttctctggcttccatacaaatattgaatttccactccaaggcctatattaccaaaccaacacctgtcactgtgattccacacttgagcaagcttcttccaaagctgaaaacttgtattcagatttctttttcagctcaacaagatactcattaactcaactgaactcaccccagaaaatgaaaacacaaaaacaaaatgaaagaaagaaaaaacacaaagaagaagaagaagaagaagaagaagaagaagaaaacaccggacgcgtgcggcgaggcgctattcccggccccttacaaatttcaggaggtg

SEQ ID NO: 2578 - DNA, 1871 bp, Glycine max
aatttattttctcgtacgttctgtgccttgaagagcactgattttgtccaccaaaagtcctaaagttgcgccaataattcatgttcttgtctttgcatattctcctaagtaggcacatcgccccattccacttaccgacaccatctctacgacaacctcctttctctctatctctagctcggatgagtgctctctctaactccagtagtagccacggcaattccttcctcaagatgcccgccatcaagtttaccaagctcttcatcaatggagattttgttgattccatatcaggaaggacatttgagactatagaccccagaaaagaagaggtaattgcaagagttagtgagggagataaagaagacattgatattgctgttaaagcagcacgtcaggcatttgactcgggtccatggcctcgcttgccaggctctgaaagggcaaaaattatgatgaaatgggcagacctagttgatgaaaatatagaagaactagcagcattagataccattgatgctggaaagctatactatattaataaggtagcggaaattccttcagctacaaatgcgttacggtactatgcaggtgctgctgataaaattcacggtgacgtattaaaaatgaacggggatttccatgcttatacacttttggaaccaattggtgttgtgggacacataattccatggaatgcccccagcctctcatttttcatcaaggttagcccttccttagctgcaggctgtactatggtcctcaaacctgctgaacaaacacccctctctgctttgttttatgctcatctagctaagttggctggaatcccagatggtgtgcttaatatagtacctggatttggcccaactgctggcgcagcaataagctcacacatggacatagatgcggtcagttttactggttcaattgaagtagggcgtgaagtgttgcaggctgcagcttggagcaatttaaaaccggtttcacttgaattaggaggcaagtctcctctcattattttcaatgatgcggatatagacaaagcttccgagcttgctctctttggcatcatgtctaacaagggagaaatttgtgtggcaggttctcgtgtgtttgtccaggaagagatctatgatgaatttgagaagaagttggtggagaaggcaaaatcttgggtcgttggggatccttttgatcccaaatccctgcaagggcctcaggctgacaggaaccaattggagaaaatactttcatatattgagcacggaaagagagaaggagccacccttttgacaggaggtaatacagtgggcaacaaaggttactacatagaacctacaattttctccaatgtaaaggaggacatgctaatagcacgggatgaaatatttggccctgtactagcgctgatgaagtttaagaccatggaggaagcaattaaaagtgctaacaataccaagtatggcctagcagcaggaattgtaaccaagaatttggatactgcaaacactatgtcaaggtccattcgtgcaggcattgtttggatcaactgctattttaccgtagggagtgatgttccttttggagggtataagatgagcggatttggaagagatttgggattacaggcccttcacaagtacttacaagttaaatctgttgtaacacctattcataattctccttggctttgaatagttgaatgtctcctacgtgagcacaaatgtgagtcttttcatttggaataaattacactttaattccttataatgtgtgaattgtctcttgtattattatgattactttgttttattaccacgttgttaacttaaatataatttttagagtgaaacaacaaattatagcta

SEQ ID NO: 2579 - DNA, 1803 bp, Glycine max
atattgcaacattcagcgtaccgccagcgtctctacgacaatctcctttctctctaactcataactcagatgagttccctctctaataactctagtagtagccacggcaattccttcctccagatgccccccatcaagtttaccaagctcttcatcaatggagatttcgttgattccttatctggaaggacatttgagactatagaccccagaacagaagaggtaattgcaagagttagtgagggagacaaagaagatattgatattgctgttaaagcagcacgtcaggcatttgactcaggtccatggcctcgcttgcccgcctctgaaagggcaaaaattatgatgaaatgggcagacctaattgatgaaaacatagaagaactagcagcattagataccgtggatgctggcaagctgaactatattaataaggttgtggaaattccttcagctacaaatgcgttacgatactatgcaggtgcggctgataaaattcatggtgaagtattaaaaatgaatggggattttcatgcatatacacttttggaaccaattggtgttgtgggacacataattccatggaatgcccccagcctctcgtttttcatcaaggttagcccttccttagctgcaggctgcaccatggtcctcaaacctgctgaacaaacacccctctctgccttgttttatgctcatctagctaagttggctggaatcccagatggtgtgcttaatatagtacctggatttggcccaaccgctggtgcagcaataagctcacacatggacatagatgtggtcagttttactggttcaattgaagtagggcgtgaagtgatgcaggctgcagctaggagcaatttaaaaccagtttcacttgaattaggaggcaagtctcctctcattattttcaatgacgcggatatagacaaagctgcccagcttgctctctttggcatcatgtctaacaagggagaaatttgtgtggcaagttctcgggtgtttgtccaggaagagatctatgatgaatttgagaagaagttggtggagaaggcaaaatcttgggtcgttggggatccttttgatcccaaatccctgcaagggcctcaggctgacaggaaccaattggagaaaatactctcctatattgaacacggaaagagagaaggagctacccttttgaccggaggtaatacagtgggcaacaaaggttactacatagaacctacaattttctgtaatgtaaaggaggacatgcttatagcacgagatgaaatatttggccctgtactagcgctgatgaaatttaagaccatggaggaagcaattaaaagtgctaacaacaccaagtatggcctagcagcaggaattgtgaccaagaatttggatactgcaaacactatgtcaaggtccattcgtgcaggcattgtttggatcaactgctatttaaccgtagggagtgacgttccttttggagggtataagatgagtggatttggaagagatttgggattgcaggcccttcataagtacttacaagttaaatctgttgtaacacctattcacaattctccttggctttgaataattgaatgtctcctacatgagcacatatgcgtgtcttctctcatttgaaataaattacactttatttccttatgatgtatgacttaaaaatacttagtctcttgtattatgagttctttgttttattacaacgttgttaacttagtatagtttttagagagaaacaacaaattataactattacattttttcttcccattgacgtgaaaatgt

SEQ ID NO: 2580 - DNA, 1164 bp, Glycine max
  misc_feature (1158)..(1159): n is a, c, g, or t
cgttatccagcaaatgatagcaggtaatcttcatcgagacaaaagcatgacaaatgacaattctagatatagaaatagttttgtgacagataaatttgaaacagtatttttttaaatacatatttgtataaaaatggcaaagttattatccctaactacaatcatacacgaagcaataaataccaattaagatagaccactgaattagatggattaaaacctccatgttgaagatgtgattcctgcctttctcataagttcaagaaaccactgtctatttcttggcataagttatcaacatggggttttgtggggttatcttgaaaccttgcagcgtctgcatagccactgtggattgcatttcatctccatattccacaaaggcaatccctggctttgtttcaaccattctaacttccttaaatccaggatattgaagaaagagcatttgcagcatcatgggagttgagtcattgggaagattctgaataaagagaatattatttggtggtgcaggagcctcaggtaccatagattttgcaccgcctggataagctatagcaggtgctgcaccataagcaccagcataagctggattcaggcccattccagctaaattagcatcatgttggtccttccgctttttggctttgtcatcatgcctctttcgtttttccctaggaacgaaagtaccatctgcttttgctattatatcagatttggtctttgcatactgtattctcatgggcttatcatagaaggggaaaccttgcatttgccttagggcgttggaagcagaagaggcatcttcaaagaccacccaagcttgacctttgtgctttagggttttgaaagctaacacctcaagtatcttcccgaactgagtgaaaacagcgttcagagacttcttcaactcatcaatcttaattttctcgttgaggttgttgatgtagatggtgttgctttgaggaatttcaggggtcgcattcacttcagacattttgcggtctcaaaatgtaaagttttgctccacgacgggtctaaagtaaaaccctggggggggggcctacgtagctgacccgatccttctgtcggcttctcgcagccgtacccttctgtcgttttttcagcaacccgtacggacggcgtgggtcgacnnccggg

SEQ ID NO: 2581 - DNA, 1068 bp, Glycine max
taaaaaaacacggaacacatcacaattaaatgatcttacatcaaattaggctcattcaatcatcatcagaggcagaaaattaagaatacacagtaaaatacaggagcagattgcaattatgcatgcgatgtctgtccctacacgtgatccctgccatcatcctcattgataccatctccagcgtgtcgccaagaagatgttagattccgagcttttctgtccaattgaagattttccaaagcacttgaagcttgaattatgtcctcaggaagttcatccctgtcatatcgccaattgtaatcatccttcctataagcagacatggaggatcctcctcttctatcagatgcctgagatgaaggaacggcccttccaagtggaggtaagccaccagcaacagatgaggaagaatgccttcggggattccgtgattcggagttgggtaaaggatcagcttctgaggtggtaaatctcctaccgcttgctcttgcttgggataaattctcgagcttcaagaatccttcaagcacatccaagagtagaggactatctctgtttctgttgagatcatatccatttttggtactaaactccttaagctctgtcttccaaaaatctttctccaaattacattccggaagataaacttttagcgtatgactgagctgcgcccagtcaaggtattcacatatcatcgccgaaagaagtctccctggaggagaagcgtgaagctgtttagctcgatcgttgcagctaccaagcaatgcaggaggtagggcttgttccttctcaatcacatgatcttcctcttcgatggcctcgaacacactcgctctgagttcggcacggatcctggcaaggacgcctttcttctcgagagtgcgagtgaccagtgtcttcaggtccatcatttccctcgtgtagtcgtccatttctctctcgaacaattaacacaccaaactacttcttctctttttcttcttcttcttcttcttcttccctcttctgtgttgtgaatgtgcgcgattgcaaatattcatcgatcggggggggggcctacgtagctga

SEQ ID NO: 2582 - DNA, 2952 bp, Glycine max
caggctttttctttttcttcttcttcttcttctttattttctcattttgccaaactaaaatagttgtgttggtagctttggcaaagatgttttcagcaggccataagatcaaagggacagtggtgttgatgcccaagaatgagttggaagttaaccctgatggctcagcagttgacaaccttaatgctttcttgggccgtagtgtctcccttcagctcattagtgctaccaaggctgatgcacatggaaaaggaaaagttggaaaggatacgttcttggaagggattaatacttcgttaccaactttgggagcaggagagtctgcattcaatattcattttgaatgggacggaagcatgggaatccccggtgcgttttacataaagaactacatgcaagttgagttcttcctcaagagtttgactcttgaagccatttcaaaccaaggaaccatccgctttgtttgcaactcatgggtttataacactaaactttacaaaagcgtgcgcattttctttgccaaccatacatatgtacctagtgagacaccagcaccacttgtggagtacagagaagaagaattgaagagtttaagaggaaatggaacgggagagcgcaaggaatatgataggatctatgattatgatgtctacaatgatttgggcaacccagataagagtgaaaagttagctcgtccagttcttggagggtctagcacctttccctaccctcgtaggggaagaactggtcgaggtccaacagttacagacccgaatactgagaaacaaggcgaagtattttatgttccaagagatgaaaatttaggtcacttgaagtctaaggatgctcttgagattggaacaaaatctttatctcaaattgtccagccggcgttcgaatctgcgttcgatttgaaatccacgccaattgagtttcatagcttccaagatgtgcatgacttgtatgaaggtggaattaagcttcctagagatgtaattagcacaattatccccttaccagtgatcaaagaactctatcgtaccgatggtcaacacatcctcaagtttccacaacctcacgtcgttcaagtgagtcagtctgcatggatgactgatgaagaatttgctagagagatgattgctggtgtaaatccctgcgtaattcgtggtcttgaagagttccctccaaaaagtaatctggatcctgcaatctatggtgatcaaagcagtaagataacagcagattcccttgatctagatgggtacacaatggacgaggcacttggtagtcgaaggttatttatgttagattaccatgatatcttcatgccatatgtgaggcagataaatcagctgaattctgccaagacttatgcgacaaggactatcctttttttgagagaagatggaactttaaagccagtggccatcgaattaagtttgccacattctgctggggatctgtcagctgccgtcagtcaagtcgtcttacctgctaaggaaggtgttgagagcacaatttggctactagccaaagcttatgtcatcgtaaatgactcttgctaccatcaactcatgagccattggttaaatactcatgcggcgatggagccattcgtcatagcaacacaccgacatcttagcgtgcttcacccaatttacaagcttctgactcctcactatcgtaacaacatgaacatcaacgcacttgccaggcaatctctaattaatgctaatggcataatagagacaacctttttgccctcaaagtattctgtggagatgtcttcggcggtttataagaattgggttttcactgatcaagcactacctgcagatcttatcaagagaggagtggcaattaaggatccatcaaccccacatggagttcgtcttctgatagaggactatccttatgccgctgatggactggagatatgggctgcaattaagacatgggttcaagaatatgtgcccttgtactatgcaagagatgatgatgtcaaaaatgattctgaactccaacattggtggaaagaagctgtagagaaaggccatggtgatttgaaagacaagccatggtggcctaagttgcagacacttgaagaccttgttgaagtttgcctcattatcatatggattgcttcagctctccatgcagccgttaattttggtcagtatccttatggaggtttgataatgaaccgcccaactgcttctagaaggttgcttcctgagaaaggcaccccagaatatgaagaaatgattaataaccatgaaaaggcttatttgagaacaattacatcaaagttgccgactctcattagcctttcagtgatagagatcttgtcgacacatgcttctgatgaggtctaccttggccagagggacaacccacattggacctctgattcaaaagcattacaagcctttcaaaagtttggaaacaagctcaaggaaattgaggaaaaacttgtgaggaggaacaatgatccgagtctgcagggcaatcgacttggcccggttcaactgccatacactttgctttatcctagcagtgaggaagggttaacttttaggggaattccaaatagcatctctatctaagggagcctgtggtttactctaattactctatatatagtgcatgtgtaccttccaataaaaaagatgcaagactagagatccgataaatcttgcatcttatctaatgtttcaattatcttgtgttttaattaatgttgtaattgagctcacagtttggttgtggtttgcaaataataagagcagtgagcactattagtttgtgtttagctcctgtcatcatgtttggtattatacattttgcagattacgtaacacaaatttatgttattagtaaaaaaactgtattgtacgaatattttgtattataagtatataagaaataaaaattattagtattagtaaaaaa

SEQ ID NO: 2583 - DNA, 874 bp, Glycine max
aaaaccctaaacctaaacccccaagcgctgcattggtcatccattgttggaacattctctgattaccaaacaatgagacccccgagaggcggtggacgcggcggcggattcagaggtggccgcgacggtggtggtcgcggcagaggtggttttggtcgcggcggaggtggttttggtcgcggcggcggcggatatcgtgacgaaggaccaccctccgaagtcgtagaggtgtcatcttttatgcatgcatgcgagggagatgcagtgacaaagcttacaaatgagaaagttccctttttcaatgctcctatttatctgaaaaacatgactcagattgggaaagttgatgaaatatttggccccatcaatgaagcttacttctcaattaagatgatggaagggattgttgctacttcttattcatccggcgacaagttttatattgatccaaggaaactgttgcctcttgcaagatttcttccacaacccaagggacaatcagctggtagaggtggtggtggaggtggtcgtggtggatttagaggtggccgtggaggtggtggttttcgtggaaggggggctccaaggggtgggagaggtggtcctcccaggggtggtggacgaggtggtggtttcaggggaagggggagatcatagaacaattttatgtaatgtttttcacattgctgcagtttttctcctttggagataacatagatgttgaattgactttttatttcttatgcatcgagttcatgttggttgattatgttgttatcattatggggaagtcgattgatttgtgtagtctctatagaaattgtgcttgattctatccctctcaaatcgaaatggaaagtggaaactggaaaaa

SEQ ID NO: 2584 - DNA, 694 bp, Glycine max
gagagagttgtgggcaactggttggttgcatgatcggatacgcgttgtggtctcaagtttcttcgtgaaggtgctgcagcttccttggagatggggaatgaagtatttctgggacacccttttggatgcagatcttgagagtgatgctcttggttggcagtacatatctggcactctccctgatggtcgcgaatttgaccgaatagataatccacagtttgaggggtacaaatgtgacccaaatggagaatatgtgcgacgatggcttcctgaacttgctagattaccaactgaatggatacaccatccatggaatgcaccggagtctgtactccaagctgctggaattgaacttggttcaaattatcctcttcccattgtgggaatagatgcagcagaagtaagacttcaagaagcacttattcaaatgtggcaacaagaagcagcttcaagagctgcaatggaaaatggaaccgaggaagggcttggagactcagctgaatcagcccctattgcctttcctcaagacatacaaatggaggaaaggcctgaacctgttaggaacaacctgcctcatggtactcggcgctaccaggatcagatggtcccaagtatcacatcttcccatgtgagaagtgaagaggaaaaaaacatcttagacctttcaaacttggctggagacagcaggggccaa

SEQ ID NO: 2585 - DNA, 1827 bp, Glycine max
gtttctttgtgaaggttctgcagcttccatggagatggggaatgaaatatttctgggacacccttttggatgcagagcttgagagtgatgctcttgggtggcagtacatatctggtagtctccctgatggcgtgaaattgaccgaataggctcgcctgcagtttgagggatacaaattcgaccctaatggagaatatgtgcgacgctggcttccagaacttgcaagattaccaacagagtggatacatcatccttggaatgcaccagagtcagtgctacaagctgctggaattgagttaggatcgaactatcctcttccaattgtgggaatagatgcagcaaaaaccagattactagaagcgctatcagaaatgtggcaacaagaggcagcttcaagagctgcaatggagaatggaactgaggaaggacttggagactcttctgaatccgttcctgctgcttttcctcaagacatgcaaatggaggaaactcatgagcctgttaggaacaatccccttcctgttgctcggcgctaccaggatcagatggttccaagcatcacttcttccttgttgagagtggaagaggaagaaacttcttctgatcttcgacactcggcagaagagagcagcagagctgaagtgccagtaactgcaaatgcacaacaaaatgtaggagttacattgaatgaacggatgctgcagaccactaataggaatgcacaaacacaatacaatactacaatggagctgagaaatgtagctgaagattcagcagtagaatcttcaagtggtaccaggagagaaagggatggaggtgtagttccagtatggtctcccccagcttctagttactcagaacaatttgtaggagaggaaaatggtataacaaacagttcatctttcttgcaaaggcatcctcagtctcaccaaatgctgaattggaggcagctacctcagactgggtaattcatatctaaagcaattagactagaagcaaggaggtggaaattacactaccacttttctgttgagagaaagtgaggtgttgaagccgcattgaacatacatgtgttaatttccttctcctttaccaccacctgacctccaatgtgtatggaaatttcaattcatacggcagttcatctgcagtcccttctgctttcttgtacaatatttgcaacttgctgtatagtatagtttgtgtagtgagggagaaagagccaccataggatctttggtctactaataaactcagatttaaaatgttacatctaaaaaatactatttatttttatcaaagtatatttatataattttatttatattcaaatccttccctttcactttctatataaccaaacaaaaggaagtaaaaatataactctctttcttactaaacaacctaaataatcatttcagtttctattctttttctttcctgcttcattctttcttcactttctttttacttcccttcctaaagcataccaagcaagataatgactgattaagctcgattaaataacattaagcctttcggagcaataagttaaatacacaccagtagcatatttataagataaatgtttgtttttatataattaaaatttataataattttaacatattttatattttgaaattttaatgaatgatttaaattataatataatgtttttaagagaaattataatctaatgttacttttaactattaagaatttcttttaaaaaactactacaagagataaaggattaaaaaaaatcaaccatacagaataaaaaaaaagagtagtttaaaatgtttgacagggaatttttttttt

SEQ ID NO: 2586 - DNA, 1084 bp, Glycine max
ttgtgcaagcaaaaagacatttataaccaagtcctgtcaaactcacaaatttcaactccggttaacttcattgcttgttttttacgtataagaagattgcattttcttttgaaaacctagatcaacaaaaaaaaatattttctagaaaaatcgctacaataaatacatccagagaagcttcactgattcaccctgcctatgggaaccaaggacacagaaaatataatgtgatttttggctcctgatgtgaaagtatcaatacatgaattacgagccaccaaatacagcatccaatatatcatcagagagctcaggtttattttttttggtgtcagcagctataggctttgtttgagggaaatggcgaatcactttttccactagtcctgagtcttgttgaatcttctgcttcttctttagtcggccctctatagcactcaaagcacgtgattgatcaactttggaaagatagaaatccctctctctcttggcagcagaaagttctacagccagcttttgctcccgaatagctttctttaaggctagttcttcagtcagatcatcccacttgaacttacttaagtacttaatattccaaagatcatagtagaatgatgacctcttcttaccccctatttgttcaccatttaacatattggcaaccctcttagcaacacttttattaccgaattcaacccatccttctgaatatgcttggtctcgggatccacgtgacctcttggcagacacttggacagaagaatcttgaggagcgagaaaaattcgttgaatatcgccgaactgagagagaatgtggcgaagcttgacgtggtccatgtgaggggggattcgactcatatagcacacgccgcgcttcttctctgcatccttcgacgaagctttcttcttctttttcttctctttcttcttcaatttcgcattctcttcatcgggtgcagtttctgttgcttcaatttctgcgtcttctttctctgagtctgaagcattcatcgtttctttacagcttcttcttcgtgtgaaagctgaaaaagggagtgcgggcctccgctcctcgagccgattc

SEQ ID NO: 2587 - DNA, 1182 bp, Glycine max
gggcccccccccaagttttttttttttttttttttttttttttttttttttttttttttttttttttttttttttttttttttttttttttttttataaccaagtcctgcccaactcaaatttcaactccggttaacttcattgcctgttttttacgtatacccagattacattttcttttggaaaccttgatcaacaaaaatatattttctagaaaatcgttacaaattaataaatacatccaaaaaagtttcactaattcccctgcctacgggaaccaaggacacaaaaatataatgtaatttttagctcctgatgttgaaggtattatcaatacatgacttgcgagccaccaaatacagcatccaatatatcatcagagagctcaggtttattttttttggcatcagcaactataggctttgtttgagggaaatggcgaatcactttttccactggtcctgagtctttttggatcttctgcttcttctttagtcgctcctctatagcactcaaagcacgtgattgatcaactttggaaagatagaaatccctctctctcttggcagcagaaagttctacagccagcttttgctcccgaatagctttctttaaggctagttcttcagtcagatcatcccacttgaacttacttaagtacttaatattccaaaggtcatagtagaatgatgacctcttcttaccccctatttgttcaccatttaacatattggcaaccctcttagcaacacttttattaccgaattcgacccatccttctgaatatgcttggtctcgggatccacgtgacctcttagcaggcacttggacagaagaatcttgaggagcgagaaaaattctttgaatatcgccgaactgagagagaatgtggcgaagcttgacgtggtccatatgaggggggattcgactcatataacacacgccgcccttcttctctgcatctttcaacgaaactttcttcttctttttcttctctttcttcatcaatttcgagttttcttcattgggtgtaattgctattacttcaatttctgtgtcttctttctctgagtctgaagcattcatcaagctgaacaaatgagatctgaacagggcagataatttttgaaattgaaggtcgattggaaactgaggatctaacgaaggtcgaagaataaggat

SEQ ID NO: 2588 - DNA, 1501 bp, Glycine max
tgcaggttttgaaggatcatccataaccttggcaagggatcgatactgcaactttacactctctgcattgtccaatgtcttcaccacataccatccattcaggcattgcgttgtaacaatagcttcgcgcccaacaaagcgttgtggtgtccttttatttccctttatgataacccggtccatcacagcaaatggaaactgaacacctctactccttgatggttccataacaactgaatctccaaaaccaccctgatcaaatctctctcttcttcttttaggtgaccggtaaaattgtgactcctcttcacgacgatatgcctgcacagcaatccggagtgataggttgggagatattgattcctcagtcgtgggttgagaacaagtgcagcaagctttcagctccatatttaataacatttttcagatgacttagtcacagaaaaggtcagctgaaaattatggcatttgatggcttagaacccaccattctaatagcatgctctattccacctccaccaaatgaatgtccacatggtaatatcatagcatcatccataagagcacccgtgacaggatctgaaagaattgccctgagtgacttcccctgactcgctcgaatacatagcatccttcctcccactaaacccacaaccactatcatccgccatcgctttctgcccagaagccccttcgccgccgtgaagatagtgcgaatagtactcctcacagtcagtttcagcaacggtaactgaattctgagacttacctaacccctcttgccgatgatcttcatcaccaccactcacattgctatgcaccaattggccaatatcaccaccatccttcaccaatagctctcttccagaaacgtaagagtgggctttcccgtttgcaacagcaggtaaattagcgccaccgttgttgttgttgttgttgttaagttcgcttttggttccatcaccaacgagtcctcctacttcggtgtcatccgcttcatcgtcgtcgtcatcttcgtcgtcgtcgtcagactcttcgtcatcgtctgtggcgctccaattgcgggcgtggggcgggtcgcggcgggcggagcagtcggcgtagcggcggaattcggggttctgggcggcggcgaagaagcggtcgcggtcgatgaacatcttgttgtcgtcgatgaaggcgccaagttcgcgggtcttcggaggcgggtccccgacccgacgctggtgcggggtggggcaattgaagcggagagggtcgtcttggaagacgagaggggaattgagaccgttctcgatcctctggtcgggtacgagagtgatgtcttcggaggacatgggaggaatagggaactagggtttcgagactctgtttgctgcgaacgccgccgtttggtgttcacactcgccgcgagcgagaaagagtgctttctttctttctttctttctttctttctcccagatgctgctgggagatggattgtacgacgagtcgtttttgg

SEQ ID NO: 2589 - DNA, 1677 bp, Glycine max
tataatagcagtttaagaaattgaattggtccggctccgccgagtaattaatgtgaaaggaatgaatgatttttgtattgcaaaataaattagtgtacttcacatgacggattttcacgagcaacaataagcatagagagaaatttggcattgcagtgcatcatcgcattgattgagttggaagatgggtagcaaaggcaaacgcaaagagcaagaatcaataataacgagggttatggctcacggaggtagatacgtgcaatacaacgtgtacggaaacttgttcgaggtctcctccaagtatgtccctcccattcgccctgtcggtagaggcgcatacggcatcgtttgtgctgctgttaattgcgatacgcacgaggaagttgccataaagaagattggtaacgcctttgacaacatcattgacgctaaacgaactttgagggaaatcaagctccttcgccacatggaccatgaaaatataattgccattagggatatcatacgacctcccagaaaggatgccttcaatgatgtttacattgtttatgaattgatggacactgatcttcatcagattattcgttctgaccaacctcttaacgatgaccactgtcagtactttttatatcagctgttacgggggctgaaatatgtgcattctgctaatatcttgcaccgtgatcttaagcccagtaatttgcttctcaattcaaactgtgaccttaaaattgcggactttggtctggcaaggacaacatctgaaacggatttcatgacggagtatgttgtcacacgatggtaccgagccccagaattgcttcttaattgttcagagtacacctccgcgattgatgtttggtctgttggttgcatatttggtgaaattatgaccagagaacccttgtttcctggaaaagattatgttcatcaactgaggcttataacagagttattaggttcacctgatgatgccagccttggatttctccgaagtggaaatgccaaaagatatgttcgacagcttccacaatataggaagcaaaatttctccgctagattcccaaatatgtctcctgaggcattggatctactagaaaagatgcttatctttgatcccaacaaacgcattacagttgatgaagcactatgtcatccatatctttcatcacttcatgacatcaatgatgaaccggttggtcctgggcaattcaattttgattttgagcagccaacatgcactgaagagcacatcaaggagctcatctggagggaatcggtgaagtacaatccagatccacccagtcagtaattctttcttgaatgatgattcccttattactcttgggtgtagacatccagagagagataagtgattgatatgattagtaatgtattgtgacaaaaagagagatattgagaaatgagaggtgtgtaagggtggtgagagaatccttattcttctttcttattagtataaatgtatcaagataaacttctttcaccttaaatacagtgcctgttcattattcagataagttgctgcacacagaaagtcagaaactttgttcttgtaatctagtcctaagcatttagaatacaaaggaaaatgaatattcattaggaatccaattgaatattgctagcattcagacaagttataaaaaaaaaaaaaaa

SEQ ID NO: 2590 - DNA, 1647 bp, Glycine max
tcagctacgtaggccccccccccccccaaaaaaaccctttgttttgattaccgcattggtctctctctctttatctcactgcgactcactctagtgagagaaagaagaagcgaagaaaaaaaacacacacacacaaacacaagcacagttgaaaatggctctgcttaccctctcttcgctgcaatgaagaaacgtttgtttttcttctccgaagaagaaaaatggctctcggcgacgatgcgcagcaccactctccctcgttcctcgatgcccttctctgcgaagagcgagaaaccttcgaggaagactttgatgagaacggttatgagcgtgagaccgaaaacaacgaaccctctgtgataaagtcgcaatctttgcccttggttttgcacgataatgacctgttctgggaagacgaagagctcgtgtcgttaatcgcgaaagagggagagacccatttgtgttttcatggtgtcgttgctaatggggccttggaagggcctcgtgttgaggctgtgaactggatttcgaaagtttgtgggcactatgggttctccgctttgacaactgttctcgctgttaactactttgataggttcatcacaagtttgaagtttcagaacgataagccgtggatgacacagctcactgctgttgcttgtttgtcccttgctgtgaaaacggaagagacccatgtgccactcctcttggaccttcaagtggaggagtcaaggtttgtgtttgaggcaaagactattcagagaatggagctgctggtgctgtcaactcttaagtggaggatgcatccggtgaccccaatttccttctttgaacacattgtgagaaggcttggtttgaagagtcgcttgcattgggagtttctatggcgttgtgagcgtgttcttctcaatgtcattgccgattcaagggttatgagttatcttccttctacattggctgctgcgacaatgatccgtgttattaaagagattgaatcatttaatgcgaccgagtacattgatcagcttctgggtttactaaagattagtgaggaacaagtgaaccagtgctacaaaatcatacagaaactattaggttgctatgaaggcatttacagccttcaccagaaacgcaagcgactatctgaaccgggtagcccaggtgctgtcactgatgcatctttcagttgtgatagctcaaatgattcatggaccgtgtcatcatcagtctcactttcactggagccgctgttgaagaggagaaaatctcaggaccagcaaatgcgactgccttctgtcaattgtgtgtcaattgatgttcttaatagccctcgctaataatgaacttagtatttacttcaaatgtggtagctttctttcatataaatctggcagttatgttattgaaatgctactaaattatgttcttagttatagacatttctagccataatttgaaaattaatgaggcagagactgagatacccttctccactttgtggtttaaggtggaaaagggatctggtactgagtagaaatataagttataaacttgtaattctacctgagttatactttcagtgcagtttttactcatcttacactgatatttgacaatatgtgcaatcatgaggttttctttgcatat

SEQ ID NO: 2591 - DNA, 1576 bp, Glycine max
tcagctacgtaggccccccccccccgaagcgtgaagtgcttctaagattaaccctttgtttgattaccgcattggtctctctctctctctctcattatctcactgcgattcactctagtgagagaaagaagagaaggaaacacacgcagagtttaaaatggctctgcgcaccctctcttcgctgcaatgaagaaacgttttttttttcttctccgaagaagaaaaatggctctcggcgacgatgcgcagcaccactctcactctccctcgttcctcgattcccttctctgcgaagagcgagaaacgttcgaggaagactttgacgcgaacggtgacgagtgcgagaccgaaaacaacgacccctctgtgataaagtcgcaacctttgcccttggttttgtacgacaatgacctgttctgggaagacgacgagctcgtgtcgttaatcgcgaaagagggagagacccatttgcgttctttttctgatggggccctggaagggcctcgtgttgaagctgtgaactgggtttcgaaagtttctgggcactatgggttctctgctttgaccactgttcttgctgttaactacttcgataggttcatcacaagtttgaagtttcagagggacaagccgtggatgacacagctcgctgctgttgcttgtttgtcccttgctgcgaaaacagaagagacccatgtgccactcctcttggaccttcaagtggaggagtcaaggtttgtgtttgaggcaaagactattcagagaatggagctgctggtgctgtcaactcttaagtggaggatgcttccggtgaccccaatttccttctttgaacacattgtgagaaggcttggtttgaaaagtcgcttgcattgggagtttctgtggcgttgtgagcgggttcttctcaatatcattgcggattcaagggttatgagttatcttccttctacattggctgctgcgacaatgatccatgttattaaagaaattgaatcatttaatgcgactgagtacattgatcagcttctgggtttactaaagattagcgaggaacaagtgaacaagtgctacagaatcatacagaaactattaggttgccatgaaggcatttacggccttccccagaaatgcaagcgactatctgaattgggtagcccgagtgctgttactgatgcatctttcagttgtgatagctcaaatgattcatgggccgtgtcatcatcagtctcactttcactggagccgcagttgaagaggagaagatctcaggaccagcaaatgcgattgccttctgttagtcgtgtgtcaattgatgttcttaatagccctcattaataatgatcttagtatttacttcaaatgtggtagctttctttcatatcaatctggcagttatgttattgaaatgcaactaaattatgttcttagttatagacatttctagccaaaatttgaaaattaatgaggcagagacttagatacccttctccacttgtaagtctacctgagttatactttcagtgcagtttttactcatcttacactgatatttgacaaaaaaaaaaaaaaaaaa

SEQ ID NO: 2592 - DNA, 999 bp, Glycine max
ttttttttttttttttttcttttaagaaatgcattagaatatattactaaaatttctcctttcattaacttaaattttaacataactcccacaaagcataaaatccaagtcacaaagaaactgactttgaccttacacatctcatgtccctactttctgcatagagttctactactaagtttcacctttcacggctatatgcaaaaggtgtattgctatgtgtgattaagttaagtgcataacattattacagcaaaaaactaagaacaaagcctagaaccaaactcatgagccatttctgagggaatagttggtgtgaagaagaagaaggaggagtctcgcacagattatacccataccacgtgccattggggatggaggtgttgaaatcgaaagtaacaggctctgagttgtagccatagattttcacactctcaggctcccaaccttcctctgccccagatctatataggtacacatagcaaattggagatgcacatgcaccatctatctgaaatgtatctgaagaacactgctcaaaggtccttgaaattggatcatccagtcttggttcatatacctggttgccataagcatcgccaaacgtaataccaatcttatccgtagtgaacttaggcgatgaacaactcgtagatataactaccaggtaagaacagttcgctgcagtcttcatctgaatatatccaacagagaaagattcagctgcatgaggttgcacagaagcagatttggactccgatactgaaagggtcagtgcagaggcaaagcagaacaaaaaaagaacgacctttatcatttttttttttctctcagaaacttaaacccccaaaatcaaaattcaaaagagaagaataatctgaactctgaaaaatatagtcaaagttcaatgactctttgttctgcttttgggggggggcctacgcagctctgtggtatttatattgcaaaacactgctagtcaccactatggtatttata

SEQ ID NO: 2593 - DNA, 1026 bp, Glycine max
acttaatattcataagagtttattcttagatgatagtgtaaaaaacttttatattatcaatacatataccattttctctaaaattaagacatgcattagagtatactactagaatttctcctttcataacattaacttaaatttaacataactcccacaaagcatgaaaaccaccaagtcacaaagcaactgactttggccttacacatctcatgtccctactttcggcatagaatactactactactaagtttcacctttcacggctatatgtaaaaggtgtattgctatgtgtgattaagttaattgcataacattattacagccaaaaactaagaacagagcctagaaccaaactcatgaaccatttctgaggggatagttggtatgaagaagaaggagtctcgcacagattatacccataccatgtgccattggggatggaggtgttgaaatcaaaagtaataggctctgagttgtagccatagattttcacactctcaggctcccaaccttcctctgccccagatctatataggtacacatagcaaattggagatgcacaagcaccatctatctgaaatgtatctgaagaacactgctcaaatgtccttgaaattggatcatccagtcttggttcatatacctggttgccattagcatccccaaacgtgataccgatcttatccgttgtgaacttaggcgatgaacaactcgtagatataactaccaggtaagaacagttcgctgcagtcttcatctgaatatatccaacagagaaagattcagcagcatgaggttgcactgaagctgatttggactccgatactgaaagggtcagtgcagaggcaaagcagaacaaaaatagaacaaactttatcatttttttttccttcagaaacttaaaccccaaaatgaaaacttagaagattagagtgagtaatctgaactctgaatattatagtcaaagttcaatggctctttgttctgctttggatccccggctgccgtcttcgcgcagccgta

SEQ ID NO: 2594 - DNA, 970 bp, Glycine max
ggattcggctcgagggacacacttatactatattgcataatatacaaactatgtttgttctttttatgttgttttgacttttgtgtaataaagatgtctttttttttgcacgttaagtaatgcctccattgaatgggagttgacatgttagacagctctaaaagtagcacagcccttcactgacaaagggaatgaaatcactcccatatgaagcataagaatgtgtacaaatgtatcacttcttactcaaataaaaagacatctttattacacaaaagtcaaaacaacataaaaagaacaaacatagtttgtatattatgcaatatagtataagtgtgtcctgaacatcctgaacagctactgtacctcattcttgttctcctcattgaccacatgaccttcagcttcaacttctttaatctgcctttctatatcagccttcttttcaaggagtggttgtatttttccgttaattttttcaagcttctgcttcagagtgctaagatccttggtcttgtcctttccagtaacttttttcttcttctccttcttgtctttgtcttcttttttcttcttctctttcacttccttcccaccatcctttcctttatcttctttttcaccttctttttttatttcttctatatcaatatccctaacagaaacttcaaccttgctatcctctttctcaccctcctctttatccttcttttcctttttgtgatccttctctttctccttcttatcctttttctttttcttatttccttcatcatcctcaccttcatcattttttcccttttcctttaatgtgtctgtttcttcatctttatccttcttttcctttttcttctccttctctttatctttcttttccttcttctcttcaccatcaccgtctcctttttctttgtccttcttttcccttattccccttcatctttcccatcatctttctttcccccttgac

SEQ ID NO: 2595 - DNA, 765 bp, Glycine max
  misc_feature (16)..(16): n is a, c, g, or t
ccgcggggatcctccnccaatacaaccgctagggtgtgcaccgactgggttgaagtatcttaccaatattatttcccaatctggctctgcacggtggacatcacgacaaatttcttcaatgataagcttagttcgtccatatgggttcattgctgacagagggaactcttctgtgcatggaacttcctttggccaaccatatacagttgctgaagaagagaacacgagcttcttgcatccatgggcagccatgacttccaatagagtgattgtcccagtcaagttgttgttatagtatagtaaaggtttttgcacactttctcctactgctttcagtccagcaaagtgtatgacagcatcaaattgtgtggaaacaaaaatttgctctagtgcatccctgtcccgtaggtccaccttgtgaaaggagaggttgttcccaaattcgccggcaagctccctgactcggtggatagaaacctcggaggaattgtcgagattgtcgacgacgacggttctgcaacctccgagcaagagctgaagaacggtgtgggtgccgatgtaaccggctccgccggttaccagcacagtcttgtcgcgcatgagtggcttgtgcaaagaggagttgctggaaagcttaagttgtgagcgaaaatgaggggaattaatatacggcgcggaggaagtgagattgccaatgctgacgcgcgatgccatattcggaaaaggcgagaattctgtgacacgttcgttcgaaaatgaattgtg

SEQ ID NO: 2596 - DNA, 1718 bp, Glycine max
acacaattcattttcgaacgaacgtgtcacagaattctcgccttttccgaatatggcatcgcgcgtcagcattggcaatctcacttcctccgcgccgtatattaattcccctcattttcgctcacaacttaagctttccagcaactcctctttgcacaagccactcatgcgcgacaagactgtgctggtaaccggcggagccggttacatcggcacccacaccgttcttcagctcttgctcggaggttgcagaaccgtcgtcgtcgacaatctcgacaattcctccgaggtttctatccaccgagtcagggagcttgccggcgaatttgggaacaacctctcctttcacaaggtggacctacgggacagggatgcactagagcaaatttttgtttccacacaatttgatgctgtcatacactttgctggactgaaagcagtaggagaaagtgtgcaaaaacctttactatactataacaacaacttgactgggacaatcactctattggaagtcatggctgcccatggatgcaagaagctcgtgttctcttcttcagcaactgtatatggttggccaaaggaagttccatgcacagaagagttccctctgtcagcaatgaacccatatggacgaactaagcttatcattgaagaaatttgtcgtgatgtccaccgtgcagagccagattggaaaataatattgttaagatacttcaacccagtcggtgcacaccctagcggttgtattggggaggatccccgcggaattccaaacaatctcatgccatttgttcagcaagtagcagttggccgacggcctgcactgacagtttttggaaatgattataatacaactgatggcactggggttcgggattacattcatgttgttgatttagcagatgggcacattgctgcgttgcttaaactagatgatcctaatataggttgtgaggtttataacctgggaacaggaaagggaacatcagttttggagatggttcgagcttttgagatggcatctggaaagaaaattccacttgtgatggctggccgtagacctggtgatgctgaaattgtttatgcatcaacaaagaaagcggaaagagagcttaaatggaaggcaaaatatggcattgatgagatgtgccgcgatcaatggaattgggctagcaaaaacccttatggctatggagatcaggaggattccaccgtttaactatatatatatatagtgttctctttgggttcttttccgaactcccccacaccgtagtccgtaggtcttgtgaatttagttttctcaaaagcttttctttagtccgtaggtcaaggtgacaagtacttgtattattatgattcatagttacatggtaaataagtagtggtttactgcactgtaatttaatttaaaggttctataggttccttcttacaggttattgattattagattcgaatactctcatgttccacatgagcagcatcctgttttgtaaatctgaatcacatgtttgtttaaagtgtaactaacaggtatcctaacctcattattcagattattttttttttgacagctctaaaagtagcacagcccttcactgacaaagggaatgaaatcactcccatatgaagcataagaatgtgtacaaatgtatcacttcttactcaaataaaaagacatctttattacacaaaagtcaaaaaaaaaaaaaaag

SEQ ID NO: 2597 - DNA, 1855 bp, Glycine max
actattaaaatgatttttttttattgaaactttttcataaactatagcatgaccttctgtactagtcgattttgccaagcttctataatttactgaaccaccctcgccatcaacaatccccaaataaataaagtggcacatgtttccatatctatttttaaatatataatgatcatgaaggatgaaattagtgtatactaatttattactttattcatttcagtgcgtgggttaacatactagtgatcatatataactgctgccttcttggcactcagatagccacaagtccatatgttctgtaatctgttgccttactttgtgaactgcatcaggtgaggagcagttcttctcattaccttcaaggaccaaaggagattgaggacatcctcgaaaatcagtacaatgggcacaattgctacatgtgatggtgtaggaaggcagatcaggagatgaagtttgtttggacgcatgacgccaaggatcctgtgagccatttgcaaatactattttcgaaccagcaatttttgtgcctccgtagtataaattagttgcatcaacatcaggaaagatgccctctccaaagatatttttgcaaaggtccatatggtattttgcatcaatttctgaggagcgtatactatcatttgatggagccacctgaaagaatgcaacttcagtgcaaacttgaaaccaccataatcgagtagaactgtcttcattgatagcagttttcttcaagtactcctggtcataagtctgcacattaacaccaaaggttccaatgtagtactctttgacgtatttggcataagcatccaccaagtcctctccagcattctttgcttcaaccataggcttgcatactttatcaggattaccatattgaaatgctacagcagcagcatctgcaattaaatacataaagtctccatctttttcgagatcatctgcattaaaagatgcctttagttcctttccattggttgcaagtttgtgctcaatgagttgagtagtttcttgtaatactgctttacattcagcacctgctgactcaccaatctgttgatcatattctgtgaagttataaacagcaagaacaactgcagaacttgccagacttccacatgttaaatggggaaacttgagacggaaccatgcactgagtgctccagcatatgagccaccaaaaacgaaccaggggttttcagtttttgttctattaagctttgcatttaaggaatcctgataatactgacgaaaaacagccaaatcaaagagtgcctgcttggatgaaagatatttcaaattttctgtctccaaagaattaaatggggaactctttccatagtagcgatgttcaagagtaaccatagctgctccaaacttctttgccagtacaccaatatagtcatttgttatcccattacatggaccttcaccaccgattaccaagaaaattggtccatcaggaatccggaaatagtctagaaactcgaagtaacgttgacggaattgatggtgatcatagggagagaagtgatcgagggtttgattgaaccattgctcctgagtggtgagataactgccctgagacagcttattgagcagagtacgaggaggaacaactccgtagctcaacgccggaaaagaagaaacaaacaccaacaacaacgttaacagcgctgtcgtaatcctccaatcctcttgttctctcatccctcgttgctacttttagcttcctcgcgcttcagtttttgggtttccctttgaaaatagaatattattgcagcgtttttaccaacctgaaatatggatacagagacattgggggggggggggcctacgtagctga

SEQ ID NO: 2598 - DNA, 2273 bp, Glycine max
gaggcttcgagggaggagaggagagaggaagtgagagaggcaaaagctgaggaggagggtagaggagaggttgttgagaatgagaacattgagaaggagggtggaagagaggagaggaggacaagggcaaggggagagaggaggcgatcttcgaagccgaatccgaggttgagcaatcctcctaaccatgttcatggtgagcaggttgcagcagggtggccctcttggctctctaaggttgctggtgaggctatcaatggattgacccctcggagggccgacacttttgagaagattgataagatcgggcaaggtacatacagcaatgtttacaaagctagggatactttaacggggaaaattgttgctctaaagaaggtccgttttgacaatttagagcctgagagtgtcaagttcatggccagagagattttgattctccggcgtttggatcatcccaatgtcatcaaactggaaggcttagtgacttctagaatgtcatgcagtttatatcttgtgtttgaatacatggtgcatgatttggctggacttgccacaaacccagcaatcaagttcacagagtctcaggtattggtgtattcaccttgagtgcatgctcttgttttgtttgaaatatatgattccagaatctttttctttttttggttgcttctggaggtagtccctttttatatgctcgtatctggctattttaggtaaaatgttacatgcatcagttattttctggactggaaggctcgagcaaccgtcatgtgctgcatcgtgatataaaggggtcgaaccttcttattgacaatgatggaattctcaagattggtgattttggattagcttccttctttgatcctaatcacaagcaccctatgaccagtagagtggttactttatggtatcgacctccagaacttcttcttggggccactgaatatagtgtaggagtggatctctggagtgctggctgcattcttgctgaattgttggctggaaagcctattatgcctggtcgaacagaggtggagcagctacacaagatattcaaactatgtggttctccttctgatgaatattggaaaaagtcaaagttgcctcatgctaccatttttaagccccaacaatcatacaagcgatgcattgcagagacatataaagattttcctccatcatctctgccacttatggatacccttctcgcaatcaatccagatgaacgtttgactgccactgctgcattgcatagtgaattcttcacaacaaaaccatatgcttgtgagccctctagccttccaaaatatcctcccagcaaggagatggatgcaaagctacgggatgaagaagctaggagattgagagcagctggtaaagctaatgctgatggtgtcaagaaatctcgtccacgtgagcgagttgggaggggaattgcagttccagaggccaatgccgaactgcaagcaaatattgatagacgacggctgatcacacattcaaatgctaagagcaagagtgagaagtttcctcctccccaccaagatggagctctaggctatcctttgggttcttcacatcacatggacccagtttttgatccccctgatgttccatttagttctacaaacttctcacaacctaaagcaaatatccaaacctggtccggcccattggtagatccttctggtgtgggcgtgccgaggagaaagaagaaacatggcaagtgatgagcatcatatacaatcaaattcatcaaaggaggactcaaaaaagataggaatgagtcgggagtcaaagaaatattcttgtagtataacaccaatcaatttttttgaagtattcatgatgaagctgcaaatgttgctgagttgatgtctgtcctctagttgctaaaggcattggaggtaaaccaaattgtattttcctgcttccatttctttctcaatgatcaaaggtttattctctatcttgtatatcttattttttttttcttcttgaactacaaagtttaattaggttagatgaatatctaataaataggttttgggaacagtattggcaatttatatttctccctaatttttttcccatttaatttctactttccagaagcctgtgaactgtgcagtacttatacacagcattcttttaaattttttggtttattcataagattctctattatccttttttgtgcattagtttaaagaaagccttgtgattgtcatttgacgatgaatagtgatatggttcctggttgcactggt

SEQ ID NO: 2599 - DNA, 1434 bp, Glycine max
gagagagagagagaaggcgatcttcgaagccgaatccgaggttgagcaatcctcctaaccatgttcacggtgagcaggttgctgcagggtggcccgcttgcctctcgacggttgatggtgaggctatcaatggattgacccctcggagggccgacacttttgagaagattgataagatcgggcaaggtacatacagcaatgtttacaaagctagggatactttaacggggaaaattgttgctctaaagaaggtccgttttgacaatttagagcctgagagtgtcaagttcatggccagagagattttgattctccggcgtttggatcatcccaatgtcatcaaactggaaggcttagtgacttctagaatgtcatgcagtttatatcttgtgtttgaatacatggtgcatgatttggctggacttgccacaaacccagcaatcaagttcacagagtctcaggtaaaatgttacatgcatcagttattttctggactggaacattgtcacaaccgtcatgtgctgcatcgtgatataaaggggtcgaaccttcttattgacaatgatggaattctcaagattggtgattttggattagcttccttctttgatcctaatcacaagcaccctatgaccagtagagtggttactttatggtatcgacctccagaacttcttcttggggccactgaatatagtgtaggagtggatctctggagtgctggctgcattcttgctgaattgttggctggaaagcctattatgcctggtccaacagaggtggagcagctacacaagatattcaaactatgtggttctccttctgatgaatattggaaaaagtcaaagttgcctcatgctaccatttttaagccccaacaatcatacaagcgatgcattgcagagacatataaagattttcctccatcatctctgccacttatggatacccttctcgcaatcaatccagatgaacgtttgactgccactgctgcattgcatagtgaattcttcacaacaaaaccatatgcttgtgagccctctagccttccaaaatatcctgcccagcaaggagatggatgcaaagctacgggatgaagaagctaggagattgagagcagctggtaaagctaatgctgatggtgtcaagaaatctcgtccacgcgagcgagttgggaggggaattgcagttccagacgccaatgccgaactgcaagcaaatattgatagacgacgggtgatcacagattcaaatgctacgaccaagaatgacaagcttccccctccccaccaacatggagctctaggctatcctttcgcccccccccatcacatggatccagtttttgatccccctgatgttccattcacttctaccaatttctcacaacctaaaagcactatccaaacctccccccggccattcggacactcc

SEQ ID NO: 2600 - DNA, 1503 bp, Glycine max
gtttttttttttttttttttacacattttttttttttttttttcttaatgaatacaatgtactgtaatgtgaacatgaaaattgagaacacctcaaattgtatagctgttacatgaagatacaaaatacacaaatacactccccattgattacaacataaccattcacaaaacaaaacaaaatacggcataagaattagaaatacaaatacaatgaaatcaacccaaccggcagatactgatttggtgaatgaataatcaacagaagaatcaaaatttgatgcgtcctcctttgaagttgctgtccatgctggtggcaaaaaaaatgcttcgttaagtccacagaattgatattttctaagtttctgtttttttcaatgacatgaccgcatcattggcaatgaattgtggtcgaggagacacgataattaggagaaaccaaccagtttgaaagactagcatcaactgcaatttctggcaatagaggcatggactgaagggcatttgattccaagctgcaaggtgagaaattcaagcttgcttcagagactaagggcatgtttgtatgttgctttgatggaacattctccttcctcgtgtgcttgcttgatgatacaacttttgttttgattgctttccactgtgtgagattctccacagggatcagaacagaatgcatgtccttgcttctgtctcctccacttaaattggatttcagctcagcttcatctagcatctgattccttatcttatcttctgccagagaaggatagcatgactccgccaactctttctgtttagtgtttgcatcacatacctcagcctcatcattttccaaacttccatcacaaccatcatcatcccaatcatactcatcatcatcaaattcattgtcatcgtcatcctcatagtcatcaatgtcagaatcctcatatgccatttcatcctcctgatcatcatatccatctccgcaattgtaatatctatgattagaagggtatctcactggcaaggctgcagatccttctgtttctgcagcatggttcctattttcttcttcctcattattcaatacctgataagctgtggggtttggctcatatacctgtacattcaaattgaaggtaactttcttcttcttgcttttaacactattctgctccttaacttcatctcttcctctgaaatcagaatcagggatagtgaatttttcggttatggcaagagcttcataatttccatatttttggtgtccagctaggactttgtagatagtctttctacgctttcttttgttggatagaccaaaacatgccatgaaacaacccatgtctattgggaagaggaagaggatggggaagggggaggaatgttgttgataaggtggcatataatgaatgaaagtaactgagtcagaaactgacatgcatgccacccagagagagagagagggggggggcctacgtagctgagtgacaagtttaaaagccgtttggctccaaag

SEQ ID NO: 2601 - DNA, 1669 bp, Glycine max
tttttttttttttttgaaaggaagaggaagaagaaaatttaatttctttcttttactaaatatatttgttagataattgtcatacacacataccctacaatctgttacatctcatctcattactgtacatacagtcacggcctagttagtaagatgtcacccttatgtgcagtccattaggtgcctcaactctaggaaatttcattactttatctcctcctacttcttcccacctgtatctagttacaaagtagtgtaagaaagtggaaatttcggttattcccaactcttttcctggacactgtcgggtgcctcctccaaatatgaagaagtagttctttgattctaaactcttgtccatccatctccatgggttgaatgttagtggatcaggatatagaaaagggtcataattgatctctcttgtatacacatatattctccatcctttggggatcaaatagccgtttagttccatgtcttgagtggttttccttaggaccccattaactattgtggccaatctagaggtctcaaaaatcaccgcgcgagtgaacctcattgacttgagatcattgcagtcaagtggttcatctggctttttcctctctcttatggccaaatgttcttttctgagttcctcaagagctttgggatggtcatggaggtacttgactgccatcattgatgtagttgaaacagtttcatagccagaatacatgattgtaatcactagatcaatgatttcttcatcacttagtttgtatctactttcatctcttcccatcaagcaaccaagcatgtcatggtaggtttcatgtgatgctcttctttcctctaagagcttactcagaatgttcactatagtcttccttgcctggaatccactgtggtaatttgtgccaggaagatcaatagggagagaaagggttcctagaactagcttaaagaactctgccatgaatgagtcagataatgagccagattccatgccagcaatctgcttcagagatgataagaaggccatctctttggttttctcttgaatgttgatgactttgtcaccccagttgctaaggtgggctctcatgaactgatcaatttttggcaaaagctgatctctgatcaaggtggggctaatgatggaaagcagtgctcctctcatgtacttgtgagtggagccatgaacagctgcaatgttgcatttgcctaagatatctaacatggattgagggtaaccaggaacaagcccttttgcctcattcattaggatgtatctgttaagctctggatccatggaaacaatggtaggacaacccagtatgtgggatttgaaaaaactgccataccttgctctctgggttttcatgaagtttggaccctgcttaagaaactcagttgtctccccaaaaagtggccaacccattgtgccaggaggcaaacctttcttcctgtaccttacttcattccacctcaagagagcagagcaaaaacagagcaccaagacaacacctactactacaattgccatcaagaaagccattggtgctcccactccaaaaccccaacccacagagacttcaaaaagaaggtacagtctcttgtgttgtagttccccttctgtcgtcttctcgcagccgtacccttctgtcgtcttctcgcagccgta

SEQ ID NO: 2602 - DNA, 2489 bp, Glycine max
  misc_feature (2472)..(2472): n is a, c, g, or t
gagagatgaagatgtctttacgttctggatccgatctgtgaactgtgatccatcgtcaatctttcagtaacaaacatgagcggagctgttcttgttgctgtggctgctgctatcggcaacttgctgcaaggatgggataatgccaccattgcaggatctattttgtacataaagagggagtttaatttacaaagtgaacccacaatagaaggtctaattgtggccatgtcacttattggagccactgtcgttacgacatgctctggacccttatcagacttgctaggccggcgtcctatgttgatcatctcctctatcctttattttgttggttctctggtcatgctatggtctccaaatgtttatattctcctctttgcaaggcttttagatggattaggcattggtttggcggtcaccttggtacctctttacatatccgagacagctccacctgagattaggggattactaaatactcttccgcagttcactggttctgctggaatgttcttttcctactgtatggtctttgctatatcactcaccaaggccccaaactggagactcatgttaggtgttctttcaattccctctctcatttattttgcactcacactattcttcttgcctgaatctccaagatggcttgtcagcaaaggccggatgctagaggccaagaaggttttgcaacgacttcgcggcagacaagatgtcgctggtgagatggctttactagttgagggtcttggagttgggggtgataccgttatagaagagtacataattagtccagccaatgaattcagtgatgcagagcagatcaaattgtatgggacagcagaaggtcaatcctggattgccaaacctgtcactggacaaagttccattggccttgtatctcggaagggaagcatggcaaatcaaagtgctctagtggaccctctagtgaagctctttggtagtgtccatgagaagctcccagaaacaggaagcacacttttcccacactttggaagcatgtttagtgttgggggaaatcaacctaggaatgaagattgggatgaagaaagcattgccagagagggagatgattatgtatctgatgctgctgacaccgacgattctgatgacaatttgcagagtccattgatctcacgtcaagcaacaagtgcggaaagggacatgcctgctcctgcccagggaagcatgaggcaaggtagtcttttgcaaggagaacctgctggaaactcagggattggtggtggatggcagctagcatggaaatggtctgaaacagaaggtgttttcaagagaatatatttgcaccaagaaggtggtcctggatctagacgtgggtccatcatttcacttccaggctgtgatgcgccgacactaacagatggtgagattgtccaggctgccgctctagtgagtcaatcagccctttacaacaaggagcttatgcatcagcagccagttggaccagccatgattcatccatcccaaacagctgcaaaagggccgagttggagtgaccttttagagcctggagtgaagcatgcactgattgtgggggtggggattcaaattcttcaacagttctctggtataaatggggtgctctactatacacctcaaattcttgagcaggcaggtgttggttatcttctttcaaacctgggcctcggttctacttctgcgtcttttcttatcagcagcgtgacaaccttgttgatgttaccctgtatagctgtggccatgaggctcatggatatatctggcagaagaaccttgctgctgactacaatccccgtcttgatagtatcacttctcatattagtaatagggagtcttgtggaattggacagtactataaatgcttttatctcaacttcgagtgttattgtctacttctgttgtttcgtcatgggctttgggccaattcctaatatcctttgttcagagatcttccctactcgagttcgtggtctatgcatagctatatgtgctcttacattttggatatgtgacatcatagtcacctactcgctcccagttatgcttaattctgtgggccttggtggtgtctttggtatgtatgcggttgtgtgcatcatagcttgggtgtttgtcttcttaaaagttccagaaaccaagggcatgccactggaagttatcattgagttcttctctgtcggggcaaagcaagctcaagttgccaataatacctgactttacaaacgacccattggattttttttaatataaaatcattttgaatctatggatttcttgttttgtttcctctttaggcaccttcatcgtgggttgggatctgggatttgagaaatgagaaagtccaaggaaactcgttagccaataaaattataagcatctactataccattcgaatttgatttcataacccttatttcttgcctttataaaatgttatttccttttttttanaaaaaaaaaaaaaaaaa

SEQ ID NO: 2603 - DNA, 1896 bp, Glycine max
  misc_feature (106)..(110): n is a, c, g, or t
  misc_feature (182)..(186): n is a, c, g, or t
tgcatggcctgcagtaattaatgtgtatatatgcatgactttgataataattgtcattgggcatggacaggtgaaatggctttactggttgagggtcttggagttnnnnntgatacagccatagaagactatataattggtccagccaatgaacttgctgatgaagaggatccgtccagagnnnnngatcaaattaagttgtatggaccagaacaaggccagtcctgggttgctagacctgttgctggaccaaattctgttggccttgtatctaggaaaggaagcatggcaaatccaagcagtctagtggaccctctagtgaccctctttggtagtgtacatgagaagctcccagaaacaggaagcaccctttttccacactttgggagtatgttcagtgttgggggaaatcagccaaggaatgaagattgggatgaggaaagcctagccagagagggtgatgattatgtctctgatgctggtgattctgatgacaatttgcagagtccattgatctcacgtcaaacaacgagtctggataaggacatacctcctcatgcccatagtaaccttgcaagcatgaggcaaggtagtcttttacatggaaattcaggagaacccactggtagtactgggattgggtggtggttggcagctagcatggaaatggtctgaaagagagagcccagatggaaagaaggaaggtggattccagagaatatatttacaccaagatggtggttctggatctagacgtgggtctgtggtttcactccctggtggtgatttaccaactgatggtgaggttgtacaggctgctgctctggtgagtcggtcagccctttataacaaggaccttatgtgtcaacggccagttggaccagctatgattcatccgtctgaaacaattgcaaaagggccaagttggagtgacctttttgaacctggagtaaagcatgcattaattgtgggggtgggaatgcaaattcttcagcagttctctggtataaatggggtcctctactatacacctcaaattcttgagcaggcaggtgttggttatcttctttcaagtctaggccttggttctacttcttcgtcctttcttattagtgcggtgacaaccttgttgatgcttccttgtatagccattgccatgaggctcatggatatttcgggcagaaggactttgctgctcagtacaatccccgtcctaatagtagctcttctcatattagtcctggggagtcttgtggatttgggaaccactgcaaatgcatcaatctcaaccattagtgttattgtctatttctgtttctttgtcatgggatttgggccaattcctaatatactttgtgcagagatcttccccactcgagttcgtggtctctgcattgctatttgtgcccttaccttttggatctgtgatatcattgtcacctacacactcccagttatgctcaattctgtaggcctcgctggtgtttttggtatttatgctgtcgtgtgcttcatagcatgggtgtttgtctttttgaaagttccagaaaccaagggcatgccactggaagtgatcattgagttcttctctgtcggagcaaaacagtttgacgatgccaagcacaactgacccaaggacatgataaattcaaagttttgacggtaccttctaattattttcaatctacggctgtttgaaattttcccctcttttaaaattttattttctatttattctctcttttccgtgggttgagattgagaaacaagaaactttgtttctgtaaagaaaaatgttcattttctggttcatttatggaactttatatacttcctagtccccccgctattcggattcgaaagtgttaaatgatctgtgctctaggcccccacccc

SEQ ID NO: 2604 - DNA, 832 bp, Glycine max
cgacaaaagcaccaaatataaatatgaatttatgtgtaaaagtatttgatgtttgttcatatacacacacaacgatggcaacaacaaaattactgaaaaaacagagaaaaaaaatataagatataacgtatacaacgctcacagataaatatattctgatatgataacagtgcactaatatttagtatcatttattcccaaaggttaacttaaatttcttcacaaggtgggccttccaaacgaatataatcatacatgataccttggaagggactggtgcatcttggttgcgaaaaatatatggtatttgtgccatcaacaagaagagaacctggtatattcacatggtacagccaatagatcccttgaattccatgtcttgcaattgagttgtcccttcctattaatccactggtaaatacgggtcgccttgcattgggatcatttactcgaatctgcaattcagctaatgttgcagatgcaattgcaactctcagtttgtatgtacttcctttaacaacactacagatttcgaacttgatttgccaagttgttccttgaagagtgttatccacttttttcctcggagcctgtgcataaaaccaatccttcgtatagtcactaacaccaattgtgtaaaccaaatctgcatcaggatacaattctgaatacctatcccacaatccatactgcctgaacctgtctggatggttgataaaaagcttattaatatgccctgctctcggctccgcgccgccgtattctgcagcggatctatcaggaatacctatttcccacaatgtgggaccatccttggaggctcatatacaag

SEQ ID NO: 2605 - DNA, 1705 bp, Glycine max
  misc_feature (1700)..(1700): n is a, c, g, or t
ggctcgagtaaaaagagaggaaaaaaaaaagcctacaccaccctcttcttccctattcccttctacttctggcgccatttgcagcttcaaaactccatctttatttttcttctctccttccattattagaaacaccctcatggaatcagcagcaacagcattgaacaacatcatcaacaacaacaacactgttcctgcagtgtcgccaccaccaccaccaccaccatcctcagagcctcagccaatgaacatgaatgtcaacatgaacatgaacgtggtcaacaccacagaaggaacaacaccaacaccaaccccaacaacaatggttcccccaacaacaatggttgttcctgcagtgccagctccaacaacgacaacattagcagtagcaacaacaacaccagggagtttggatttgtttgggaagaagaagagagggaggcctagaaagtatgatgcagatgggaacctgagagtgagtgcaagaccaacaccaacaccaccatcgggttttactttgtccacaccttctgagtactcttcttccaaaagagggcgcggcaaacactacaacacaacttttgccaacaacagctaccaacaacaactctattcttcttctttgggtgatgtgtttgcaatcacagctgctggtgattttgtagcgcatgtgttgaatgcttatactggagaggatgttgctggaaagatcttgtcatttgcccagaagggtccaagaggaatttgcattctctctgccaatggagctatctcgaatgtcaccatacgccaacctggttcttctggtggcattttgacttatgagggtcggtttgagattttatctttgtctggatcattcacagttgttgacaacagtggcatgaaaagccgaactggtggattgagtgtctcacttgctggccctgatggtcgggtcataggtggtggtgttgctggacttttaactgctgctggccccattcagattgttgtaggaagcttcatgcaaaattgttgcaagacccaaaagaggaagtatcaacgtgaacaacagatagtggcggccacccctacttcagctggtccagaaatagtgacagcagcaatacctatctcacaagcaaatgctgctgatggtgagaactttctgatacctatacctatctatcagattccagaccaaaaccagagagaatctatcagtgtttcaagtgacaaacagaacctagatgctactcctgatgctgctgctacttggaatggttctgaggaatattcagaccagaggacttctccagacatcaacatatctttgccagatgaatagaacaagggtgatgcagaggctgacatggtagtaatgaatgaaactaacaccggaaatctgtcatgacaactactgggttatatgacatgatgtacagttgtcagaaattagaaaggattattattattattaaggcctcattattttttcttattacagtttctgttgaacatttataagtttttctttcttttctttagaggtggaagagattaccaaaagacttcgtagtaggctgtttattattctgttgggattgttcggtaaaattatttgtagttttcaacattttgcacatttgggaaacttctaagagtttttctcattatcatggatccaagaactatacataaaagttgcttttgccccnaaaaa

SEQ ID NO: 2606 - DNA, 1140 bp, Glycine max
ctgtcgcgtgggcggacgcgtgggcggacgcgtgggcggacgcgtgggcggacgcgtgggcggcgagctcctccaccgcgccaaaaccctagcctcgaatctcgccacaatcctcaaactcaccgaaggcgatgctgagcgccgtggagaggttccgggtgacgcacgctacgatggtgccggcgctggtggtggctatgacgaaagactgcgtcatcgccggctacgatgtgacgtcgctggaagggatcgtttgcggcggatctccgctgaggaaagaaaccgatgaggcattcaaagctaagttccccaacgtcctcgtcatgcagggatacggtttaactgagtctgcagttacccgaaccactccagaggaggcaaatcaggtgggagcaacaggtaaactgataccaaatatagaagccaaaattgtgaacccagaaacaggggaagccatgtttcccggtgaacaaggagaactctggatcagaggaccttatgttatgaaaggttattctggtgacccaaaagcaacttcagcaactttggtggatgggtggttaaggactggggacctctgttattttgatagcaaaggtttcttgtatgttgtagataggttgaaagagttgattaaatacaagggctaccaggttgctccggcagagctagaagagttactcctatctcattcagagataaatgatgctgcagttattccataccctgatgaagtagcaggccaagtgcccatggcgtttgtggtgagacaacctcaaagttcccttggcgcagcagaagttattgattttgttgccaaacaggtttcaccgtacaagaaaataaggcgtgtagcatttgttaattccatacccaagaatgctgcgggaaagatactgaggaaggacttaaaactggcgctctctaggttgtaatatgcttcattttcgttttataagtggtgtttgatttagtcttttgctccaaatgaaaaaaaaaaagaagaagcaatgcgtgtgttcagtttaagaatttatatgtaatgaaagaccttcttttgtaaaatagatcttgaactttatcaaatgatgtagtatagtaacttctcatcacatctataatttgtaaaaaaaaaaaaaa

SEQ ID NO: 2607 - DNA, 1922 bp, Glycine max
tttaacataaatgaattaaatttcataaaactgagcatctaatcagggaacagtcagttgattcacaccaacaccttacgaacatcggtatctgtaaagtaattttgccaaccacaattattgcaaattggaaaacagaaataacacacctttgtgcaatgagaaaagaaaaaatgtgacgcatccagagttgcaatatctagaatttgatttgtacatccaagaatataagtataacttacctgaactacttatagctccagataaattcttggtctctcatgactaccaactcaaatgacttcacagatccttgaacatagtctcagcaagaaacaagaatttctctatatctaatttttttaacctagcaacagttccatgataattcacagcttgagacaatactgcagtgtacatgccaagatacaagttataaaacagtgctaatagtcatcaccgctgcagcaagactttgcaggaagtaaaagacgacaagaagcaaaaagtttggaagatggacagatgaagctgatttagagaactgaacagatccagtaaagcttccagcagtattagtcactggacttgtactaggtacagaaatattcttgcaagacccaaagggtgcacccgcctggcaggctgtgacagtactacacccacacaatgtatggccattcattttatccacaatatcaaaaacaccacctccatcactcctcatgtaaaaattaacagctataaagttgggcagcaaattccctgctgctttgtaacaggtattgaccatctcagcaagtggagctgaatgctctttgcaagagtcagcttcaactggatatgtcggaaagtaattcatcaggaaaagtgaatgacttttagaatttaatgcctttgattcttttctgtgcggacaagaaccctgttgcactccaggatctccagactcattttcaaccatgtgcttccactgataagctattccttcccctgcttcctttgaagcatcggaagtgaaaacaacaagtcggtgatttgcttgaaccatctccgtcacagtgggccaatcgtcaccctttttcggcatcttggacacaggaaaccaatacttatccagtccagcacttgtgaacacattagtcaacccctttggagtgtgcacatagtcttcaattatgatggtaacaatctcagttggattttccgtcaagaacgcctccacttctttcaaagtattaactgccggttgaaatgcagtgaagttgaagcattgcccgcgaaatgagtgacagagccatatatcattctggaagtcgtacatgtccaacatcagtcccctaactccattcctcaactggttagtgacagtgtcttcttgattgtaaaaggtaattctctgaacaccgggcaaaggcggtgcatcgacaatgctgaaggaattgtgggtcactatccacgtgtacttgttgaagggcaacccattgacaatggaagtgggaagtgtgacttggcctctggtgcagatgggttgcttcaagcccaaagaggggcaattgccacagaacaaacctggcccacaatccgtagcggcagagcatgcttctagaatctgggaattgacgttaatgaaggagagggaacagaggagtggtacaaggaggaagatgatggcattggcaggtgctggagctctgcatttcgaacggtggttcggggaatgcgacgagcacatggcaggttcgggttcctttgcggggtgcggaacctagaatgagggggggcctacgttgctgactctcagcgaaaacagaattcgactgtgtaatgaactaatgatccaagttgaattattgtttgtaggtacaaaagctttcttacttactactgctgatttccgaatgctcaaaagtttatttact

SEQ ID NO: 2608 - DNA, 809 bp, Glycine max
tttttttttttttttttttttttttttttttttttttgcattttaaaactgagccgatccgaaatttcaatttagttgccatccaagctaaaaacacgaccagcagaattaacaatcatcacattgccttcaactagaacagaagttaaacttaagatgggggtagaaaactttagcaacagcaaatagacaataagcaacatataaaattgtatggcatgcaacaaagttttggaaataacaaaaaatcaaaatctaccatcaagggtgtcaacagaagctcactacaaaacataaataactctcccatatattggatctactcatcctcctggctacgtagtctggccgtcttgttcgtcaagacaacatcaagctgagcagctctctcaactatgtctttcctcttccttgtggatacattgtgagcaatctcagcacagtatgtcctgttatgcatcatgagaagttccaggtctttcacattgtgcacgacaaatttcttgaaaccatttggtagataatggcgggttttcttgtctgagccataaccaatgttgggcatcaaagtgcatcctttgaactttctcctgacacgagaatcaatacccttgggtctgcgccagcttggcttgacggagatcttgcgatcactctgggggcgtataaacttcttgacgcgcttcttcacgatcctcttggagagcaagggtaccgccattttcactcaccacgcagaattagggtttccccccttctgtcgtcttctcgcagccgtacgcgcgccgaatcggctcgagcggctcgag

SEQ ID NO: 2609 - DNA, 1556 bp, Glycine max
  misc_feature (1150)..(1154): n is a, c, g, or t
  misc_feature (1174)..(1178): n is a, c, g, or t
  misc_feature (1247)..(1252): n is a, c, g, or t
  misc_feature (1362)..(1386): n is a, c, g, or t
agataaatcttaacccttaatttttctatttgtggaatcaagaacaaaaaagaaatattaccattccaaatgtaaacataataataacttgtaagtttagctatcccaagcaagggtaataatgcgacgttcttccaagtcttctgagtctcaagctggaatatttttatggccattggtcatgttcttcatgcattcaaatcgaggagccttttcaccgaacttggtgctgccatagagcttcaaatagtccccataacggaaattgcttgggtacaagagcttaggagctggggaaataatggcatctccaatgggattataaaaggtagcaatggaggttctgcttccactattgtcaggcatgaccctatgcacaacacttttatataagccattgctcaacacttccacttgatcacccgtgttcacaaaaacggcattgttcttgggtggtggaatctcgacccatttgccatctttgaagaattccagaccaggcactttgtcatcttggagcagtagaatgatgccacccgcatctgtgtgctctctaagtcccctcacaagttctggacgtggacactgagggtacttggccacttttgttcccacagcaggaccctcaccacttccagaaaatgctttcttgatgtaatccttctccaaaccaagattttcactcatgagctcagataacttctctcccagcttcaggagctgtgcaatgtactcatccattgtttggcaaagctcccgagagatgtttgaaatttcattgatgttagaggtggggcgatgccaaatgaagaaggtaatttcccaatctatatcagaggtgttctgctctttctccaacctcttggctatctcagactggtagaagctttcctttaggtcttcctcatagtatgtattgattaactgcttcaacttctccatcagttgtgtgtcaatttcatggttctcaaccataaagcagccccatttttcacaagcttcgtgcaatagggccattgtgtcacccctcttgtccccattgaggttactaaaatctatcacagggatctccatctttgtaacctagactagatacttagtgtttctttgttgaaggtttgttacagaggatggggtatatatagggcgnnnnntaagatctaaatctacgtcnnnnnttgtaagagaaaaggctagctagaatgatgcaaaagctatttcactgccatcatgtgatcatgtacaannnnnnattcttctgttccaatggttaaccgaatttcgcttgtacacaaagttttggtttaatttcttatctccaccttacttcaagtccaattttagtcgtggttattgatttannnnnnnnnnnnnnnnnnnnnnnnntttcaactaaaagccaatttaagccattatgggtaagcctgcttctttctctggtaaatcaataactaggggcagtgtcatcgaaaaggttgcattcaaattaagaggcaaaatgtagaaagggaatgtgggtcgagcgaatcgaaccagtgggcggttttggctggatg

SEQ ID NO: 2610 - DNA, 1766 bp, Glycine max
tagtcactgaaataaagtgtttggcactttgtagcttggaatccacttcaaggaggtatttaaagaaaaatagttgtttcgaatcatctacacaaagatttatgtacatcatcacattaacaaaacagattcaatacaaaagcacaacttagtatttagagtataagaagcactaacaaagctacaaaattacatagatacccgataaaacaattggggccactttcccttttgaatccatttcctttgtttatcaatctttatgacatgcaggactatgatccaaatcttacagaactatgaacggggcaacatccaacccactgtccatcccaaaagcaagccagcaccaactagactcaatcctaaagcaaaggcaacagcatatgttgtaatatcacattttgaattggctttcctttctccttgtttggaattggatattttctgcttcctcttccgtgagcttctaccttcatatgacatccatggaagagccactggaaagagagtagagattggctgatccttgctcttaatctgaatgcaaagagtttccagctgcagaaattgtaaccattgcttataggcaaaaagttgtgaagcctgtttgaaaatgagagtaacaatatcctctttctctgcgtaggctttttttgctgcttcctctgcttcccttgcacgtgtttgagagtgacacaatgcttccattagttgagctttactggggtctccatcaaaattttgttgactctttttgacatcctcatgcttgggggtatgacttgaacatttgtcagaagcaaaatatagaagtccttcattggtagaatgaccatgattcttatgcatcaatcttgaatctaaacttcctggtgtatgacctgtcaaattggaaaagcttctggatttggcttcccagtcataagatgctgtctttattttgtcattattaacatgagcacatgggtgccctctaagatgcttcttctgtggtgggggaagatcacaattttcaatatgattgagagatttctgtgaaacaaatgaagctaattcatctctatctgtagtccgccaccatggctcagccttatcactttcaatccaagaataatctgattccaaggaaaaatcatctgctttcttggaggatccagagcagccaacacaatcaatttccattgtctcatgtttttccatcacatccattaattcatgaaattcttcagaattcttacttaaatcactagctaacaaagtttctacctcatcctctaatgcatttaactgttcatatgttaaacccttttgatacccataattaggttgtgaatgcaaccaccacctacagtctgatgatagattagaaattgacgatttcctgttaaaatgggtaacattaactgtattatgatcagattcatctgctgtactggcaggtccagtatcaactgattttgatgttgcacatgaagattggcaacaagccaacttgggagctctttttgcatcttcttggacaaagcaacgattagcagttctctgccacagagcccttgcttctgctcctgccattacttatctattctttcttcatactttcaagtgagaaattgggagatcacggatcaaggtatgaatgaagagatggaaccaacagaatcagggaaagaagaagaagaaggtgatgacacttgttttttggttttcgctatcattctgctcaattctgtcggggggggggcctacgttgctgaactcga

SEQ ID NO: 2611 - DNA, 1266 bp, Glycine max
ttttttttttttttttttttttttaatacaatataattcttcattgattcaacaaaggataggatcagtaacaagatcacttgtacattcaagttggtgaaaggatagcatcagtacattacaatatctcaacaaagaagaaaaaacaaatagaaacttgatcaggatactacatatataaaaccaaacccatacatacacatacgtacttcccaaaagacaacccaaaaagacataataaattggcttccattgggtcctttcaaaatccatgatctcatattctcatgctattgcttttcatatttttataacaaaacgagtaaaagttgacacaccccgtcaattgttatcctccaagaaaatcttttcacaatcgtaatccgggggacaaggatacttgctgaaatgatgatgatcatgaggagaagacggtttacaaacacgcttggcgaggtaattagcgactcgattagctttcctaggaacataatccaacctcgctagccacttaggatctttaagaagcctatttatgtcttgaacaaccttatactctggacgatgatacttgtacccaagcctactcttcaccatgttcaccgcgggctcactgtctgactccacaaccagtttttccacattgatcatgtcctcccgagccaccttcaggcccgttagaatagcttgtaactctgtataatgggcttgtcgacaaatgttggggtccaatttctgatcaaagcccacgcaccatgttccccattcgtcccttataaccccaccacaacccgcagaggcgggttcttcatgaatacgtgaaccatccacattcagcttcacccaaccactctcaggtttcttccatttcccattgtctgcctcctcagattcttcgtcatcctcagtttcttcgtgctcatcgaatgactcttgttgtcgcttagtgttgccatataaacttctggctatggcgatcattgcggcatataaacatctggctatggcaaccatggcagcaaataaacatctgactatggtgaccaccgcagcagctgctataaccgccgtcacaattccgccgtagtcaatgccatcttcactcattttgatgttgcaaatgaaagagtttggatcgttagtttgctatgtgttgatttgatgaggaagaatttggggtggctttggtggaacttgtacacacaaagactcaggctataatttgtccttcgatgctaagatgggggggggggcctacgtagctga

SEQ ID NO: 2612 - DNA, 1794 bp, Glycine max
  misc_feature (1729)..(1729): n is a, c, g, or t
caccaaaattgataaaataattttctaagaatattaataagaaattatatttttgatgataaatttgtaggtacatgtatataaatcattttatggaatttatatatttatttaattaatgttatttaggttaaaaattcctaataaagtaaaataattccttttttttatagaatattaaaataattgttacgcaacacatatcaaaaatattaaactaattagtttttaaataaaggcatttgcataaataaatatattaattaaagatacaattttgagaagaagaaaaaaaaacttggtttaaaaagagtaacggttttggtggaacttgagtggcgggtaccactatttaatgcgaagaagatccgatccgagaagaaccgaacgtggttttcctttctgctgctggaatacggagagtgagagaatctgttagaaaattgttgaagaagcttttccatttcgagcattttatttttttaaaattattgtttggttttagggtttgagaatcagcactgtgtcgcgatgtctaatcatcaccgttcttcctccaagaacggtcttccacctcaagaactccttgacgatctctgcagccgatttgtgctaaatgtgccaaaggaagatcttcagtcatttgaaaggatcttgtttcttgtggagtacgcacattggttttatgaagataattctgtagaaaataatccatctctgaagtcattaaatctgaaggagttcacttctttacatgatattttcaaggacttcacttcctataaggttcgagttcctgtaactggggcaataattcttgatgaaacatatgaaaggtgcttgctagtgaagggatggaaaggttcaagctggagcttccctcgtggaaaaaagagcaaagacgaagaagatcatgcatgtgccattagagaagtcatggaagaaacaggttttgatgtttcaaaacttctgaacaaggatgaataccttgaagttatttttggacaacagagagttaggctttacattattgctggagtgaaagatgatacagcatttgctcctcttaccaaaaaggaaatcagtgaaatagcatggcaccggcttgatgaacttcaaccagcaagtgatgaagtgatatcgcgtagcatcaccggccttaagctttatatggtggccccttttctagcatcattgaaatcatggatttcaacacaccaacctgctatggctccaaggcccgatttgcctcttaaaggaatttgcgtgtggaaagcaaaacccggttctattggaagtagctccacagtaatggatatccagccaacaaaacctgaacctgattctcacacccctgacctggggcctggcaagagctttaggaatttcagatttgatactgcctcgattttacaagcaatggaaacttccttttcttcttgaaagtccgtcaaccttcctgtaaagtttcctgtaacttaatcgatttcccatatttcatccgtacgccaaagttggtggtattcactctccacgctaattaggttgttgctgtacatcatcttcctcaagttgtctgattgattgagtatgtacattgtgtacaggaagtatttgcacctaaatagttttctctgttattttggtattatctgtaaaactagagtaaaggttcaatgtaaaagttacgctgctccctacatttgcacgcacatattcatactcggtntcaggcggaatgaaactgatttgtttggtaagcctaaataaatctttgctaaaaaaaaaaaaaaa

SEQ ID NO: 2613 - DNA, 1474 bp, Glycine max
gcatcagccagatgataatatcaagaataaaatgccttcctatatttaataacatgggatcaggtctcgtgcctggcgcttgcggcttatcgagtcgttcctgcaatgcctccaatggctcgcgttcaaatccagaaaactcccttgtaggttcattagttgtctttgaaacaggttttgacctgagccaacttggaggagaactactcaacaatccatgcaaaatcaacagcagatgatcaaacaggccctcagcagaagaatctacaaaagaagcttcagcatgtgactctgcctcccttctcaatggagtatagtgcatgggattcaccgttgcatcctcatgcacaacccggctgccaaggagacgaagaagtacagaggcaagcatgtatctcatgctccttgcagaagactccccgtctgagcaaagaataggaagaaatctcatgagtaactgcacacgtaaagatattgatgctcgcaaagcagcaggagaaagtggagaagaatctggtgcaggtgttggtcgtctggctaacccagggctgccacctcttatagttttgcggctatttactttatttgtctgaccttcagtcacaggagtacttgctgttggcttacttggtcctcgagtaactaaagttatttgttgctcaatataatttaattgtttgatcaaatcgcttgcaaaggaattacgagattcatcagagctttgatctatgcaaggaagaattaactcaagaagagccctctcggtcccatgctgctgcttactggttgagctttcagagtcaaacacttgggagaacccttttatggaccttttcgcatccattccctcttcagcaacttctccttcttcaagaggcataggatcaactttcattttatcccccttgagagcaactggatctttacatggggagcaccaaccccagggttctgaaaactgggtcttaacagaaaatcttttagtctctgcaatgttaatcagtcgttgcttaatggtcttccgaccaaagaggacatcttgacctgcaaggaaccatttagcctgtaacaacattgaatcctctagtgacttcccaaaaagatgaaccaactccgagaaaaggggtgcagcatcaggtctaaccagtaacctagtgagaattatttcaataaaattgttctcgttctcagaagcagtgcccttctctgaactaggtgaggacaactgtatagcatcagctaaagacatatcatgtgtcttcagtttttcaatgagggcttgttcatttaaaagcagccttagttcaacccattgccagtgaaacttggcaggctgcagagcatctaacacatctacaagtttatcccgaagtgtagattcactatcagtaaaatcaattttggattcaccatgtccagaattccggcttcccgcacccgtggtataaatagagtgaggcatctcggacgcggg

SEQ ID NO: 2614 - DNA, 945 bp, Glycine max
tttttttttttttttttttttttttttttctttttttttttttttttttcttctttttttttttttttggacaaaattcatgaacttcattttagggtgtctatatacattccacgggttgcagacccataaaaatatttgttagcactgggtgtctgaacctatccattcacaggcaaatgattatatgatctgaatatgaattgaagtcaataatgttttagtaaatatgctggaaaagaatcactctgcttcaagggcagcaatttcatatctgacttcttctagatgttcattaatggccatgacagcatcctggacacctctaatagcttcttttagagcattgtcatactcagcatctgcttcagcttcttcagtcccagaagcttctgtaatctcctgaacatgaacgcactcatgctctgctggctttgtaaatttgcaattctcatggcttaccagacgttcagatgggcgaccggctttctttaacacctgaatggtggcagtcagttgaagtttctgcttttcctgatcttgaacagctctaaggagctgcgctagatcaactcggcagtaatcagggcttctaaacagtgactccatttcaaggacttttttcgagcaattgttaaactctattgtgatttcactgcagagctgcttgtaagccaattcccctccagaggccatgtagtcagaaaacccacttttgagcttagaatatgcttcggccctgcgttgctgaatttggaggaaaccacgaagcaaaagaagaactttggctggatcaagctctgtcgacatcgacatcgacatcgattcctttatcgaaaccttcttctcgaaatcaaaatcttcttcttccatcgctcgctcactcgccaccatgtttttctcgattagtcgtcttctcgcagccgtcggacgcgtgcgccaccc

SEQ ID NO: 2615 - DNA, 1865 bp, Glycine max
ttttttttgaaatacggtagaaattattctaagtatgatactgtaggaattaaactattacgtgcatacatggtgccgtgtatggacttcttccacttcgagttgtgaaagtcttacctggccaccagccatttctcttgtcatcgctgatgcagattactcaccctttcaaacaccatgaaggtggacttgtatattgtacatgggcaactcattaaggtcttttttttttttttttttgcaataaagtttaaaatttcaacttaaatagcaatccccgcggaaaggaccaggaacatagtcacttctctagcgattaccagtgttatgaagagaacgaaaggaaaaagatacaggctttctacaaaaatttcaatctataaagcgatgtggaaataggagttcctctatgaataatgagctaaaaatgcaatttcagttatctacgtcctccattttggtgtacttggcttttgcagctttcaccatagatttaatgctcatctacttcgacagtatctgaaaaacgaaacatcccctaatgactccattgattgatcataaatggctatagcccaagtttagataggagctgacgccatcttggagtttcttcatcaaaaatataggtcaagggtgatataagaactccactgcctccaatcgctctcagttgttgtatagacttgtatagtgccttctgaggcacacatatgactatggcataatagtctgctgttaccttcccatcacgcttgcagaaaacaggacttacagtgggtccctgcaaacccattaatgatggttgactcagtattctctcagccacttcctctgcactgcttcccctcatgtttgcagtaaccgtgaactgcccaatggccctgagatgtgcttccaatctctcaagcatctcatgtgttgtttcaagtactcctttccgttggatcactgatttcctgcttgtaataaagacagcctggctttccaaaacaactccacctttgatttccttcaagttgttttctctcagtgtggttccactacttacaaggtccaagatagcatcggctatccccatcgcaggagctgcctccagtgctccatcagcagttgaaaatgtcacatgcttaagtccattctctttcataaatttaggccccaggtaggtgaaaccagtagcaactcgtagaggcttttcttctgtccattgaggcatttttgcaagctcgtccagtgaatttacattttcaaatattccatattggggaatcgcaagggataaacggcaatcaccatactccagagcctcgtggacaatgataagatcatcattaccctggccatgttcactgaaagtatcgagtcccacaataccaaggtcaagatctccagataacaattttcttactatgtctttgggcctctgaaaccaaacgtcgaggttggatagctgaggaatttcagcaacatactgtcgaggattgacctgcttcactgacaattgacaattcttcacacagaatgcagagtgagtgagagttagtactgtagaagataacagtaacaatggcgaattgaatagaaattggaatgacctggagaagttggagggtgtcagcggacatgcgacctttgctgggcaaaccgagacggatctctttcctatcgggctgcgaaagtgaggcgtagcaacaccaactccgccgggactttacccaaaccgaagtgtgcagaggaagattcatcgtcgtcaacattattgctgctgctttcactcgcacaagagtcgtcgctcacaacaaacacagatttgctaagctacactgtttgtgtttgtccggggggggggcctacgtagctga

SEQ ID NO: 2616 - DNA, 876 bp, Glycine max
  misc_feature (863)..(864): n is a, c, g, or t
  misc_feature (866)..(870): n is a, c, g, or t
ataaccaaaattttattcattaaacacttttcttcgctgggctttctaacgtatcaaacatcattcgaaagatggccaactcattaaggtcacaaataaaataaaatctacttcaaagtttaaaattaaaacaccgaagcaaaatcccagttcaactgaaataacaatccccccggaaaggaccaagaagacagtcacttctctagcgattaccaatgttatgaagagaacgaaaggaagaagatacaggcttgctacaaaaattacaatctaaaagtgcaattttagttatctacgtcctccattttggggtactaggcttttgcagctttcaccatagatttaatgctcatctactttggaagtatctgaaaaacgaaacatccacaaatgactccatagattgatcataaatggctacagcccaagtttagataggagctgacgccatcttggagtttcttcatcaaaaatataggtcaagggtgatataagaactccactgcctccaatcgctctcagttgttgtatagacttgtatagtgccttctgaggcacacatatgactatggcataatagtctgctgttaccttcccatcatgcttgcagaaaacaggacttacagtgggtccctgcaaacccattaatgatggttgactcagtattctctcagccacttcctctgcactgcttcccctcatgtttgcagtaaccgtgaactgcccaatggccctcagatgtgcttccaacctctcaagcatctcatgtgttgtttcaagaactcctttccgttggatcatcgatttcctgcttgcaataaacacagcctggctttccaaaacaactccacctttgatttccnncnnnnngttttc

SEQ ID NO: 2617 - DNA, 987 bp, Glycine max
  misc_feature (60)..(60): n is a, c, g, or t
  misc_feature (172)..(172): n is a, c, g, or t
ctcctttccgttggatcactgatttcctgcttgtaataaagacagcctgaagagcattcnattgtcagagaagacagaaccccacaatgcatgatacagagcaggtttcccatgcctactatttttttatttaattgaaaaaccaacaaatcatgatagtcaaggtcagaanagttaacaattgataacctggctttccaaaacaactccacttttgatttccttcaagttgttttctctcagtgtggtcccactacttacaaggtccaagatagcatcagctatccccatcgcaggagctgcctccagtgctccatcagcagttgaaaatgtgacatgcttaagtccattctctttcataaatttaggccccagataggtgaaaccagtagcaactcgtagaggcttttcttctgtccattgaggcatttttgcaagctcgtccactgaatttacattttcaaatattccatattggggaatcgcaagggataaacggcaatcaccatactcgagagcctcgtggacaatgataagatcttcactaccctggccatgttcactgaaagtatcgagtccaacaataccaaggtcaagatctccagataacaattttcttgtgatgtctttgggcctctgaaaccaaacttcgaggttggatagctgaggaatttcagcaacatactgacgaggattgacctgcttcactgacaattgacaattcttgagaagttcgagggtgtcagcggacatgcgacctttgctgggcaaaccgagacggatctccttcctgtctggctgcgaaagtgaggcgtagcagcaccaactcttccgccgggaattaacccaaaccgaagtgtgcagaggaatattcatagtcgtcaacattattgctgccatgctagtaaaaaatcgccttcaatgctgcgctgaatcgcaaggtcgttcgagccgcgtcccaaacttctgtcgtcttctcgcagccgt

SEQ ID NO: 2618 - DNA, 741 bp, Glycine max
atataaaaaatttgtgaatttcgaataacatttggggaatcaactagactttcaaaatcttgtgattttcgagtacatttggtttatagaaatagtctatatcacttatttatacaatacaaccttgaattgctcaatgcatcaaaataccatgaacacttccgtccaagacaatcaaccttgaacaaacaattcagtctaacagacaactatgtgctttcctaatgcctactacctcaatgctcttgtcagaatagctcaaaattctttagggtttgagggccaaacccaatccaacctttgcactcttctcaatggccttagtgtcaacctccccagaaatggtgaagaaggatttggggcgccactcgtgctggatgagagcgtttgccttgccaaagttgttgacacgagccttcatggtggtcaatggatccaatgcatgctgggtgccaagtgtgagggtgttctcattggttgagaatctgtgagttacctcagcaccaacagccgtgttggtcaagcgattgactgcatggtagtatgaagcattcaaggcatcccctttgtcattcacagtcaatgaggcaaccaaatcgtctttggtgaagttcagtccagcattgaatttagttaactccccaatcttggtgtcaaaagaaacatcagtaccaagggcaagtacattagttcctacaacgaacgccggagaccttgacaattgggtttgctgttaaaccc

SEQ ID NO: 2619 - DNA, 1575 bp, Glycine max
cactctcacattatttctaggatccctttttttcatttcacttcacttcatccatctttcagctatgaacgctctagcagccaccaaccgtaacttccgacgtgcagctcacattctcggtttggacactaagcttgagaatagccttctcattcccttcagggaaatcaaagttgaatgcacgatcccaaaagatgacggaacactagtatcatatgtaggattcagaattcaacatgacaatgctcgtggaccgatgaaaggagggattcgttatcacccggaggttgaccctgatgaagtgaatgctctagctcagctaatgacatggaagacagccgtagcagacattccttatggaggagcaaagggtggaattggctgcaacccgagggacctcagcgtcagcgagttagaacgtctaactcgcgttttcacccaaaagattcatgatctcattggtattcagagagatgttcctgcccctgacatgggaactaattcacagacaatggcttggattcttgatgagtattctaagtttcatggacattcaccagcagttgtgactgggaaacctatagatcttggaggttcattgggaagagaggctgccacaggattgggagtgatttttgcaacagaggctttatttgctgaatacgggaaatcaatttctgatatgacatttgtaatccagggatttggaaacgtgggcacttgggctgctaagtcaatttatgagagagggggtaaggtgatagctgtgagtgacatcagtggtgctattagaaacccaaatggaatcgatatacctgctctgctgaaacacaaggaaggcaatggaaatttgaaggaattctcaggagcagatatcatggatcctgatgaattgcttgttcatgaatgtgatgttctcatcccttgtgccttgggaggagttctcaacaaggaaaatgctgctgatgtgaaagcgaaatttataatagaagctgcaaatcatccaactgaccctgatgctgatgagatattgtctaagaaaggagtcatcatattacccgacatatatgctaatgccggtggagtgactgtgagctactttgagtgggttcagaatattcagggatttatgtgggatgaagagaaagtgaaccgtgagctgaaaaagtatatgactaaagccttccgcaacataaaggcaatgtgtcaaattcataactgtgacttgcgaatgggagccttcagtctcggagtgaaccgtgttgctcgagctacacttctcaggggttgggaagcttaatagaacacatgcatcaccgcttgctaaacaagttttctagcttagtattatgttgttgccctttctccagtatgctcctttttttccgtttgttatttgatcggtttagtttaatttagtttagtaattgagtatcattgttgcctaagaaccacatgtgaagttacaggtggatgtgtttctttatccaagaacccaaattttctgcaattcgatcaaaaaaacaagggcggccgagtagcagtgaccaccgcgggaattattctggaccggta

SEQ ID NO: 2620 - DNA, 834 bp, Glycine max
  misc_feature (748)..(748): n is a, c, g, or t
cggacgcgtgggtttatatactttgtttcattgacgcattactattactctctctgagtcattcactcactcctctctcttctctgtttcattcattgcttctttgttgtcaactatgaacgctcttgcagctaccaaccgcaactttcaacgtgcagctcgcattctcggtttggattccaagcttgagaagagtctcctcatacccttcagagaaatcaaagttgaatgcacgatccccaaggatgatggaactctggtttcctatgtgggattcaggatccaacatgataatgcccgtggtcctatgaagggagggattcgttatcatcctgaggttgaccctgatgaagtgaatgctctagctcagctgatgacctggaagactgctgtagcagacattccctatggaggagcaaagggtgggatcggctgcaacccaagggatctgagtatcagtgagttagaacgtctaactcgggttttcacccaaaagattcatgatctcattggcattcagagggatgttcctgcccctgatatgggaactaatgctcagaccatggcatggattctcgatgagtattcaaagtttcatgggcattcacctgcagttgtgacagggaagcctattgatcttggaggttcgttggggggggaggctgccacaggtctcggagtggtttttgcaactgaggctttatttgctgaatatgggaagtcaatttctgatcacacatttatcatncaggtattccttttccaccatggcaggatatagtatatatgcatattaatcccactttcaacatgtatttgattgtaatcacacta

SEQ ID NO: 2621 - DNA, 969 bp, Glycine max
  misc_feature (9)..(11): n is a, c, g, or t
gggcctatnnnaaaaaaattcaacagtacccatttttggggctcaatcacaaaaacataatattcacgtcagagtccaatgtaacccgattaatcttagccaacttcagttagcctatattggcgaatggaactctgacaatgtccaaataaaatgatcacaaaagcattggagatattacggacgaaaaattctgatagcttttgtaacctgaagccgacaaaagggacaccttgacactgcagaagaacatctacgacacaatacatgaccacaaggaactatagttatatcaacctctgaactcagacaaacccgacaaacccatgctgcttttgctgtatcagcctcttttgttgccttttcaaccctttcctgttccaacacaagagctgcctgagactctttcagattttcttgcaaatttattgttctttgaaatagagcctgcttttccacgtccattttgatcccagcagcagagaggatttcattgacagcctgcaccagttctgcagctgaaactttgccagactgatctctcacaggctgcaccttagcgtagctttctccccttcctgagctctctgggaaatcaacatggggcctgttactgcctaatacagggctttcatgcaccaatgattcttttaggggactgcttgctgatacacttttaaatgaaaatacatgtgatgaaaggaaactttgtgtatcccccggagaaacttcaattttaagtctgtacagagcttgacctgcagatggtcttacatcttcagaaaccttaccgtatttcagtttttcaccatgttgaggccgccaagccactatttcgccagaataaaagggcctcaatggatggaactgcacaagacgtgcatcttgtggcaatatttccttgccaaccagggggggggggcctacgtagctgaccgcttctttcttatcagagcaaagtttcaaaac

SEQ ID NO: 2622 - DNA, 1622 bp, Glycine max
  misc_feature (1207)..(1207): n is a, c, g, or t
  misc_feature (1218)..(1218): n is a, c, g, or t
  misc_feature (1222)..(1222): n is a, c, g, or t
  misc_feature (1233)..(1234): n is a, c, g, or t
  misc_feature (1242)..(1242): n is a, c, g, or t
  misc_feature (1248)..(1248): n is a, c, g, or t
  misc_feature (1255)..(1255): n is a, c, g, or t
  misc_feature (1257)..(1257): n is a, c, g, or t
  misc_feature (1260)..(1262): n is a, c, g, or t
  misc_feature (1264)..(1267): n is a, c, g, or t
  misc_feature (1272)..(1273): n is a, c, g, or t
  misc_feature (1275)..(1275): n is a, c, g, or t
  misc_feature (1278)..(1279): n is a, c, g, or t
  misc_feature (1283)..(1284): n is a, c, g, or t
  misc_feature (1288)..(1289): n is a, c, g, or t
  misc_feature (1291)..(1291): n is a, c, g, or t
  misc_feature (1295)..(1296): n is a, c, g, or t
  misc_feature (1299)..(1308): n is a, c, g, or t
  misc_feature (1359)..(1359): n is a, c, g, or t
  misc_feature (1363)..(1363): n is a, c, g, or t
  misc_feature (1374)..(1374): n is a, c, g, or t
  misc_feature (1376)..(1376): n is a, c, g, or t
  misc_feature (1394)..(1394): n is a, c, g, or t
  misc_feature (1397)..(1398): n is a, c, g, or t
  misc_feature (1404)..(1404): n is a, c, g, or t
  misc_feature (1418)..(1418): n is a, c, g, or t
  misc_feature (1424)..(1424): n is a, c, g, or t
  misc_feature (1445)..(1445): n is a, c, g, or t
  misc_feature (1453)..(1453): n is a, c, g, or t
  misc_feature (1455)..(1455): n is a, c, g, or t
  misc_feature (1457)..(1457): n is a, c, g, or t
  misc_feature (1462)..(1463): n is a, c, g, or t
  misc_feature (1471)..(1473): n is a, c, g, or t
  misc_feature (1483)..(1483): n is a, c, g, or t
  misc_feature (1503)..(1503): n is a, c, g, or t
  misc_feature (1505)..(1505): n is a, c, g, or t
  misc_feature (1512)..(1512): n is a, c, g, or t
  misc_feature (1520)..(1520): n is a, c, g, or t
  misc_feature (1523)..(1523): n is a, c, g, or t
  misc_feature (1526)..(1526): n is a, c, g, or t
  misc_feature (1532)..(1535): n is a, c, g, or t
  misc_feature (1540)..(1540): n is a, c, g, or t
  misc_feature (1549)..(1549): n is a, c, g, or t
  misc_feature (1551)..(1551): n is a, c, g, or t
  misc_feature (1563)..(1571): n is a, c, g, or t
  misc_feature (1578)..(1579): n is a, c, g, or t
  misc_feature (1581)..(1581): n is a, c, g, or t
  misc_feature (1585)..(1585): n is a, c, g, or t
  misc_feature (1594)..(1594): n is a, c, g, or t
  misc_feature (1602)..(1602): n is a, c, g, or t
  misc_feature (1604)..(1604): n is a, c, g, or t
  misc_feature (1614)..(1614): n is a, c, g, or t
  misc_feature (1617)..(1617): n is a, c, g, or t
  misc_feature (1621)..(1622): n is a, c, g, or t
gggaaaaatgtcgttgatatcctaggcaaatagtaaaccgaaagaaatattcagggaaatcaggaaatgcctatcacctaggtttgaaattaaatatcaaggaattcacataagctaacaggtattttcactgctttgaatttgttctgataggttccttgacaaagctgcaatcctagatgagaactgctcaaaggaggaaaacagggaaaacccttggatagtttccacagtgactcaggttgaggaggttaaaatggtaatcaagctccttcctatttggtctacatgtatcctcttctggacaatctattctcaaatgaacaccttcaccattgagcaagctacattcatgaatcgaaaagttgggtctctagttgtcccagcaggatctctatcagcttttctcatcattaccattctcctctttacttccctaaatgagaaactcactgtgcccttagctcggaaactgacccacaatgcccaagggctcacaagtctccagagggttggaattggactcgttttctccagtgttgccatggcagttgctgcaattgttgagaaagaaaggagggcgaatgcagtaaaaaataataccataagcgccttttggctggtccctcaattttttctggtgggtgctggggaagcatttgcctatgttggacaactagaatttttcattagggaggcaccagagagaatgaaatctatgagcactggacttttcctatctacactatcaatgggttattttgtcagtagcttattggtggcaattgtggacaaagcaagtaagaaaagatggctaaggagcaatctgaacaagggcaggttagattacttctattggttgctcgcagtgctaggactactgaatttcatactttttcttgtattagcaatgaggcatcagtacaaagttcagcacaacataaagcctaatgacgatgcagaaaaagagcttgtgagtgcaaatgatgtgaaagttggagttgatggaaaggaagaagcataagatatagtcttaaaatctcattttgtgtggcccaatatatagtgtgtaagaacaaaacattgtgctccaaatttgttaatttttgggtgttttgtcgacctcatttaacgaggacaattgtaatgtattattaagtatttacagatataaaaaaggcaaacgacagtgtgagttgtttccaantgagaaaaaanaaanaaaaaaaaaannaaaataanttaatnaaaaaananaannnannnntttanncnatnngatnntttnntntttnnttnnnnnnnnnnttattttcccgccccggggacccttttttaagcgccccccggggggccccntttntccttaagggntnttcacctggggaacaggntannttcctnggaaatgttccctncattcnaacttcaccggactaaggganccgggccnangnccacnnttatgggnnnccgccttcangggacctggccctttttttncncccggangggtggtngcntcntccctnnnngcggnggggggggntnttggttttctcnnnnnnnnntaattannanccgnaggttgttnccaaaaantnaagaaacccnccncccnn

SEQ ID NO: 2623 - DNA, 796 bp, Glycine max
ttctcatcaagtggacctataacaaactagttcttatcaaacttgtccttgccatgacatagctaattaactttacatttgcacaccactttctatattttgcaactcttggagctgaaacactcacgcacttcatcaaaactctcctcagttatccctccaacagaagataaaacatggttctagttgcaagtcatggcgaggaggaaaagggggcagaaggcattgctgctgttgattttcgaggtcaccctgtggacaagacaaaaactggaggatggctagcagcagggctcatcttaggtactgaactggcagaaagaatatgtgtaatgggcataagcatgaacttagtgacctacttggttggagttttgaatctcccttcagctgattctgccaccatagttaccaatgtcatgggaactctcaacctgcttggccttcttggtggcttcatagctgatgccaaacttggcagatacgtaactgttgccatatctgcaatcatagctgctttgggggtgtgtttgttaactgtggctacaaccattcctagcatgaggcctcctgtgtgcagcagtgtcagaaaacaacaccatgaatgcattcaggccagtggcaaacaattggctttgctatttgcggcactttacacagtagcagtgggtggtggaggaatcaaatccaatgtctcaggttttggatcagatcagtttgatacatcagaccccaaggaggaaagaaggattggtgtttttcttcacaggttctacttcttcatcagcataaggtc

SEQ ID NO: 2624 - DNA, 1484 bp, Glycine max
  misc_feature (1457)..(1457): n is a, c, g, or t
  misc_feature (1464)..(1464): n is a, c, g, or t
ttttttttttttttttttccaaaattaagttgataatataatgttgggttgggcaagagatcaagcatcatgcaaagtctacgcaatttaaaaaaagcataacacctttacaaagcgaatcatcattcagtaacaattgatgcatacatgaagagaaaaccaacatgagaaaactccattatgttagttaatttccagtacataattctttaacatgttgagtcatggaaaagcaaaaaccatcatctgaccttcagccgaatgttgaaataaggaaggatttataaatgctcatgaacttggccacaaatgcttcaatgtgaaagatcgccttctgtccaagacgcatcctatattcataatatgcagcccaatgacatacttcatgctttagttctgcatccagtttcctcaatagctcataaagaagcctcttcaaaattatctctggaggaatgcaattgattagcagctcatagagctttcctcgaacttgaaacaacctttttgggctctgttccttcattatgtcagatgcaatttcagaaatatactcttcccagtccattggaggaattgtttgtttgttagtgaaaggatactgttggacacgacaagtctcaaatgacaatatggccctccttaaatttcgatttgatttctccacaatgcgagcagcaaaaccaggaggaagttgcagcccttccttcttaccaatgaattctaaaacttcaacaatctgttcttcacttggtgcatttattcgcacattgagacatcgagagcggattgcttctgtaactctagaagaactattgcaacatagaattaatctgcaataagcactgtatttctccatggttctgcggagagaatgttgggcttctctagagagtttgtcaacgtcattgagcacaagtactttaaatcctttcttccccttagtatcaattggtctgttcttagccatttctttgattacttcctgaacaatgtatctgtcctgaaagcctgcatcactcggactcatttcaatgtgattggcacttgataatgttgtcagctctaaatcaagagatctactcccagcatccactttccaggtcctattatccaccttcaccttttcggcaccaggtccgaacatttggcggagaagagccatgattagggttttcttgccggagccagatgggccatagaagagtaaatgggggcaatcctgttccgttaccaatttcttgagattgcgagcgatgtcggtgtggaccataacctggtcgagggttttgggacgatatttgtccacccacaacatcttctgcctcttttgtttgtttctgtttcttcaactgatatcgctgctgagtgctgagaagtgagaaaatacacctctgcagtcgccgtggggggtcttctcgcagccgtctcgtaccctagtctggttttctttaganggggggnggcctacgtagctgactcga

SEQ ID NO: 2625 - DNA, 647 bp, Glycine max
tttgaaagctggaaagaaccccatgcattgtgagaacacataaaattttgagaatattacattgactgcaaacacaactcaaaatccattagtgcaaattaacattcgtcgcttcattctaataacgtgagccagattttgatgtaactggttcacaacacaaaaggcataaatggctcaatcacttgacaccaggcaccagcactagttcacaaaatactgtctacgcatggaacaaaagacacttaaaatttagagcttctacatcactcaatactttggaggtggctgctgggttggtaataatccaaaacgcttcttcagaagaactctctgtcttgaatatttatcatcgggtgaaaaccgggctggatgagcagattgtgtaggtagccctaccggcgactctttcttagtggtgtagactttgtcgccgttatcgtttatgtaaaactgaagatacatggtcactgatctttgatcgaaggaaagaacagcaatagaggtagaaacctgcaatggaggcgagaaaaagggtttaaggttttcggatcctctggtctatacaaagtgttttgtttcaacgagaatgggcctgtcctcttcgtgttggttttgcatcagtttcctttatattaatgtatatt

SEQ ID NO: 2626 - DNA, 2187 bp, Glycine max
tcgagtcagctacgtaggccccccccccccactagttcgtttcccactcacaccgacaacacaagctacaccaccggcactactagcatcatcctccacaatttgacgcgtccttttgcttgctccgcacgtcacatcgcgttttctcagattcactctcgccgtcgcagatctcgccgcagatctgaacaacaatggacggttacgacggcaccgtcaggctcggtgccatcaacctcaagcacgatcgcgccgccgatttcgactccgccaccgccgcccccgacgtctccgtctcctctccggtcacgcgccagaaagccgctgccgccaaacaattcatcgagaatcactataaaaactatctccaaggattgcaggatcgcaaagacagacgcagagcacttcagaggaaagtgcaagaatctcaggtatcggctgaggagcaggaggaaatgatgaggaacttggagcgccgagaaactgagtacatgaggcttcagagacgtaaaattggaatcgatgactttgagcagttaactgtaattgggaaaggtgctttcggtgaggtgaggttatgtcgtgctaaagatacaggagagatttttgccatgaagaaattgaagaagtcggagatgcttagtcgcggacaggtggaacatgttcgatctgagaggaacttgctggcagaggttgatagcagatgcatagtcaaacttcattattcattccaagattctgatttcctctatctcatcatggaatatttacctggtggtgacattatgacattgttaatgagggaagatattctttctgaagatgttgctcgcttctacattgctgaaagcattcttgctattcactcaatacatcaacacaactatgtacatagggatattaaaccagataacctgatactagataaaaatggccatttgaagctttcagactttggcttatgtaagcctcttgatgataagtattcatcaattttattggaaaatgatgatcttaccagtcaagaatccactagtgaaactgaaggatattctgtctctccttggttgatgccaaaggaacaattacagcagtggaaacgtaatcgacgtgcattggcgtattcaactgttggaactcttgattacatggcacctgaagttttgctcaagaagggctatggaatagaatgtgattggtggtctcttggggcgatcatgtatgagatgcttattgggtatcctccattttgttccgacgatccaaggatggcctgccgtaagattgttaactggaaaacgtgcctgaaattcccggacgaacccaagatatcagctgaagcaaaggatctgatctgtcgcttactatgtgatgttgactcaagactaggaaccagaggaatcgaagaaataaaggctcatccatggttcaagggtgttcagtgggacatgctttatgaatcagaagcagcatataaacctacggtcactggggacttggatactcaaaattttgagaagtttcctgaagtcgatggcccaccatctgtaacagcaactgttggaccttggcggaaaatgctgacatccaaagataacaatttcataggatatacttttaagaagtcagacatccttaaatcacttgaaagttcagatgcagatatcagagtaaacggatcatcgaaaaccccttccttgattaccttgttaggtcggattgatttgcaagacaccatcataccagaaagtgagcagaagccagaagcttgaatcaaactaactttttttacatttactcgattttgtattctattctttatgcttggcgtttgagattgtagatgacaatgttagcaagcatattcatagttcaattacagggaaagactgggcactggagtaaggtcattgatcatggtgtggttaataccatgcagctctgttctactgctcaaaagatgatactatccttgacataagtgagacctgtgctgttcatatacagattcatttcaatctccagaaatccaatcatttatgctgttaagtaatgaagaaattttgtctattatttttgtatacagatattttgatcatttttttgttgttgcaacgaatagtgtttacatatatgcgtggtcacaccctacacatcctactaagtactaatatatggtttgggggg

SEQ ID NO: 2627 - DNA, 839 bp, Glycine max
gcttttttttttttttggttaaacggggcaaaggccagaacatagataatatatattataaaaatgaatcaaatcatattttttcctacaaaaaataacaccacagacaatcacctcactgtgacagtctcatacaccaagttaaacaacactaacaccaattcacataaaaaaaacccacatagcaatcattcccatagccaccatcaaaattcccccattcaaagcattggcagtgctagtgggagcaacagcaggaccttcaaactcagcagaagcagaaggagctggtgaaggtgcagcaaaaccagtgaaccttgttcctctccttggagtcaaaaccaccacaacaagcttctgacccttctcacagtgaccctttgcaccactgatgaagtagaatggccctggatgctcaagctgaacctttgtggtatcatcattgtactcctttatggggtttgagatgctgcaattcacatagttctctttgctcacttgcaacactgagtcttttccaccatcatatttccaaacaagatagtctccaacttggaaacgagacttttctgcccattggttgagtgaatctgattcagaggctgaaaccttccatgcatcagtcttacctccaaccaaaatttccttagctacagagaagccaaagagaagaaaaaggatccaaagagctgaagcttttgaataaccagccataatttcttataattttcctttgtgtctcagagtagagagagaggaagagaataagaaaaaatgacactgaagtgagtgagtgaattgggggggggcgtctgcgcccccccgtccggacgcgtggg

SEQ ID NO: 2628 - DNA, 887 bp, Glycine max
ttttttttttttttttttttttgcagtcaacaaaagatcaattaaactgtacattctttcttataataacaaaagcagtgccacaaaatagtgtacttaaacaaaacatatatatagtttgattagggtagatagatgactagattgcattgagatttggcacagctgaagaaggttctactacttgaagcagaacatcatcaaactttagttaagcgcaaatattccttctttgatgggagtttcacactctcgaacccttgagggaacatttccttggcttgctcattggtgacatcaggggtaatgacaacagggtcccctggcttccagtttgctggggtagcaaccttgaactttgaggccttctgcaatgactctatcaccctcagcacttcatccatgttcctcccagtagtggcagggtacagaaaactcagcttgatcttcaaatctgggccaacaatatgaagagcccttgagggtaggttgccagtggagtctttctcatcagggtcaaccatgttgagttgcttgatgatttctctcttcggatcagcaattattggataattcactttcgcacctggagtgtaggcttcaatgtctttgatccactcattgtgggattgcacatcatcacaagataaacctaagagcttcactcctcgttgataaaactccttagcatactgagccatcttaccaagctcagtggtacaaaccggggtgaaatcacctgggtgagagaaaaggatggtccagccatcagcacagaactgatgaagcttgattttgccttggttagtttcaacttgaagatcaggaatagtgtctccgatggtaagacctggcattttggatgcagagaagttacttgtgtcata

SEQ ID NO: 2629 - DNA, 979 bp, Glycine max
acttttttttttttttttgcaaacacaagaaagattgtattctatttagcatgttagcataatcacaatatgctcgtacaagtaagaatttttactgcaccaaacattaacaaaccctagaagaacatcaaaacaaccagaactatacaacaatttaaaggagaaaaataaggcgcgcgcacacacaactttgccatcttaatctatgataatttgtcactatgatattccaccaccactaataatggaggggaaaagaatactatctaagaacaccaattagaagatgctacaagcaccctcatagcacatactgttaaactggtatcacgtcattcttggatgcatcttcacatcttaaaactataccctcaagactagatggaaaaatgcatttggtccattggcaaccagtagtgattggatctggcggaggaacaatcataagcacattctcattcctctgaacaactcccattacacttactgtgcttccttctttgatgtacccttcttccagccgcatgatgcggtcatcacttgaaagattcctctctcccaaccaccggagaaactctggtgaaagctcttctttggttggatttacattgatgagaactgagtcatcaacataaggggtcactcttgctccatgcccagtcttaaccagtgcccttaaaccagactggaaatctgagatgtagaagtcaaccacgcgcctttccagcagtctaaggccccaagtaagccgacggtgtgcaggattggcagcttttgagtcccatcctcgatactcatataaacttgttgacgtatatacacatctgggaactttctggaaagatgactcaagaggcacattaccgcaggtaacaaccccagagaccttcacgaattgcccatttttgcagttctaagctcagagtctggataatgagcaacgaagcccataatagatcttcttccccaataagtattc

SEQ ID NO: 2630 - DNA, 1680 bp, Glycine max
gacaaaattactgtctcatcaatgtttaaacaaacatgttcttaatagttcttaaaaactgcgtttgacaattgttggtattctttttttattttttttttttttaccaaaaataagttagctactccaccagttacaccattgaagatgcttagttttctacaagtaattagccaacaaaagggcatcaaaataataccccttgcagaaaatttttgtttcttgaattcagtgttgtgccatgtattacaataaacagtcctcatgaaacaaacgaattcaagattttggcctttcctcagaaaatctaggaagttggacaagtgagtttacacgagtgaccccttccaaacctgaccagttttgatcatcagctgatgatgttgcatcttcaacaacatcaacagatagtgctccatttgtctcattttcctctgaggatctcacagtgaagttcctttgcaatgatggctcagatttttgtccatcatctgactcaatggggttacctgaatggttgctttggatggttgcagaagaaaagccttgttcctcgtaatcagattccgagtccattttcccatccaaaaataagcatactacagcacagtcatccatctttgatgtagggtatttgtgtttccactccctagcagcagaatctaccagaatccttgccgctgatgatcgcgttggcgctgaagatactatctcaaccacctcctcgttgcttaaaacatcccacaccccatctgaggcaagaacaatgaactgatctctgtctgtaagctgccggtgagaaaattcaggtatagaaatcacaccatactccttcaagcagaaatcaccaaatgctctagccatggctaatcccggcgcatcatcaaaaggcaaccacaccctaggcacttcaggctcatcttgcaaagcaaataccctacctctgcacttcttaattctctctgcttcccttggcaaatcaggctttaaatcaacagtcaactgaatagccaccatggagtcattgctatccttggatcccatgattgctcgagaatccccgatatagcccatgaacagatttgaaccctgcttcactatagtcacagcagtgctcccactacagaagcaatccagattcggatgagacctgagctctttgtccatagccttgtatgccttcatgaaagcttccctccatgttgagttcagtttatcctccgcagagcaatccttctcagattctccactatcaggttttacattccctttgaagcaagttttacctgacccatttcgcttagattcattagaatgcaaagatgaaattagcttaattggcaaggcatccctcactttgcgcgcaactagatgaccatgtggaccatggccatcaaagacaccacaaaagatagtatcttcagacatgaaatcctcccacacaatcattgcatcctgattaatacccttgcggccctgctgtgtaaatatgcatgaactgcggctctttccattggtgaaaattctgttaggtaaggatggtaaatggtggagagaaataacatgatcggggggggggcgccgccttctctgctgcccacagcatccagtttctaagcaagatggagacaccatgtctccattgctcttgctgctacaagtaccggacgcgtgggtcgt

SEQ ID NO: 2631 - DNA, 2126 bp, Glycine max
  misc_feature (30)..(30): n is a, c, g, or t
  misc_feature (2032)..(2032): n is a, c, g, or t
  misc_feature (2046)..(2046): n is a, c, g, or t
  misc_feature (2049)..(2049): n is a, c, g, or t
  misc_feature (2051)..(2051): n is a, c, g, or t
  misc_feature (2053)..(2054): n is a, c, g, or t
  misc_feature (2064)..(2064): n is a, c, g, or t
  misc_feature (2070)..(2070): n is a, c, g, or t
  misc_feature (2077)..(2077): n is a, c, g, or t
  misc_feature (2102)..(2102): n is a, c, g, or t
  misc_feature (2110)..(2110): n is a, c, g, or t
  misc_feature (2122)..(2122): n is a, c, g, or t
ccacgcgtccgagaaaaccgatggcgtggncttacctggctccttacataatcggcgccggtggcccccccccccaaaaccatcacccagaaaaattaaaccaaccatactacaccagacactcctcctaaccttcaataattctcttctcacccttataaaaagaaactcattttaactcagactttgcatttcaccttatctatctatcttttctaacatggctgctgggactggactctttgcagagattttggatggagatgtgtacaagtactatgctgatggagaatggaagaaatctgcttctgggaaaagtgttgccatcatcaaccccactaccagaaagactcaatacaaagttcaagcttgttcacaagaggaggttaacaaggtcatggacttggcaaaatctgcccaaaagttatgggcaaagaccccactatggaaacgtgctgaacttcttcacaaggcagctgctatccttaaagagcacaaagcaccaattgcagagtgcctggtgaaagaaatagcaaagccagccaaagatgctgttacagaggttgtaagatctggggatctggtttcttatactgctgaagaaggtgtaaggattctgggagagggaaagttcttggtgtcggatagctttcctggaaatgaaaggacgaaatattgcctcacatccaagattccacttggagtgattttagccattccaccttttaactatcccgtcaatcttgctgtttccaaaattgctcctgcgctgattgctggaaactccattgtgctcaagcctccaactcagggagctgtttctgctcttcatatggttcactgctttcacttggctggttttcccaaaggcctaatcaactgtgtcactggcaaaggctcagaaattggtgacttccttacaatgcatccaggagtgaactgtataagctttactggtggtgatactggcattgcaatttcaaagaaggcaggcatgattcctctgcaaatggagttgggaggaaaagatgcctgcattgtacttgaagatgctgacctggatttggttgctgcaaacattataaagggaggtttttcatacagtggtcagagatgcactgctgttaaggttgtcctggtaatggagtccgctgccgatgctttggttgagaaagtgaaggctaaggtggcaaaactaactgttggaccaccagaggatgactgtgatatcaccccggttgtgtcagaatcatccgccaatttcattgaaggcctggtcttggatgctaaggagaaaggagcaacattctgccaggagtacaaaagagaaggcaatcttatttggcctttgctactggacaatgttaggccagacatgagaatcgcatgggaagagccatttggaccagttttaccagtaattaggatcaattcagttgaagaaggaatccatcattgcaatgctagcaactttggacttcagggatgtgtcttcacaaaggatgtcaacaaagcaataatgatcagtgatgcaatggaaacgggaacagttcagataaattccgccccggctcgtgggccagatcattttccctttcagggtataaaggacagtggcattggatctcaagggattaccaacagcataaacatgatgaccaaggtcaaaacgactgtgatcaacttacccagcccttcctatactatgggctagtagtgtaatagttatacacatacatgcatggaggaaaatcaatttatatcatgttccataaatcatagtgaacgttcaaaacgtatgagttcaacattgccttctcttttgcagcagggtatcatagagatgaataacgagtttgattgatctgtcacgtagctacttcacgtgaccacttgtcgtactcatatttagcatgatatgaatctgaatttttatcttgtgccttatcattaagtaaggaatataattgtgttccagttaaattgaatgtcaaatcaatgaaaggagggggaaaacattgtcttcaaaaangatggcaacaaagnggngntnntcagtgatgnaatcgnaacgggncagttcagatcctttcggcccggtncgggggcnagatcttccccntcgc

SEQ ID NO: 2632 - DNA, 2507 bp, Glycine max
attaaaaaccagcaatattataatcaagcctaagaacttttgaaaaaaataatttttccagacatgcactcgagtgatttagtacatttgtgaaacacaagattcgagtcataacttgaaccaaagggttcaagggtattaacgaccatttaggagtgcatgcaatccattttttcacataggtatagataagcatggatataaaattagcgatagttaagatgagatccttagtctagacaataatagactgcaccaaaattccaaccgtcagaagtatcgctaatctctttgcaactataaaacaaggtcaaaatgagagccatattatcatcatctcgagcagcatagtcacgtatcatatctcatcaatcaagtccataagatcatcaatctcccgtctcaaagcagtaattttcagctgttgtgaagcaatccgattctcaatttcccttcctgctgacttcttctcatagccgtctacaactgtagagtgttttactagaagtttatcctgcaactctctctccttggtaacaagttcctccaccttcggtaatatttgagcagcttgcggagaagattgcaaaattgccaatggttgcttcaactctttagagagctctttcagtaagctatcgactgattttcgagttgctttacaggcttgaatgtctcctgtccttgaaagatcgtgtaatgacatttctagcttgtcatgtgcggttaagcaacggctaatgataccatggacctgctgaatagttgcttgcacctgcatagcaaaacacaagtattatattcaattacaaataccgaactctgtacataatacaacaagttgattacctcgtccaactggagctttgccaaataagatgcagaagatttggagattgatatatctgcatgcgtgtagacaatgcaagcaagaaacagaaagaaaaagccagaaatcaacatcaaaggctccctgagcatagaaagactgttgaacttatagtagacctgaaaatgctcattatgctcaggaacaacattgttcttctccagcacaacaacaggtctaccaacaatatccaagtgggaaagctttgtctcctccgattgtttcacaggaaatggaacagacactgaaatatctttagaaccctctggcaaaacaaccttcacaaatagtgtgtcaatgaccaactcattaataggggcaccaaaagagatgttaaggaagcgctttccatccgatccaaataagaagtccccaagtggcaagccatatccaatggtaaaggcagttttccagccaccaaacatagggtacctaggttcaatctccagttctgtcttttttgagtcaccccataaactagaagtggaaatgttgccaatttcatccctgtagtacacagaatgagctcttggaggtagcttggcaacaagacgcctaaaggctgatgcacctcttaaaaatggcctggtctgatagtcaagcctagaaaattctcctttgctctgagaaccagcatggataatatcgtaatgctctgtgatctgtacattgccccaatgggaaatttcgatctctcgaaccaactctttagcaacagcaaagggttggttattctcaaagtgaataactattggcaggtatgaaaatggaggaagattttcatatggaccatattttaattcagatccctgaagttttgcattttctagttttgtataggactctatccttgcatcaggcaatttaacagtgagtgattggaccttgactgcatatggggagagatagtgtgcactttcttgaaacagtagaagctggatgtcagcctggttgattttctctggaaatggttgcaatgagtgggtaaaaacagccaagacatccaacgtcagactatctcccttcccaagccccttaggtaaagacacggaataaattgtcaaggaaggtggcacatctttaggccggacaacttcgacaggtaaaccaacaccagaagatggttttgattttcccttcccatcaccaagtgttgccttcaagtatgccaagttacttgcctggttctcaggaaaggacagcaaaatctcagacacaacatcagatcccgtattctgcacctttagtgaagtagtgatgcgcacaatctgtgaagtcagatcaatgcgacggtcaaccttggcgaggaccagatccgaagcagagagaacgggcgaggacagaaaggtaaatgcaaagagaatcggaaacagaatgaagctcatgattgttttctttctcttcttcgccaggcactgctgtttcttgttcaactccccttccctgttagcgagtaatttaccacttccaactagagtatgtccacccttgataaaattaacaatgcaagtaaaataataaattcaagttattcttcgtctacaaaaaatcaccagttccacgaaatcattttttaatacagtcacaagaaatttaacctaaaaaaaaatcaacaaat

SEQ ID NO: 2633 - DNA, 1122 bp, Glycine max
gaaacaacgggtttaagcgtattatcgaccacttaagagtgcatgcaatccatgttttcacataggtatagataagcatggatattaaattagcgatctttatgctaaatgttaccataatactaaagacaatgaactgcaccaaaattccaaccgtcagaagtatcactaatctctttgcaattataaaaccgcaacaaactcctgacctaaataaaataaaacaaggacaaaatgggagcacattatcatctcgagcagcatagtcacctatcatatctcatcaatcaagtccataagatcatcaatctcccgtctcaaagcagtaattttctgctgttgtgaagcaatccgattctcaatttcccttcctgctttcttctcataggcgtctacaattgtagagtgttttactagaagtttatcctgcaactctctctccttagtaacaagttcctccaccttgggtaatatttgagcagcttgcggagaagattgcaaaattgccaatggttgcttcaactctttagagagctctttcaacgagctatcaactgattttcgagttgctttacaggcttgagtgtctcctgtcctggaaagatcgtgtaatgacgcttctagcttgtcatgtgcagttaagcagcggccaatgataccatggacctgctgaatagttgcttgcacctcgtcccactggagctttgccaaataagatgcagaagatttggagattgatatatctgcatgcgtgtagacaatgcacgcaacaaacagaaataaaaagccagaaatcaacatcaaaggctccctgagcatagaaagactgttgaacttatagtagacctgaaaatgctcattatgctcaggtacaacattgttcttctccagcacaacaacagcgctcccgtcggtcgccaagtgggaaagctttgtctcctgcgattgtttcacaggaaatggaacagatactgaaatatctttagaaccctctggcaaaacaaccttcacaaagagtgtgtcaatgaccaactcactaataggggcaccaaaagagatattaaggaagcgctttccatccgatccaaataagaagtctcgaagtggcaagcccacgcgtcc

SEQ ID NO: 2634 - DNA, 868 bp, Glycine max
ttttttttttttttttgcaaagaaactagaaccctcaaattcgtaactggaaaacttaacagttaatcctgcgaagtattatcaaagcgtaaacccatacacatataacgaaataagagtcattacataaaccctaatagaagagataaagacatattaatctagtagtaagtagtaactaactaaaactatatatagccttgataatattaagtattgggtactatgaagtagtgcatgcagtggtttaatacagaggtggacaaacaaaaccaggaggagcagtcttcccgcaagtgaccaagagttgaagtgcaagaggaagaaagatattgaggttaagaagcttagccctaataacagtgcaaagacaaattgcagcttcaagatcaagcaacccctgtataacgggacagcacacgttctcaactgggttccctattcccacatgcaccaaccctccaagcacatccaagcaaagccccaattttagggcatcaattgggcaagtcctttgaggaaaaggactgccaccgtgcggcggcgggtacggtggtgagattggtggtgggtatatcaccaccggcggcggtaccaccggagggttgattatgatcggcggcagcggaggggacactttcggccggcctccgccgtgatgcggcgggtgtttgtggtgacgtggcggagtgcatggcccacatgcatatattggtggcaaaagatttaacattattattttcaagatgaagaacattgctttagcctttgattttggagacatggtgacttagctaaggtttctaaattcttatttattttccgtgtatgagtttgatattctgtcgtcttcttgccattcggacgc

SEQ ID NO: 2635 - DNA, 1220 bp, Glycine max
  misc_feature (25)..(25): n is a, c, g, or t
  misc_feature (212)..(225): n is a, c, g, or t
tcttaggatgttccttgaaagttancaaagagtgtatacaactatgaacctagggaggtagtttctgatgcatgcccgacttaattaggaattatattggctacataacttattcagcacaactactacgcttgcgtttgaatttattgaatagaacttaattgcttttcaactggggcctattctgacttcagtattgagaacttttgtgnnnnnnnnnnnnnnaatttaaaatggcgacctcgtgcacaaaattctgaataatataacatacaccttcagcagaactctttccgagaccaaactacatgactaaacaacttaatttacaattacatagcaggttaaaataaatggcgccagaatagcaataacggtaagcaccatttgtctttgatttgtaaaacaaaaaatgcttgaggataaaatttagttggcataacaatagacagagacttgatgataccaaatcaagcaagttgttaaaccaatccgaacacctaaatttaccatctttaagggaagagacaggaacaaagatgttctccatttcacatatgcaatcgaaagattataactcataaccacttgaatcaatttttattgttctgtcgacataataatcctatgccagtttctcaaaacttgtataccgaagaaacaattgcaattgttattcaatctggatctcttgtggagcttcctcagttgttgactcttctgtattggcttcttcttcactaatacctgcagcttccacagtcctagtaacccattccttgaggggctcctcattcaaatcaagtctcaaaatacccgcaaacattccacccaagaatgccactggttccttgagagcttctttgacgatggggtcttgttcaggattaaagaaaaaggctttaaccccattcctatttccattccttttcccagtgccaaagatgcttctgctcattcctcctccaattatggttggcccatgtgaaaataacctaaattcttgcttcgatttcaaccaccgagtagatggcagtggcagcagaggagaattaacaaggagagtcatagctatgcttgcttggtagcaacagggggcaattctctccacaattaggggaaaataatcttcacaaatgccaatgttctactagattttattttaaaacaagagataggaactgagtccgagataaagctgtgtgtgatcgaaaagaaag

SEQ ID NO: 2636 - DNA, 2029 bp, Glycine max
ctaacacccgggttttcaattgggggaaacatttcgcacggagctgaaatggtacagacaaacaagtaccttgggcaatttggatttcctccgcagccttcttttggtgatcctatgtacatgcactatcatcagctaccttttgtggagggatatggtatttcttgtcattttgatccactggcacctagagcccgtggtgttagccaaattagtccttatgattcgcaaaaaaggcccagtactggtgcctatttggatgataaaaatctgcctcgtcggcccccccccccccatatgacctctagaagaggtggagtatcaattcctagttattttggacacatgccaaacatgggttttgtaatgcagcatccgagttcaccacttcctagtccagttttatctggatacccagaaggaagtccaggccttccaggagttaggaatgaaataaatctttccccggcttctggaagaaatggaggcataatatctggatggcaagttcagagatcttttgacagtgctcatgaccccaaaattgttaattttcttgaagacttaaaatctggcaaaagtcgaagatttgaactatctgatattattggacatattgttgaatttagctctgatcagcatgggagtcgatttatacagcagaagttggaaagttgtagtgtcgaagagaagacattagtgtttaaagaggttcttccacatgcttctaaattaatgactgatgtttttggtaactacgtaatacagaagttttttgagtatggaagcccagagcagaggagagaacttgcagatcgacttgttggccagatactgcctttgagtttgcagatgtatggctgtcgtgtaatccaaaaggcacttgaggttattgagcttgaacagaaagctcagcttgttcatgagctagatggaaatgttatgagatgtgttcgtgatcaaaatggtaaccatgttattcaaaagtgcattgaatctattccaaccaaaaagattagctttatactatctgcatttcgtggtcaagttgctactctatcgatgcatccttatggatgccgagtcatgcagagagttctagaacattgcacagacgagagtcaatgccagtttattgtagatgaaatcttggagtcagtctgtgctcttgctcaggatcagtatggtaattatgttacgcagcatgtcttggagagaggaaagcctcaagaaaggagtcaaattatcaacaagttgtcaggacatattgttcaattaagccagcataagtttgcttcaaatgttgtagaaaaatgtttggagtatggtgataccaccgaacgggagttgctagttgcagagatatttgggcatgatgaaaaatgtgataatttattgacaatgatgaaagatcaatttgcgaattatgtggtccagaaggtcattgatatctgttctgaaaatcaacgagcaatgttgctttctcacgtaagaattcatgctcatgctttgaagaaatacacttatggaaaacacattgtggctcggttggaacatcaatttggagagaatcaaacacccagctcatgatgaaaatagagagacgaagccatgggtctccagcaatgctgctgtgacgtgcaaaccccgcagcatcaacatatgttctgttgatcacagaaaatagctgagacatcgatagcttccagttgtttttactcctgacttcatacctgcaccgtgatagtttccacattgatggcttcaggggttatactttgaaactcaatgtaattatgtcattcaaataattgtttgaaaaagttatttgaataattatttggaaggaaacccttcccttcctgatgtataatttactgggtcttccgtgcttagtgtgtggttttcttggagatacaagtattcaagaattcttaaactcaactagtccttggcaacttaaaacctggtccttgtcatgcatgttttaattgggaatgattacattgaatgttggttatacctctcc

SEQ ID NO: 2637 - DNA, 1348 bp, Glycine max
atggtagatctaatgtctgattttcggacagaaaatggtaaagaactcctcttttttttttttttttaacaggaaaccaacaaacgataattcacaaaatcctgcatttacaagctagtcattacataaaaacgattttaatttaaggtaatcattttctcataaaaaataaatttgtaaaatatactgcgcactacactatcacaggtcctcatgcatggtccaagccaatcatcacattgctttccaaatgggaggatataagccgtgagacaatcttcacgagaaaatgcagcttagtttgagtgaagactcttttgtttaactctataaataaatcatttaaaatccactaccaccagcaacgcaccatgctagatcaaaatgtcaaaagatgggtcttctatgctgccacagatcctgaagcagccttcctttcctctataagacttgtcagtgcactatcaatttgagcaaatacttcctcctttgagacatttccgttaatcttaacagttatgtctttgtacatggaaaggactgactccacattttgatgatgggtattcaatcgcaatttcaccttttcttctgtatcatcaaagcgttgggtaagccttgcggctatttcttgtgtctctggaggagaatacttcaagtgatatatcttgccggtaacaggatctaatctccgtccaactactctctccacaagaacatcttcagaaacctcaagaagaagaaaaatatgaggccgaaagccaagagcctcaagtgcagtggcctgtgataagctcctgggatatccatccaaaagccaaccattctctttcgaatctggtttcaagagacgctccttaaccatcatcacaacaatttcgtcagggaccaactgtcccttctccatatactgtttggctcgctttccattatcacttccagtggcaatttctgccctaagtaaatctccagcagcaatatgaaccaaaccgtacttgttggtgatgaggtggcactgggttcctttaccagaagcaggagccccagaaatcataacattcagtgcttcattcgtcacagacagagaaggagaatggatggcatttggagcgaaaggggatccgcaaaagaaacgtgaagcgcgtgggcgtgggcgtgggcgttgcggaaaagaacagtatcgacgcgccttgtagtcggtttgagttgaagacggcaagcaggaaattgaaggtgaggtggtgccaagaaccaccatctttgctctctcacgccggtcactgatttctaatgcctttcattcattcttattttcccttctgtcgtcttctcgcagccgtaatagcac

SEQ ID NO: 2638 - DNA, 1389 bp, Glycine max
actctacacgtcaaacagcaaaaaagtttactaatgtagtttgaaataatcagctttgttgtaagtagcttataggctttccgttccggttcaaaaatcgccaaggcatttgacgccgcagcaacgaaaacccgaaaataactgcacagcataagcttgtagaattgtactgcatcgcaaagccccatgttgatcgtgttcatttgcatcttccttttcttcatctttctttacaagttcctcatcgcttatggcgatttcactttgatgtctaagaagcaacctaagcgccaagagattgaagataaggttgtttggattactggtgctagccgtggaattggggagattctggctaaacagtttgcaagtttaggggccaagcttattatctctgcaaggaatgaagctgagctaaaccgagtaaggacacagctgaaaggtaagcatgcacctgatgacgtcaagatcttaccattggatttatcatccggagaggattctcttaggatagctgttgagaaagcggaatccttttttccggattctggtgttgattacatggtccataatgcagcttttgagcgtcctaaaacatcaattttagatgtaactgaggaaggtcttaaggctacctttgatgtcaatgttctggggacaataactctcacaaagctcttggcacctttcatgttgaagagggggcatggtcattttgtggtgatgagtagtgcagcaggaaagacacctgccccaggtcaggctgtatactctgcttctaaatatgcgctcaatggttacttccataccttgcgttcagagctttgtcagaaaggaatccaggtaactgtggtctgtcctggtccaatagaaacatcaaataatgctggatcaagggttccatctgagaagcgtgtgccatctgaaaggtgtgcagagctgactattattgctgcaactcatggcttaaaggaagcttggatatcatatcagcctgtgcttgctgtcatgtatctcgttcagtacatgccaactattggttattgggtcatggacaagattggcaaaagtcgagtagaagctgctgaacagaagggaaacacctattctttgagcttactgctcggaaaaaagaaggccacttgatgcccatctgttcatgttctccaaaaatttgtatcaaatatttttagtcggaggttctctatcaaattgaataacaccctttctgacaattgacagaaaagttgtatggatttcctaattgaacaattaaggtttacaaatatccaataggcgctgccatgtgaccataactccacattactagtaaatacagaactatcatctgctaataaaaaaaaaaaaaaaaataaaaaaattaaaaaa

SEQ ID NO: 2639 - DNA, 1278 bp, Glycine max
ttttttttttttttttttagtgtcatttaagaaccagtttcactaaattcttctcatatttgtaatccttccaacgtattaacaatttctactccaaaatctcagtgaacatttaacgataaatcgatctgagttacattttcaggatcggttgaataattataataaaaactcagtctaggaggggacatattatcaaaacctaagatgaacaacatctcttttttgactgggcatctgcttctccgtccccttccccttccccttgtagtacaacagtctttccattttcaattcgggtaacatcctgtttgttgagctcttgagacatcataaccttccgacttaggatgttgtaaatctcctttacaacagtttcaaaagcagctgctacatttgatgaatcaagagctgatgtctccatgaagaacaaaccctgtgcctcagctaaggccttgccttccgcggtagccacctcccttgcatctttaagatctgacttgttcccaacaagtattgtcacaacgttcatgtcagagtgagtgtgaagttcattaagccatcggcctatgctatcaaacgtttggcgccgactgatatcatacaccagaagagctccaactgcacccctataatatgcagatgtaacagctctgaacctctcctgcccagcagtgtcccatatctgtgctttaacttcctttccattaatatccatcttctgagtttgaaactctactcctatagttgactttgaattaggataaaactcatctctggcaaatcgtgcaagtaaatttgatttccctacagctgaatcaccaattaaaacaatcttgaagaggtagtcttcagtcttctcttcttcattataaaaagccatctgtcagacctaaggattgccagtgtgtagaggcaaatcaaacatatataatcatctcgactctggccctttccactactagaatgtcaacttcaccttatgaagcgactgttgactgtttctagcacatacaactgtatccaacattggcaacaagccccccaattcaaacaaatcaaaactttattgagtacctcaacctccttcactgcttgttttcccctcaactcttcaacttcagcttacccttccactaagtctttataatctcaaacacgttgagacggacgtatgcgtcttgtctgtgttttcacgtttgcgtctgcgggttattttcgtgacactaaactagtaccttctctgcatcccccggcgggcggcgcctccctggctga

SEQ ID NO: 2640 - DNA, 1423 bp, Glycine max
ctgagtggaactaggtgttattttgccttcgaagttatggataggccccccccccgcatccctagcaagcagaaagaagctgactagagtacagacagagagggagatattgcagttgctggaccatccatttctaccgactttgtatacacattttgagactgaccgattctcgtgtttggtaatggaatattgtccaggtggtgatctgcacactttaaggcagcggcaacctgggaaacatttttcagaatatgctgcacgcttttatgctgcggaggtcctgcttgctcttgaatatcttcacatgcttggagttgtgtatagagacctcaaacctgaaaatgtgttggtccgagatgatggtcacataatgctatcagattttgatctttccctcagatgtgctgtgtcacctactcttattagaacttcctatgatggtgacccttcaaaacgggcaggtggtgcattctgtgttcaacctgcatgtattgagccatcatcaatgtgcatccaacctgcatgttttattccccggttatttcctcagaaaaacaagaagtcacggaagccaagagctgatcctgggttgccgtccagcacacttccagagcttgttgctgagcctactcaagctcgatctatgtcctttgttggcactcatgagtaccttgccccagaaattatcaagggtgaaggtcatggaagtgcagttgattggtggacattcggaattttcttgcatgagctattatatggtaagacccctttcaaagggtcaggaaatcgcgctacacttttcaatgtagttggtcagcaactcaggtttcccgaatcaccggcgaccagttatgccagcagggatctgatccgtgggttgctcgtgaaggagccacagcatcgtcttggggttaaaaggggagcaaccgagatcaagcagcatcccttctttgaaggtgtgaactgggcattgattaggtgcagcacaccgccagaagtgccgagaccgatggaaaatgaagtaccagcagggaaggttgtgggaccagttgatcctgttggggttggcagcactagtaagaggatagcaggtactgacaacatgaagtctgggggtaaatatctggactttgagttcttttagtttggactcctcaatctgttttttattattgtattcgccattctcagtcagtttcatgggtgctgcccatcattacaatgttatttcagcttacctgtgccttttagtagaagtccatttcagttggaaatatgatacctcaactttagattaggtttttctccttgtcggatccggtatttcatttggataatccataatgtagtgtttctatacagaatttaaatacttctcatgaaaattataatctttctacataaaaaaaaaaaaaaaaaa

SEQ ID NO: 2641 - DNA, 1746 bp, Glycine max
  misc_feature (11)..(12): n is a, c, g, or t
  misc_feature (14)..(26): n is a, c, g, or t
ttttttttttnntnnnnnnnnnnnnntttcctgttgaacttagatggttgtttatttggtctgtctgagactatgatttatgacaactgggagtatgtggattccctttttaagtcctgaagttgtataaattgagaattgcacttcaaatattatcagcacttgtaggtctagacatgcatgcgatgagcttgcaagacaagatgccttatttatttacacaccagagcaataaaaacaaggttacaaatcaacaaaatttgtgaggaccttgccagttaaatgctctccatagactgctcttttgaactccttgttgccatttgccctcgttttatgtgtgtccaatggctctactgcagtatcgaagtttgtctcataaaagtatactacactgactctatattttgagttgttgtttatcacccgatgcaaagtggactcgtacaaaccattggagtaaatctttagcatgtcaccaatgttgcatacaaatgtcccaggaactggaggtgctgttatccattcaccagacaggtttctcacctgaagtgcgtttacatcgtcatcttgattaagtaatgtcaataaaccgtaatcagtgtgagctccacatccaatgtcatttttatgaacattggttccatttacagatgatacacctgggtaaccaatgagccgcattacccaaaatggatccccagctctttgaccttcaaattcattgggcgatccacctaatgctaaagcgattccacgcataattttccttgcaaggtctctgcagagactaacatactcctccataagaactttgaatgttggaggattttgtggccattgattgcttccttccataactttgccaagatctccatacatgtccttggtcacttctctatagcaatcaatagcttcatgcatgtcaggtacacctttagttatattttctccaagcctttgataacctctgaacccagcagctggagtcattttgatcttcgccttttcttcatatgaaagttcaaagaatctgcgcgttacatctctaacttctttaaggagagtctcaggaaaaccatgtcctttcacgtagaagaaccctgcctctgtacaagccttatccaattgtttaacaacctcaagcacaccaggatcctcagccatttttggatcatctgccttagccaaaaggggactaatatcaattatggggatggaactaaagtccgttgccatcgggtgttgtggttatctgactgttgttagattcagaacctagcacacaaaaatttccttcacttagttctaaactgtttaatattttactccacaattctctactataggtattgaatacttataaatcgtaaaaaccatcctaagcaaatccaatcgtaacatatttcgataatttccaataaaccaaggtatatatatgttctcaaattcatggaaagtaaaaccttcagcatgtacatacatgtccgtgtccatacacacatacacaagaaaaaaaaaacacgagcagaagatataatagatttaagattgatctaatgattgaaaaaggatgaagagagaaaaggagggagaagagttactggattcaaatttttcaacagacatttctaataaaactaacaagttaatatttgccaataaaaaaaaaataaaaacacaacaaatgaacgtgaaaccatggatatgtttgaaggaattaagaattgagcgaattatgtaagc

SEQ ID NO: 2642 - DNA, 1086 bp, Glycine max
attgttaactcaattttaaaaacgtgaacattcccattacctaccatataccatcaaccaatatcttctttgtcgcttttattatctgtttttccggcgatggattccggcgcgtggctcctgttcctggtggtcgtggctgtctcaacgtccggccacattcactctgaagcgatcctgagactcccgtccgagagcgaggagatctcgcgcgactactgcgacagctggatgctggcggtggagacgaacaacgccgggacgtggaaccgcgtgccggcgagttgcgtggacttcgtggcggaatacatcaccggagatcggtaccggcgggactgcgacgtgatccggaatttgtcggcggcgttcgcgaagagcgtgggattggccggagacggaagagacgcgtgggtgttcgacgtcgacgagacgcttctctccaatgtgccttactaccaaggcgtcggattcggatctgagatcttcaatgagacttcctttgataattgggtggacttagctgctgccccagctttgccagccattttgagtttgtataacgagcttaaggaattgggcttcaagatattcttcttaactgggagaagtgagtttcaaaggaatgccacagaaacaaaccttctgctttcagggtacagagattgggagaggctcatcttaagagggtcttctgatcaaggcaagccagccactacatacaagtctgagaagagagcagagttggagaatgaaggctacaggatccatgggaactctggggatcagtggagtgatttgtggggttatgcagtgtccgcacggtcttttaaactcccaaacccaatgtattatattccttaacatagaaatggcttctcagaaatctgtaatctttttcataattgcctgttctagtacttctgcccatgatttttcatggtactatgatacttgttacaacagggattcttagtgacactagtttctaatgtgttgtatgctacatttatacttattttgaggaataattattttttctgttgtgtgtgtaaaaaaaaaaaaaaaaaaaaaaaaaaaaaacaaaag

SEQ ID NO: 2643 - DNA, 945 bp, Glycine max
acttgtattttattaaaaatagaaaccacaaaaaaaatgtattgagatcaactaatcggtttatgatacataagaacattgcatggaagattgagagtcacctgacctggatttgattactatacagacaaacttgaaccacaactaaattaaagaaaatgtattctaccaagaaggaattccctcaacaccttgcatctttgactaaaaatgaaatactggtcaaaccaaggatcattttgcagtttttgagtgtttgattagccagtcaatgactacatctaagtttacagaatccttgcatgaaatcatatagcagcagacctctctgtctttaattgactcaagtcctagctgatctaccaatgcttgcttagaaagagcttctgacttgtcaattttgtttccaagaacaagcaaaggaatcccactcaaagaaggttttgtcaatagttcatgtaactcactccgagatattggaacactgtctctatcagcggcatctacaacatatacaatagcagagacaccccgacagtatcgctcccacattgaccggaacctcctctgtcccccaaggtcccaaagctttattgtgacatttcccttagtcacttttctcatgttgaacccaacagttggaatcatgtcctcactgtagcccccagtagcaattgcattgacaagagaagtcttgccagcattctgaaggccaacaagtgaaagttccatctcctgtttaaaaaacaagctgcggagccaattgaggaaggaatcccagagacccattgtgtgtgaatcgaagaaagagaaagatgagggaacaagaaacttcgcggaccaacaaagggtaaatagaatagaatttgaaggaagaaaggattggaatctaagatggaaattcgagcccatgtgtccgcccacgcgtccgtctttttttgaatt

SEQ ID NO: 2644 - DNA, 1298 bp, Glycine max
ttccactttctccatttcccaggcattttgcagagtccacctcaagctcttggaaaaacatcagtattgcccggcaaacagcttttgaatccatttttttacttaaaaatttttccttgagatcatcacacttccaaaatagcttccttcctcgggggtctttactcccatgaaagatcctactaacataatcaagttccctcattaaggcttctccatcccatgacggtgcacagtgctggaagacatctttaacccaacccaacaattctgaagtcctgttgcatgcttgacacctgaaaaacatatcactcggtcctgctccactctttgaagaagggcccatgcaaatatgtcgctcacgaatggcacaatctgtgtgagtccaatgagaacacaaatcacatccaatccagcggcatgtattcacctcaaagtcaaacttgttgcagatcacacacatgcaaagattgcagaaaccattagtgttggtgcatatttcacaggtacaatcatcagctggaagctggttttggcacgctatgtttctgcatctcttatagccaaagatctcaatcagggaagtctgggatagactaatgctaggatgcaaaaatccctgaattccagtatttattgcaacaaggatttcaagctgcacccgatgtgttctgaccagtgtcttggcagtcagatcagttctactctgaacaagcttctgcaaaatgaaaaaatcctctctatgctgcgaaccattccctccctcaaggataactcgaagtccattcttcaactcttctagatattcctcaggtagacgatgcattttttcacatatcgtagcgatactttctctagcaacgtcctgaagagtaactttgtctgcactagaaacacgatgaatcactttctgctcaaggcaattaatctccgcttttccattctccatcttctttgctgcggcagcatcagctataggccaagtttcttgtgaacttgcactttcagccggagattcacggagattgtcagagtttgacctaggttcatcaggagacaggagggggtctgaggaaacaagagacagcgatgtttttggtgctccaacctgtgattgtggacgcagaggtagcatttttcgagaggacgaccccggtcgatgttatagaagaagattatgtgctactgtcctgaccagccaaagcgtagatcgaatgattgaacacaacactgacctcaagtacggagagagaatagatggggatttgagtttgagctgcgaaagaggggaaacgcgg

SEQ ID NO: 2645 - DNA, 1685 bp, Glycine max
tcagctacgtaggccccccccccccattttccaggctctttggagagtccagctcaagctcttcatatatgaaaaacattggttaaaacaagaagaaaggataattaatcaagtaacatagttaatttcattgattatacatgtttttaacaatgcaaatcacaattttattcctttatgtgttcaaattcaggttttaataaagagaaagcaggaagtttcgagataacctcagagtatagtctaaaagcttctttttttaatcattccaacacagttttaataaaatttcaacttttagtataaacaaatactactatgatatgaacatagtgaataggctcaaagaaaatgcaaaagacaataatgttgtattcacactacgtgcatgtgcatccacgtgtgtgtagcctatgtcaaggcagaaactttaaaactacaatttgcaggtaaactagaaaacttgtaccttggaaaaccatcaatattgccctgcatgctgccttagattccacttttccacttttcaatttttccttgagatcatcacacttccaataaagtttcctcccccgcgggtctttactaccatgaaagatcctactgacgaaatcaagttccctcatcaaggcctctccatcccatgatggtgcacaatgctggaagacatctttaacccaacccagaagttctgaagttctgttgcatgcttgacacctgaaaacgatttcacttggccctgctccattctttgcagaagggcccatacaaataagttgctcacgtatggcacagtctgtgtgagtccaatgagaacacaaatcacatccaatccagcggcatgtatttacttcaaagtcaaacttgctgcagataacacacatgcaaagattgcagaaaccattgccattggcgcacgtctcacaggtacaatcttcagcaggaagttggttttggcaagctatgtttctgcatctcttgtacacaaatatttcaatcagcgatgtctgtgatagactgatgctaggatgtaaaaatccctgaattccagaatttattgcaacaaggatttctagctgtacacgatgtgctcttatcaatgtcttggctgttaaatcagatctactctgaacaagcttttgcaaaatgaaaaattcctctctatgctgtgagccattccctccctcaaggataactcgaagtccatttttcagctcttcaagaaattcgtcagcaattgcatcagcagtaggccaagtttctcgagaactggcactttcagtaggagattcacggagattgtcagagtttgatctaggctcctcgggagaaaggcggggatctgaagaaactagagatagagaggtttgtagtcctccaacccgtgactgctgttgtggagggagcattctcttctcttttttttcacaaaggcttctgttttatgttagagcctggtgacctacccaaaaaatatttctttgtcagtaactagcggaggtgattatatgcattatatatttgctgagtttcgaccaagcacagtttgttttcagggtgctttgggtcataaattatgtaggttctgtgattggcgtatttgctactctccttgtaatttttgcacaacttgtgctatcaatgaaagtcttattgctgattaaaaaaaaaaaaaaaaaaaaaaa

SEQ ID NO: 2646 - DNA, 1523 bp, Glycine max
tcagctacgtaggccccccccccccccaggccatactcaccctacccactcagccttcttcttcgctctctcgctctgactgccgccgccgtgcgttcgtctctctctggcgttgacttttttttttttgcctgtgagagagtaacgcaatggaacaaccacccaccgaagccgtcgaatcgttgtccgtctccgaccctcagatcccccaatcatccaatcccagtccaactcatcttttgactccggaagagaaatttcaaattgtgagaagcgtcggagaagaatgcattcaggaagacgaactccttaacctcctcaccaaaaaacccgaaccagtttgctacgatggcttcgaaccctccggacgaatgcacattgctcagggtgttatgaagacaatcaatgtgaacaagctaacttctgccggttgcatcgtcaaaatatggattgctgattggtttgccaagctcaacaacaagatgggaggagatttgaagaaaattgagaccgtgggccgttacttgatcgagatttggaaggctgttgggatggatctggagagtgggaaagttgagtttctgtggtcctccaaagagattaacgccagagctgatgagtactggcctcttgtgttggatatagctcagaagaacaatcttaaaaggattatcaggtgtagccaaataatgggacgaagtgaacaggatgaattaactgctgctcagatattctatccatgcatgcagtgtgctgacatatttttcctcaaggccgacatttgccaattgggaatggatcagcggaaagtgaacgtacttgccagagagtattgtgatgacattaagaggaagaacaagcccattatcttgtcacaccacatgttacctggtcttcagcaagggcaagaaaagatgtcaaaaagtgacccatcatcttccattttcatggaagatgaggaggctgaagtgaatgtgaaaataaaaaaggcttattgccctcccaagactgtggaaggaaacccatgcttggagtacattaaatatcttgtcttaccttggtttaatgagttcacagtggagcgtagtgcagataatggtgggaataagactttcacaagctttgctgagctgactgcagcctatgaaagtggagagttacatcctggtgaccttaaaccagcattggcaaagtcattgaataaaattctggagcctgttagggaacactttaggaaggacagcaatgctaaagagctactgaaaagggtcaaggcttacagagtcaccaaataatatgctcgttaaagacttcaggctaatttctattctttgccaaacagtcgttctttcacgttatgagattatacacttctggacttctaaaatgtggcggaggttttctttagaatgagtaatgtgatttttgtttacttaaaaaaaaaaaaaaaaaatttatatttatatttttatttatgccatgaatttttaattatccataatacaaatactaccgccttgcct

SEQ ID NO: 2647 - DNA, 2169 bp, Glycine max
aaaaccaagcaaagggagatgtcattgctttcatcacacacaatcacaaacagtaaacattcaagcaaaatctcatcctttccctaatggctatctgggttgggaaccttcttacattctttggggggggggaatctcagtccacaatgtcattcaaccaaaccgacctgcaggcagccatgactgacatgagaaggcggccctactatggatttggcatcctcctcaaaatactaaacaagccagcccaactcactgcaaaacaatgatttgacattcctaatgcccaatgatgatgaactatctcaattctcaatagctctagaccagcttcatgatttcatactcagccattctattccaacaccattagtgctcagccatctattacattttccaaatggctctgtggttccctctagcgttccaagcagggtgatcagcatcaccaacggtgggagaacaggtttgtttgtcaacaatgcaaggattgtcacaccaaatgtgtgccaaagctcttccataagatgccacggaatcagtgctgctttgacatttggcaacatggtgccttccccccgagctccaaaacccaaggaagacccaaagaaccccacgcggccgaacccatcctcaactgtcgaaaagatgaatatcccacctttccagtaaggcgagataaatactttgcccttcagctgtaatgtcgtttcgttttatcaataacataacattacttttactttgtctccacaatgatctatttggcctgttgtcctgttccttctctctctttttttttttaaacatattgactaactaattagattccacaaatcaagaagcaatcaataatttgtcacaaatgcgtattcatacatataccgcatagaacaaaccaaatttcaaactgagttaagcctttacttactagtacctctttgatctacaaaaggcttacattgtcttgaacctaatggaattagactaactcttcatcaattgtgcaacagaataacattgctataatatgtaaaagattataacatacactgaaccagtactcatgggtttgttctgaaagggtggcactcattagattgaccatcttccttgggaggaacactgtagagaagatcatggattttggaatacaccagcattgaagaggggtcaaccccactactgctctgtgatacacgagaagtctcctgcaatttgatcttctcatacagatattgcttctcagcctcagcctcacttaatttttgcttcagatagttgctagtatattcttcctctgatttatctgacttggcaagagcaatcctctggagccgctctgcctctcttttagcctcgttagccttcaactggaacatatcagcttctgcatttttaagcctcacaattctctccagttcttcaatctgtaacttctttttttgcctgtccattttcagttctcctgcctctctggccttgtctgctaattcacgttcacaagcatcaaaagccaagcgagccttcttgaacattctcatcttttcatcagctactatttccatctttcttatagcctcatggaccacttcagcaattctattgcatgcctcctggggagcaattagccttccactttctgcattttccaggctctttggagagtccagctcaagctcttggaaaaccatcaatattgccctgcatgctgccttagattccacttttccacttttcaatttttccttgagatcatcacacttccaataaagtttcctcccccgcgggtctttactaccatgaaagatcctactgacgaaatcaagttccctcatcaaggcctctccatcccatgatggtgcacaatgctggaagacatctttaacccaacccagaagttctgaagttctgttgcatgcttgacacctgaaaacgatttcacttggccctgctccattctttgcagaagggcccatacaaataagttgctcacgtatggcacagtctgtgtgagtccaatgagaacacaaatcacatccaatccagcggcatgtatttacttcaaagtcaaacttgctgcagataacacacatgcaaagattgcagaaaccattgccattggcgcacgtctcacaggtacaatcttcagcaggaagtggtgttcgc

SEQ ID NO: 2648 - DNA, 1654 bp, Glycine max
  misc_feature (19)..(19): n is a, c, g, or t
  misc_feature (38)..(38): n is a, c, g, or t
  misc_feature (1604)..(1604): n is a, c, g, or t
ttttttttttttttttttnaacaaattccttacaaaancatattaataatggttacaacaagcctagttccaaacatatattgaagctttttccaatatctccttgtaaaacgcagataaaattgatgaagatggtgattacattgccataaaagtggctcatcctaaattgttcaaaggtgacttagctacaacagctaacataattggcattacaaacacaatggactctcagggatttgtccgaaaagggtggcgctcattaccctgactgtctgctttggaaggaacactgtaaagcagatcgtgaattttggaatacatcagcatctgagaggggtcaccaccactactgccctgcgaagcgcgagaactctcctgcaatttgatcttttcataaaggtactgcttctcggcctcagcctcgtttaatcgttgtttcaagtagttgctagtaaattcttcctctgatttatcttgcttggcaagagcaatcatttgaagcctctcggcctctcgtttagcctcatcagccttcaattggaacatatcagcctctgcatttttcagcctcacaattttctccagctcttctatctgcagcttctttttttgtctctccatcttgagctctgtcacctccctggccttgtcagctagttcacgatcacaagcttcgagagataagcgagccttcttgaacatcctcatcttctcatcagctaccatttccatctttcttatagcctcatgcaccacttcagcaattctattgcatgcgtccagtggagcaatcaaccttccactttctccattttccaggcattttgcagagtccacctcaagctcttggaaaaacatcagtattgcccggcaaacagcttttgaatccatttttttacttaaaaatttttccttgagatcatcacacttccaaaatagcttccttcctcgggggtctttactcccatgaaagatcctactaacataatcaagttccctcattaaggcttctccatcccatgacggtgcacagtgctggaagacatctttaacccaacccaacaattctgaagtcctattgcatgcttgacacctgaaaaccatttcactcagtcctgctccactctttgaagaagggcccatgcaaataagttgctcacgaacggcacaatctgtgtgagtccaatgagaacacaaatcacatccaatccagcggcaagtattcacctcaaagtcaaacttgttgcagatcacgcacatgcaaagattgcagaaaccatgagtgttggtgcatatctcacagggacatccctcccctggccgctggttttggcacgctatgtttctgcatctcttatagccaaagatctcaatcagggaagtctgtgatagactgatgctaggatgcaaaaatccctgaattccagtatttattgcaacaaggatttcaagctgcactcggtgtgctctgaccagtgtcttggcagtcaaatcagttctactctgaacaagcttctgcaaaatgaaaaaatcctctctgtgctgcgaaccattccctccctcaaggatacttcgcagtccattctttagctcttctaganattcctcaggtagatgatgcattttttcacatggggggggggggcctacg

SEQ ID NO: 2649 - DNA, 606 bp, Glycine max
  misc_feature (26)..(26): n is a, c, g, or t
ttctagctgtacacgatgtgctctantcaatgtctgggctgttaaatcagatctactctgaacaagctttgcaaaaatgaaaaattcctctctatgctgtgagccattccctccctcaaggataactcgaagtccatttttcagctcttcaagaaattcgtcaggtagatgatgcattttctcacatattatatcaactcgttctcttgcaatgtcctgaagactaattttgtctgcactagaaacacagcgaataactgactgatcagggcaatccatttctgcttttccattttccatcttctttgcagcaattgcatcagcagtaggccaagtttctcgagaactggcactttcagtaggagattcacggagattgtcagagtttgatctaggctcctcgggagaaaggcggggatctgaagaaactagagatagagaggtttgtagtcctccaacccgtgactgctgttgtggagggagcattctcttctctcttttttcacaaaggcttctgttttatgttagagcctggtgaccagagagaggggaagaaaactggaaagaaggctaatggattggagtatgtatcttaatggaaagaag

SEQ ID NO: 2650 - DNA, 1610 bp, Glycine max
ggatgtatgttaaaggatacaagtatttcaaaatgtacctcttgtcgtgatgacatgttaagtaaaggggaagtgtctgcagctgttaccaacatacagcctcaggttcctacttcatcttcagaagtgaaattggagtcttctaagttggaaaagcaagagaaaaatacaagttctaaagcatcatcaggccttcgaaagagggcctatgaccctgaattgtttttcaaagtcaatggcaagctttatcaaaggcttggcaagataggtagtggtggaagcagtgaggtacacaaggtgatttcatcagactgtacaatctatgcacttaaaaggataaaattaaagggtcgtgattatgccactgcatatggcttttgtcaagagatcgagtatctaaataggctgaaaggaaagaataatattatccagcttatagattatgaggtgactgacaaggctttgtttgagggagtcataaatggctccttcagtaataaggatggtagagtcaaggatgatggatatatatacatggtacttgaatacggggaaattgatttggctcatatgttgtctcaaaagtggaaggaactggatggaagcaaccagaccatagatgagaactggcttcggttttattggcagcaaattcttcaagctgtcaacacaattcatgaagaacgtattgtgcattctgacttgaagccagctaacttcctccttgtcaaaggttccttaaaactgattgattttggaatagccaaagcaataatgagtgatacaacaaacatccaacgtgattcacaggttggtactctaagttacatgtcaccagaagcatttatgtgcaatgagagtgatgcaagtggaaacatcataaaatgtggtcggccatcagatatctggtcccttggctgcattctttatcaaatggtatatgggagaacaccctttgcagattacaagacattttgggcaaaattcaaagttataactgatccaaatcatgaaattatgtacgcaccagtttcaaatccatggcttctggatcttatgagaaggtgtctagcatggcatcgcaatgaaaggtggagaattcctcagctgctacagcatccttttctagttcccccagtcccatgtcattcatctttttaccaagaacaaacctttaaattgctgcaacttatatctgaagcttgcataaatgacccagaatcatcacagctctgttgtcagctccaacaggtgcttggtaatcccatcaagtcaactagtattcattcattaaattcactagaccaacagcataaattgctgtcccgaatatcagaactttgtattctactacaggaacgattgacaaagacagataaactataggtgcttgttttgtttaagcttatattgaggaatttataaattattttgtcaaaagatgtcttaagaggtgaagtaagccagtggtttcttattgttcattccaatttccagtggtttttatccaatcatttttctctccaatgtactagtaactagaaaggaaggtataaccttgttgtcatgacatgtttcatgtttatggtgcctcaattgtgttcctctac

SEQ ID NO: 2651 - DNA, 1148 bp, Glycine max
ccaaaagacaatgattcttactacacaggcacaaaaagtacacgaaaaatgtttatatatttaagtaaatcaaacttctcaatgctaatataagtggtgcaaataggactaaaacctctgcggatgtaaagagtgagaagcaacatgtgtatcactaaattggaggaaaggagtgaagaaaatataaaagatgtgtattacaacatgcatctgaaacaaataaaaaagcatttatgtacccccaagaaaaaatgcatttactttgtacagcagtactacttccactcactctacaagtaccctaatgcatctccactcatattgtcactcgccattattgagcaatcagacgcatcatgtccatattgagcacacaatggcatggagaactgcctgcgtttcctagtgagatccactacatctctcgctcttctctcctttagctttcctgtagtgatagaatcatggggatttgtgattgtaaagccgggaatcattccatcagtatcttctacctctggcaggattaatgaatctgatggataactatatgcaatgtcattcaccccgtgtggggacctaggaaaggttttgatgcgtgatagcaccatagaaatttgatcacaagcaacatccaggcgttcctcagtttcaatggattccactaaaaacgttgaaaccatggattctaaaaactgtatcctttcaggctgatccctactggttgtaccacggtagtggttaacagaagatgaattattgcctcgccaacgggctggtaaatattgatcaggaatgtgaaaacagttattagttgacatgacccgtagcacgtgtctacataagatgcctgaaaactcaaacaaatggcagctgcagctgatgtgctcttgacaagcaacccaaaatactttgcatcctccatctgactgagagtggtgtctgacctggaaacgaccttcatcaaccagaaaggatgcatattgtggcgccaaaactagctcttcctggagtttacttaaggcatcaggagtaaggacagtggcagcatgggattcaataggtgaacctgttttgaggcacactttctgcagtttggggggcgggccttccgtggctcccgcgcggtcattaaaatcaacaatttc

SEQ ID NO: 2652 - DNA, 1317 bp, Glycine max
tacttatagcaacatggtctgaaaactcaagatactctacttttactcggggcatagcagatgctgatacatgaaagcgaaacctagctatcatcatcatcacagaagaacaacaacagaggaaaaaagaaaaagaaaaatgttagaggtgaagagaatcggtgtggtggggagtggccaaatgggatcgggaatagcccaagtcgctgccatgcacggcatcgacgtttggcttcacgacctcgaccctcaagctctctccaaagcctcctcttccatctcttcctccatcaaccgtttcgtttccaaaaaccacatctctcaggttgcgggtgctgatgctttgaaacgactgcgtctcacgacggatttggaggatttacagctagcggatttgatcattgaggcgattgtggaatccgaagatgtgaaaaagagtttgtttgcgcaactcgataggattgccaagagttctgcgattttggcgtccaacaccagttccatttccgtcacgcgtctagccacctctaccagcaggccacgtcaggtgataggaatgcattttatgaacccacctcctgtgatgaaattgattgagattgtacgaggtgcagacacttctgaggagacattcgttgctacgaaagcattgtcagagaggcttggcaaggtagtgataacctcccatgattattcaggcttcatagtgaatcgaatccttatgcctatgataaatgaagcattttttgctctctacactggtgttgcaaccaaagaggatattgacacaggaatgaagctgggtactaaccatccaatgggtcctttagagcttgcagacttcattggattggatgtgtgcttgtcaataatgagagttcttcatgctggccttggtgacaacaaatatgcaccttgccctctacttgtgcagtatgttgatgctggaagacttggaagaaaacgaggtattggtgtgtatgaatatagtaaagatccaaggtctacaaaatcatcttcccgtctctaaaatgtttgtttcacttggaagaacaagttttcaacacccccattttaattaccttgtgtctgaccgtgggggtggtgcacacggctgaagttgaatacttgaatgtgtcttctatttcttttatgcatacaagcaaaaagaaaattgcaggaactaatagtaaaacatgcatagttaaatcttcatgcatagttaattttattttattgtgtttgactggaaaattctaaacctattaacttttgtctatatttcccaagctgattccgatactaaatttttttcct

SEQ ID NO: 2653 - DNA, 2010 bp, Glycine max
gcaaggtctcgggttcaaactttattgatagaaaaattgtgattaaaaaaaaaatctatcaaaaatgataattctttatgcaaagagtaaggcatcaacaagaaaaaattttccttgttttgcaacaaccaagactgaccactttaattagaatttcctctcccaacctaattcgtaccaataatatagtgataaagaaaatctaataaaaaattaacatgcaagtaccggtgtaatccaagacccatacaaattctcattatggaagagatgcaacaaccaaacaaacttaataatttcttgcaaattatcttttacgagtaagacctgcgtaatcagcgtggccatatggttcaaacaactccgaaaaaaggccattcttccttctagggtcatgcttcatgtctttgcacaattgatcatgataccatatgccacaatgagcaatgcatgttttccaataatatttcccaccatattgcttcaaattgtcttcccacaatttcacgtccttttccatctctcttatactaggcaactctatgtttccatccaagaaatgtgatagccacaagcttttcatttccgaggcaaatatatttgatgggctctcggcatatcctattattgccaactgggggatctgagggtgaattatttgtctgtagagaggaactgttgaggttgcttgcccaatgatgtacttttggaagagtggagatttgaatatgtttttgattttttggtcacctttgtatccagtggcaaaaaatacaatatctgattccaggggcttagcttctccgtcaatgattacaccttctctacaaaagctaaagttttgcgatcccttcataatgatggatccttcttttagtttgtcaaaaaagttatcaggatacaccgcaaacagacatgtggagagatcctgaagaaagctgtgattgggtgccattccatacttcttcaatggcagcttccattttagagtagtttcaacaagtttagaaattccccatctccatggtgaaagcagagtggcaacaaggccaagtaggaaggactctcctggcttgtgaactaaaagctccgcaaagcgattgaagtacaagaatccagcaataacaccccaaaagttaaaatctggaagaaaccagtgtgcggttctttggataactgtgcaaggatgcttcactccatttgcattcgcacattcagctgctagatcaagaccagatttctgtgagcctattattgtaactctttttcctttgatcagttcagcagcagtctcattgtccaaattcgagtagtccatggagtgcataaccttgccattgaaaacttctgggccttttcctggggggaattcaggaatgtttggaaaaccactatatttcccaatgcaaagaacaacaaactcggcctcatgcacctctatggataaattcttggtatgttgcacagcaatatgccaagttcccttggagcagaatggcctgccattaccaccccacaattcccatgacttcatttcttcactggactctccaccaacataatctatatcaattactttggagttgaatctaatgtaaggaatgagggaaaaatgttcagcataggagttaacataatctagcacttgcttgtgacttggattatcttctttcacagaaggcggccatggaaaatccatgaactggaacatttgtttattgttttggagcttggtggactccatggtatgtctccatagtcctccaacgccatcatcaacttcaaagacaattggattaaatccaaactctataacgtatttgcaggcaacaaggccgctgattcctgccccgataattacaacccttctttccatttcagctatggagacaagaattgcaagcaactctcagctttatgtagtgaagcgaattctttcgaactacattgagttattaaaatagtaagaaagatttgtcacggaccaacatgatttcagaaattccaacc

SEQ ID NO: 2654 - DNA, 1216 bp, Glycine max
ggacagattgtctcgtcctgcacaatcatcgttatgccatattcccactctcagcctctccaccaaatcccactgctatctccccaacaccaaacaccggttttcatgtcccagaataaagttattctactccaagcaccgctccttctccgtctcagcttctgcttctgcttccacttcaaattcgcttcaggctctcatattcgactgcgacggcgtgatcctcgagtctgagcacctgcatcgccaagcctacaacgatgcctttgttcacttcaacgttcgctgcccctcttcttcttctccgggcccactcaactgggacgttcaattctacgacgaactccagaacctcattggtggaggcaaacccaaaatgcgatggtactttaaggaacacgggtggcctaagtccacgttgttcgagacgcctccgactaatgatgaggatcgggccaagttgattgacactcttcaggattggaagactgagagatacaaagaaataatcaagtcaggaactgtaaaacccagacctggagttctgagattgatggatgaggctagagatgcagggaaaaagctagctgtttgctcagcagcaactaaaagttcagttattctctgtcttgaaaaccttataggaattgagcgctttcaaggccttgattgcttccttgctggtgatgatgtgaaggaaaagaagcctgacccatcaatatacgtgacagcttccaagaagctaggtatatcagagaaagactgcttggttgtagaggatagtgttattggattgcaggcagcaacacaagcagggatgtcatgcgtggttacctacacaccttccacagcagaacaggatttcaaagaagccatagcaatctaccctgacttgagtaacgtaagattgaaagatttggaattactacttcaagatgttgtagctgctaaatagaagatttgcttgtgccttggaaatgttgctattttagctgccctgcagtggtttctatcgggaaaatggattgacatatttgatgtttaagatctctctctaaaataactttttttttcatatattaattgactgccgatgatgtatacgtgcaagttaaaatgtaacaacaattctttgcaagatgtagtaaagatcataatctactgttagtgtttttctcattcaaaaaataaagaaaagaaaaaaaaaaaaaaaaaa

SEQ ID NO: 2655 - DNA, 1315 bp, Glycine max
catcatactgtgggatttttggttttcgtccttctcatggtgctgtctcagaatcaggagtaatccctatgtcgcaaagttttgatccccgcggccggtttgccagggatccaatgattttgagcagagtaggaggtgtaattctacagttaccagatgtagctccaccaattagacctacttccattatcattgcagaggactgtttccagctttcaagcactccatttgatgtagttacaggaactgtcatcaaagcggtagagaagttatatggaggggatgtattgaagcctgaaatccttggagactatgtgaaaaccaatgttccaagtttgaaacatttcatgagtaaagataatacagaccaaatatataacattccatcactggctgcactttcaagtgccatgcggttgcttcaaaggtgtagctcaccatttaatccttagctttcagtaaggataattgtaattttccagcggggcgtcggctgccttgggcccccccttgattcttgctttatttatcatttgtaatgtaggtatgaattcaagaataaccatggtgaatggatcagtgcagttaaaccagatttaggtcctggaatatcagaacgtgtatcagatgccttaaggacaacaggggagaacattgatatctgttattctataaaaagggaactacacgatgctctttcggctcttcttggggactttggtgttctaatgatccccacagttccaggtcctcccccaaaactacaaacaaatacatccgacttagaaatttttcgtgcaagggcttttagcctgctgtccattgctggagtatcaggattttgtcaggtaagcataccgctagggatgtataataaccttcccctatcaatttctctggtggccagacatggtgcagataaatttttgcttcaccttgttgagagtctttatgacagcattgaagatagaaagcagcatatcatagagcacaaactttaatctgactgcaaggatgtagatatgctttgagtatgcctactatgccaaaagctgggagagaagcgaattatggacataaatcaaagaagggatattgtataaaggaaatttttgctgatctatatcctgtttctttcagatattatgagttcaattattcattaaatcatatcattttgattgtgctagcttgggtacgaaagcaaaaaagccacattggaattcaaagtacttcaatattaccatatcatgttcacaaatgatcagtttttgacgcatttgatatccagctttgtcagttaagtattatggcc

SEQ ID NO: 2656 - DNA, 2483 bp, Glycine max
ctcgagccgcaaaagcctttactactaagaaaggataaaggaaggaaggaacacttttctgatattctttttggtattgggttgctgacctttgctagtgttatagattttttgggttctcttgtgttttaataaatacaggaaaaaaaaagtatataggtgcctagaagaaaagacaatatagggtgtggagcaattacgtttgatcacaagggaaaaggtgcaacggtttgcaagatagcatagaagattttgaagaatcttaattgcaacatagtagtgcagttgcaatgggggctcctttatcagcatggccttgggataactttggaacatacaagtatctattatatggaccgtttgtggggaaagtcctttatgaatggttctatggtgaagagcagtcctactacaacctcagctggtgccttcatttgctcatactaagtggtctcagaggcctaattcatgtgctttggggttcctacagccacatgttttttctaaccagaaatcgacggattgttcaaaagggtgttgatttcaagcagattgacaaagaatgggactgggacaatttcttgattcttcaagcactagttgcctccatggcatgctatatgtttccctttcttcagcatcttcctctctggaatgtaaaaggtcttattgttgctttggttcttcatgtgggagtctcagagccactttattattgggtgcataggaagttccatggagactatcttttcacccattatcattcacttcatcattcatctcctgtaccagagtcttttactgctggaaatgcaacacttttggagcatcttattatgacggtaatcattggaatccctatccttggggcttctttgatgggatatggatcagcaagcatgatatatggttatgttttgatttttgatttcctgagatgcttgggccacagcaatgttgaaattgttcctcatcaattgttcgagaaacttccatttcttagatatgtgatatacacaccgacatatcaccacctacaccactctgataaggacactaatttctgcctcttcatgcctctctttgattcacttggcaataccctcaacaaaaattcatggcaatcacacaaactactaagttcaggttcaggaaacggtgacatggtaccccattttgttttcctggcacatatagttgatgtgtcatccagtatgcatgctcaattcgtctatagatcctttgcttcattgccatacacaacaaggttcttcttgctcccaggcttgcccattacttttctagttttgctagcaatgtgggcttggtccaagacctttttagttagtttctactatctcagaggcagacttcaccaaacgtgggttgtacctagatgtggctttcagtatttcttgccatttgctactgagggaatcaataatcaaattgagcaagctatcctcagggctgataaaattggggttaaagtcatcagccttgctgcattgaataagaatgaatcactaaatgggggtggaaagctttttgtggacaagcaccctaaccttagggtccgagttgttcatgggaacacgttaactgctgctgtcatactcaatgagatccctcaagatgtgaaggaggtgttcctaacaggagccacatccaagcttggaagagcaattgctctctacctttgccaaaagaaagtgaaagttctgatgttaactctctcaacagatagatttcagaggattcaaaaggaagcccctccagaaaatcaaagctatcttgtccaagtgacaaaataccaagctgcacaaaactgcaagacctggatcgttggtaagtggatcacgccaagagagcaatactgggcaccacgtggaacccattttcatcaatttgttgtcccaccaattttatcatttagaaaagattgcacttatggtgacctggcagccatgagattaccagaagacgtggaaggacttgggtgttgtgagtacacgatggataggggagtggttcacgcgtgccatgcaggaggagtggtacatagccttgaaggttggtctcatcacgaagttggggccatagatgttaacagaatcgatcttgtgtgggaagcagcactcaaacatggcctaagaccagtgtcaagtttcacacagaaagaaaattaaaatcagcttcagtcaaagtatttttctcaagttgtttcttatttgttttggtgtattgcatgcacatcacagtgaccttataagtgtgattatattctttcaagtctgtgtattacatttctaatgtttcctcttgtatgttcatatgatcacattgacagtgattcattcatggtataaattaagccaaagcaagatagctttgcttcctcttgtatgttcaattcctattctgattgctttgttattttcaatatttccttatatattcatttaatgcatatattatcacag

SEQ ID NO: 2657 - DNA, 1796 bp, Glycine max
aaaacaaaaaaaaaatgtaaaacccgatatctatggctcgctttttttttttttttttttgcacaaattattttcataaagcagaaacagtctgcagcgatcatgagcatgttgataaattatgcactacaaaaatgaacagtgataattaactcctctaaaatttactcaatttcatccaacacaaccgataaatattatattgcttggcacatgtttgtatttctcaagataaaagtcaggtctcagggtttccaaccccctttgcaaatgggtagactaaaacttgaatcatggcaaatgcactagctcagtacttttgacaccacaccggcaccaactgttcttccaccttctctcaaggcaaatctttgtcctgcttcaagtggaactgctgaaatcaattcaaacacggcagtaacattgtctccaggcataaccattttaacattttcgggcaactctacttttccagtgacatcagcagtcctcaagtaaaactgaggtttgtagttagagaagaaagcagtgtgtcgccctccctcatcctttgtgagtacatatatctctgcctcaaatttcttggacgtttttacagaaccaggtttggcaatcacctgaccacgttgaatatcttcacgcttcagaccacggagaagaagaccaacgttatcaccagcctgtccttgatccaaaatcttcttgaacatctcaactccagttactgttgttttcagaggaccaccctgcattagacccaacacctccacttcatcaccaactttaatgatcccttgttcaacacggccagtggctactgttcctcgtccctgaattgaaaatacatcttcaatgggcattaggaaaggcttgtcaagttggcgaacagggtcaggaatgtattcatccacagcatccattaattttaggatggcctgtcttccgatctcatcatttgtaccctgtaaggcagacaatgctgaacctctaatgatagggatttcatccccagggaacttgtagaagctcagaagctcacggagctccatttctacaagctctaacaactctggatcatcaactgcatcaactttatttagaaaacacaccagagatggcacaccaacttggcgagcaagaagaatgtgctccttggtttgaggcataggtccatcaggtgcggatacaacaagtatacctccatccatctgggcagctcctgtaatcatatttttaacataatctgcgtgtccagggcagtccacatgagcataatgtcttttcgcagtctcatactccacatgtgccgttgcaatcgtgattcctctcttcttctcttcaggagccttatcgatttcatcgaaggcaacagctttagctttcccttcatccgcaagcaccctggtgattgctgcagtaagcgtggtcttcccgtgatccacgtgtccaatagttccgacattaacgtgaggtttcgttctggtgaaggtggccatggatctccaccaggggttggaactggaagaagaagaagaagaagaagatgtggagtcattggtgaaaacgggaggagagagaggggaacgagtgaaggaagagtggatttgagaggttaaggggaagaggcgccgagaagtggaagagcaatttctgagaacgattgtagccattgaagcgaagagaagagtgaagaatgaaaagccctaaaactaaggaatggaatgcagagagaaagagagagactacgagcgagggttttaggttcgggaagaccgggggggggcctacgtagctga

SEQ ID NO: 2658 - DNA, 1360 bp, Glycine max
ttttttttttttgaaagaacacaacaaaattataaatttacaacttaaaagttacaaatttacaacaatatcacaaacaacctcttaataagcttcatttacaaattatgccgctctaaagaaagccaaatcctattcatcgatagcaatctaaatgtatgattgaaattgcaatcatatatatctctaaaatcagttaagaactaccagcgaataaagctcattgaatcaataattgtatgtacctaaatgatctactacgccggataatgaaaagaaaaatacaacctagaaaatatgaaggagttgtgattttcattctagcatccacaaaataaaggacattatattccctaggacttgctgagcattcggtttttaattttaattcgaatttttggtgcaccagatgtgccttcagatggctccggtttggtatctatcttttttatttctactttagaattatatccactgggttcaacagatttaacctgtctagcaacgtccactacgggttccactttcttgcttgacaaatcaatggaggatctctttgcttcatcactctgaagttttgccagctctttttcccgatgttttttctctttctttagtcgttttcgctccaaatattctacatcatcatggtgtcctttattactttcctgtttccgtttcttttccttgcttttgtgcttttctttcccccgagcagaaatttctttacctaatgattctccgtcaggatcaaatcttgcaactgaaagagtttgaaggctggcatatcgtcgtgcatcagcatctatattgttatcctggataatactggatgatgatggatcttctggctgaggttgtgaataaactatacttgaatcagcagtgcactgcagttctttgaccaattcatcaccatcactcaaaaactttgcactgccaatgctggcagtcatgcgcgaaccacgatcatgccaagaattaacttcgtcaatattatgattactgatgctaacagtatcggcaaaattcctctggggtgcatctacagaaactgaactgctagctccatgatccatttcattacgaccacctaaagaacattcaaccacttgattatcagtatcagccctactggtggcagaagattgcttgaccttgattttaatgggcctctttctttcatggctattggatacagtatcaacttccttggaaacttcatttggatttggagcttcaattggtgcttcctggggaaattcagtaaatacctctttgggtggcgcgggccttccttccttctcggcttcaaggtgcacctgtgtggaagcttcggggggggggcctacgtagctga

SEQ ID NO: 2659 - DNA, 2129 bp, Glycine max
tttttttttttttttttgaccttttttttttttttttttgagagaacacaacataattataaatttacaacttaagagttacaaatttacaacaatatcccaaacaacctcgtaataagctagcttcatttacaaattatgccgctctgaagaaagccaaatcctatccatcgatagcaatcttaaattgcatgattgaaattgcaatcatatatatctttaaaatcagttaactaccaacgaataaagctcattgaatcaacaattgtatgtacctaagtggtctactaagccggatatgaaaaaaaaaatacaacctaaaaaatatgaaggcgttgtaattttcattctaacatctacaaaatataggacattatattctctagggcttgctgagcattcggtttttaattttaattcgaatttttggtgcaccagatgtgccttcagatggctccggtttggtggtatctatcttttttatttctaatttagaatcatatccagtgggttcaacagatgtaacctgtctagcaacaacgtccactacaggctcctctttcttgcttgacatatctatggaggatctcttcgcttcatcactctgaagttttgccagttctttttccctacgttttttctctttctttaatcgtttgcgctccaaatactctggatcatcatggtgtcctttattactttcccgtttccgtttcttttccttgcttttgtgcttttctttcccccgagcagaaatttctttacctaatggttctccgtcaggatcaaatcttgcaactgaaagagtttgaaggctggcatatcgtcgtgcatcagcatctatattgttatcctggataatactggatgatgatggatcttctggctgaggttgtgaataaactatacttgaatcagcagtgcactggagttctttgaccaattcatcaccatcactcaaaaactttgcactaccaatgctggcagtcatgcgtgaaccgcgatcatgccaagaattaacttcatcaatattgtgattactgatgctaacagtctcagcaaaattcctctggggtgcatctacagaaactgaactgctagctccatgatccatttcattacgaccacctaaagaacgttcaaccacctgattatcagtatcagccctactggtggcagaagattgtttgaccttgattttaatgggtctctttctttcatggctattggatacagtatcagcctccttagaaatttcatttggagcttcaattggtgcttcctggggaaattcagtaaatacctctttgggcttctcaagggacgcttcctttagagcttcaaggtgcacctgtgtgggagcttcacaaggttggtccttaggagcttcatcaagtgcgtccctcaagccctccattgtcgggcccaaattttgtgtaagatcatcaatagagcttggcagatccaaaggtttgctttctgaatcaagagcaagcatgttcttttgatagttactagcttctgtaagactcatatgcagcattctattttctctgggaatcccatgaagagttgggtgtcttcttgcaagtatttgtaatatgcagaacaagtaatgccggagaaaggcattattaaaagctatacgcccttccagtaaattaagcatagagacaagagtttggcttgtaatttcgtcatttgaattcaatccatctctcatctgacatagcctcataacatgggtggctagttttaactgccctcttaaggaatgctcctcctctatgtatttgataaataaaagcaaagctgaatccatgcccttgcagtggaattcaagatcaaggagtgctctacttgcttcaattcgaacttgccacaatgcctttatgtcccgaaaaggctttacaagtccataaactcgatcaagaggaatgaaccctgaaagctttaatgcaatctgggtcaatgtccggatacaactgatagtcaagattccattgtagcttggcatgagactagcagaagacattaccagaaatgtaaattatagttacaaataaaattaataaatccagcatgggggggggggcctacgtagctgagtagaagccggtcatgcgttt

SEQ ID NO: 2660 - DNA, 1347 bp, Glycine max
aaactaaattctctaaataaaatagttgaatacaaatccatcaggagcagctttgaatactcaagatagaaattttacatgaaaactcataggaatattggtcttattacacgaaacttgaaaacacacagtaaccattgtaattgaactcaaacgtcttttacataagccaaactgatacaacagtaaccacaaaagcagatatgagcctagaagtgttcaattaggatatgagagagatgccagcagccagcaagtcatcagacaaaaccttgtttgcagcctcagacgggtgaaaaccatcccaaaatacatactcagatgcattggcacatgttcctatggacttctgattgcacaacacagatgtttctagcaagcctgttccacaacaagccttccttgcttcaaaaaatccattttcagaagacttagtgacaaggtcatagagaggttggtagatatcaaggatggccaatttgagaccagaaagcgatttttgcaagctctgagatgtggtgtttagcttcttattgaagttaatagcatcattatttagtttaaccacacattggttgctatcagagccaaagagagtgatggctgctggcagacaacccattggaggtaatgatgtcacaccaatcctccttgctccaagtgcatatatattctgaatgaaagtggcatagctttgcaagagaatgtctgagaattgatcagcagtgtaaaccttgtaaagcagtggatttatataatagttctgaataaagtcactgttcccagcactgatgagatatatagcaccagatataattgatgaagcattaggctgccctactgttcccaccaatatattctggcactctttgtagtgttccagctgttggctcaatggaattgcatggtataacttggctgtgggatcatagtagccagaagcagctgaggcaaagttggcaccatttaagaggttgtttcctttggcctttaagttgaggtaagctggggggtaagaggtaaatccaaggttttcagctgtgtaatctgacgcaagctttccattgcaaaacctccctgttggattgtgattctttaagtctcttccataaggagggaagtttgctttaacaatggtgtataagtggttattatttcccacatcaaccacagagtccccaaatatgaacaatgcagggaccagaggctgccctttagccagattgaacactacaaccagaagcaaggaagtgaagaaataactagaagaccccatgcttttgagtttctcttcaacaatgagcttctttcagagagagagaaagtgcaggatttgaaaaggtctat

SEQ ID NO: 2661 - DNA, 1037 bp, Glycine max
attccaaatggcatatccaaattttatttcgttggctttttttttgcacttaccttccaaaaccaatcatgaaaccaccatgaataaaagttttgggcactgagcctagaatcaccgtaatatatctcgtacaaactgaattgcacatgattccagatctcctaagagaagttttcatcatcatcatcatactgtcaactaaagatttaatcgtaaatcttcacgaggcccataattagttcaatctgttatccttcatgaacactcactcaggttcatggtaagcaatgtaccaagttgatccgacagaaaactatagtagtttcagtccacctgttacctcatctaccacttcaacaggtccaagaattgccatcactgttctggaatttggtgcaatctgtgttctcccagcatcaattgtgatatgggtaggtaacttcagagatttagctctttcttgcaaagccagcatatcttcttcacattcaattttgacaaccaccttaggctgtgcagacatctcccacctattcaaagcctttggtgctcgacgaaggatctttttatagagacctaacgttgcatgactgcattgagcagcaatcttccctttacccattttaagatcattcctgacaacaagtatcatcttaaaatcatcgagaatttcagcgagttgttcaatctcaagggggtcttcgagtttggacttagtattcctcttcttattgtcgctgtcattgagaagtgaagcatctttttgtttagtcgataatttatgtgagaagaggaaacgagggggatactgagaaccaatgaagtagcccaaagcgagataaccagcccccaccagaatggcactcaaccatgacagttccattcttaagattcaatgttttagggtttcagacgaaggttagggaagaataacactcagcctcaacgtttttttcaccaacgctcaccggacataatagtaaatggtcaataaaatatagggggggggcctacgtagctgaccccgggggggcccg

SEQ ID NO: 2662 - DNA, 1333 bp, Glycine max
atatcatcaaccggtgtttttccttcactaaattgtagccgccttctaattcggcacaaaacttcagactttatttgatatgaagttgcagatttcattacagcatataaagaggtggatattgcaatgtttatacccccttcatgaactagaagttcagaggtggatattacaacgtttattggattaagcagactagaaatcacacaaacattaagggaaacgtgcttttggccatagatcagaatcagacaatttgttttttaaggaactcaatgatgagctggttcaccttctctggaatttgttcatgcacaaaatggctcccttctggaatatatatgatttccaagtccggcacaaaatttttcaccatcccacttcgaatataatcctccatgcctggaaagttgataacataatctttctcacccatgatcagaagtgctggaactgtaaccttcacgtcacttaagccagtttccacattgagactcctgtaaggaacctgcaatgcatatctgaatccagatttttcatataaagatgcataggtcgcaaggtcttcctcagagaaccatggtggtagaggagtacatgggtcaaacaagtccatgatttcttgatcatcagctgctattggaacctcacttctagagaagagagtgtagatgttccttatcactgatttcacaggaaagcggccaaaatctgcttctgccctcccaggctcctgccacctagtaatatagaagcctttggggagaaggtggttttggacagcagagggaccaggaagcatgaaaggaatgcctaaagttatgacagcagctactctttctgggtgcacagctgctgtaagataccctgggattgcaccaaaatccttgccaacaaggaaagcctgggtaatgtttaaagcatccaaaagacccactatttcatcaactagatcatacatggtttccttttctggctccgctggatgctcagagagtccatagcctctgaaatcaaaggcaatagccctataaccagcatttgccgcagcaatcatttggtgcctccatgtgtaccagatctctgggaatccatgcaagaacaccactgccttggagccacttccaatctctgccacgtgcagcttcagtcccttcacttccacttcactgtgctggatcttcgccatcatacaatgatgagcttatcaaagagtaaatagtgtgagagaaacacagtggaagaacaagaaacggtaagggaagtgcaaagggaagagaaaagttgtgaatatcaaggtcaacaactccagtgatccgcgcctgagcggccg

SEQ ID NO: 2663 - DNA, 1627 bp, Glycine max
  misc_feature (1607)..(1607): n is a, c, g, or t
aaggaaataatgatcaagaggtataagataaagaaaaacatttaatgccagagcatttttggtaccaataaatgtttcctgtctgttgttcgggctttcttttattcaatggttctgaaaaagagagttaacacattcaggattacacaatataataggaatctataatttatgaatcagagaaccagttaagaatttactttagaatcagctgtctaggcagaccagaagaaataagccagaattctcgtcatacaattaggtgacaggaattagagatgtgtaccaataagtttgtaaatctcccacaggatacacactactgactaagattgtaatctagctccatatactcttcttcatatacttcctcaataatccttttgagtgaattacagggtaatcatcaatgcagctcctcccttctcagaaagctatactaccaataatcaagcctttgaatcttttgcatatgatggtgatggctgaccttataggttcatttatcattaggagcaaggtgaggccaatccctttgatgcaacatattataaggatggtaagctgaggtggcggaggaattaggcatggggatgcccatgtggccatggggcatgcccgacatcatgggaggtggatatggcatggacatcaggggaggtggatatggcatggacatcatcggaacagagagatgaccatgaccatgaccatgaccatgaccacggccattgctatggccatgcccatgcccatgaccattgctatggttactgggaggagcagagtcatgcaagctctgaggcacaggtgtcgacgcaaataactgatccgaagcagaaggaccctcgttggagagaccctgcatccgtttcaggtagagacgatacttctggagatggcttgcgacattctcgcgggtcaacccttccacgttcatcaattgcataatcgtcttcggcaccgcgttcttgatcccgaggtgcgccaccacgtcaacgaacctcttgtgaagctgtggggtccacaccagccgcggccgcttcaccgccgtccgctccgccgaggtctccgtctgaaccgccgagtccgcctcctcggccgcgccgcagtcgatcttccgctgcttccgtgaatccggccccgagccgtcgcgatcgtcgtcctcctcctcctcctcctcgacgcctccgtcgccgtcgccgtcgtagttgtggttgttgttggaggaggagaaggcctggtgcacgctccctccgccgccgcggagcgtggagagcgtgttgcgagaggcgcggttgacgtcgaggagggtgcggtggggctccggcaagatgctgaaggccgacgcgagttccggcgggatcagcggctgagagagaggcgtgagatcgttggcagttgggagacccgcctcccactccatcacgcgctcttcgtcgtactcgctcgtcttcaccggggcgggcggcctgcgtagctgagccgtaaaaaaaaaaaatatatatatatatatatatatataaccgtctctcacacactcttctatgtccctaacccaaacagagacagggatatatatgtgaaactgaaactgaaactgaaancggttatggtattgaatttg

SEQ ID NO: 2664 - DNA, 1180 bp, Glycine max
tttaagtgtaattttccctttaaaaactttattattaactgatgtggttaccatttaccataaaaatatatgccgagaagttttactgccgatagggacaaacattttgcaaccttctgaatatttttaattcctacacaattcatggttctagccttctaggcataaccaaaacaacattttgcaaaattggccaaattcccaatctttcctacatgttgcgaatcctctgtatcgaacaaccaaattatccggaaactgtctagctcccgtttctcctaacgcttcctcattttagaccttgcatattcaatgtgcatgccaccccgatctgatgatggcagcaagcttccctgaagctcctccacaactttagcagcttggtcagtttcctcaaaatcaacaaatgcaacaggcattcctcctctggaacgcattttgaccatgttgaatccagtatatacagaaaaagcctgcttcaattcatcttcagtgcaattaggaccaagatttgcgataaaaagagtggaacacagtcctccagcactgccctttccatgttgctccacagatacagcattgtcagaacctacagccgtttcatcacttgtcatgattgctatatcaccctggttgtcaccactgtctgatggttcatcagggtcactgtcaccatcatcacttgatgatccctgaagatcaggctcccctgtggaccttttatctataaccacgtaggcttcaccacctggtttacgcttcctcctagagtttgacctggcaagttcaatatgtaaaacagatccagtttgaggatcaaatttcacaccattcaaggcgtgcaacgctgccattgccgattggtggttgaaaaacgtggcgaacgctacgacctggttggcgcggccggtgtacttgagttggcaggagtcgaagccggggcggcggcggaagaggttgtgaatctcacgcgccttcacgtcgtctgggagaccggagacaaataacgtgttgatgttgctccgctcatcttgttgttggtaaaggtagtacggatccaacggcggatgagccatgggcgccgtcgtctgcgacggcgatggtcgacgccggagaaggtccgatgacgctagcttttcttttatagagccgattcgcctccggggctgccgaatgccga

SEQ ID NO: 2665 - DNA, 1286 bp, Glycine max
aagtgtaatttgcccttaaaaagctttactactgatgtggttatcatttaccataaaaatatacgcagggaagttttactaccgataggggcaaacattttgtaaccttctgaatttttttaactcccaacatagttcatggttctagccttataggcataaccaaaacaacatatacagtaatcactttgcaagattggccacattcccaatctttccctacaagttgtgacttgcgactactcagtatcgaacaaccaaattatccagaaactgtctagctcccgtttctcctaacgcttcctcattttagaccttgcatattctatatgcatgccaccccgatctgatgacggcagcaagcttccctgaagctcctccatgactttagcagcttggtgagtttcctcaaaatcaacaaatgcaacaggcattcctcctctggaacgcattttgaccatgttgaatccagtatatgcagaaaaagcctgcttcaattcatcttcagtgcaatttggaccaagatttgcgataaagagagtggaacacagtcctccagtactgccctttccatgttgctccacagatacagcattgtcagaaccaacagccgtttcatcacttgtcatgattgctaaatcaccctggttgtcgccactgtctgatggttcatcagggtcgctgtcaccgtcctcacttgatgatccctgaagatcaggctctcctttggaccttttatctataaccacgtaggctccactacctggtttacgcttcctcctagagtttgacctggcaagttcaatatgtaaaacagatccagtttgaggatcaaatttcacaccattcaaggcgtgcaacgctgccattgccgattggtggttgaaaaacgtggcaaacgctacgacctggttggcgcggccggtgtacttgagttggcaggagtcgaagccggggcggcggcggaagaggttgtgaatctcacgcgccttcacgtcgtctggtagaccggagacaaatagcgtgttgatgttgctctgctcatcatgttggtaaaggtagaacggatcgaacggcggctgagccatgagcgccgtcgtctgcggcggcgaatggcgattgtggtcaccggggaagctctgtaaagacgatgacggaggggaccgccgcagaacggtgctagcttttgttttgtacaaacgaaacgaaattctttagtatagtgtgagtgtcgtttatttacttcccttcccccctctggcgcctgcgcgctgcccctaaaatta

SEQ ID NO: 2666 - DNA, 1574 bp, Glycine max
cggccgctcttcactactattaacctttcacatcacaacacaatctcatagcaccaaaaacatagtactatacagccccactttctctttctctttctcttcactctaaagtctaagcatccatggccatggcgtctgcaaagctcaacaccttgtcttcccagtggatcgcccacaattccttctctcctcgccgtggatcctcttctcgccgagtctctcttccgatccgcgcttcttcttaccaacacgaactcgtccaaaccgccaaatctattgcatctcccggtcgtggaattcttgcaattgatgaatcaaatgccacatgtgggaagcgtttagcatccattggattggacaatactgaggtgaatcgccaggcctataggcaacttctgctcaccacacctggccttggtgaatacatctctggtgcaattctttttgaagaaaccctttaccagtcgacaacagatggaaataaatttgtggattgcctccgcgatcagaacattgtgcccggcatcaaagttgataagggtctggtccctctgccagggtcaaacaatgagtcttggtgccaagggctggatgggttggcttctaggtctgctgaatactacaagcaaggtgctcgatttgccaagtggaggacagttgttagcattccatgtggtccttctgcattagctgtcaaggaagcagcgtgggggcttgcacgttatgctgctatctctcaggacaatggtcttgtgccaatcgtagagcctgaaattcttcttgatggagaccacccaattgagaggacgctggaagtggccgagaaggtctggtcagaagtcttcttctatttggctgaaaacaatgtcctttttgagggaattttgctcaaacccagcatggttacacctggggctgaacacaaggaaaaggcttctccagaaaccattgccaaatatactctaaccatgcttagaagaagagttcctcctgctgtccctggaatcatgtttttgtctggtggacaatccgaagtggaagcaacactaaatctaaatgccatgaaccaaagtcccaacccatggcatgtttctttctcatatgcacgggctcttcagaacactgtgcttaagacatggcaaggacaccctgagaatgtggaagctgctcaaaagtcccttttggtgcgtgctaaagcaaactccttggctcaacttggaagatactctgctgagggtgagagtgaagaggccaagaagggaatgtttgtcaagggctatacctactaaaacttttggagtctttggctttcagttgttttcttttagttatttatcattccttcttagcagtgaattcgaaggggacttagatgtgctgtattttattttttttcaacttctagcaaatgagtttgaataaattgaagctagaaagaaaggttttcttggtaaaatggaggttggggattagtaaaaacccaaatgggaaaagaacatgagaaaagaacagaagaaaaacaaagtttactgcatagttattgtttatttgcctgttcagatttcgctcttggc

SEQ ID NO: 2667 - DNA, 1333 bp, Glycine max
tcctctagagcggccgcttttttttttttttttttttgttggtggtagccccaaaaccaagatattttatacaaaatgttggctaatgaacaaatgacttgctatttgggtcaaaaactacattccattcttcacttgcacaaaaattatcaaagtaggagacatcacaagagggaaaggtggggatgaatgatgtgtatgggaacatctattcggctttactggattttctcttcattcggctaaaaggtccaactgttcgatccataatgtacatgtaaatgatctggctccaagatctgtaggacgctaaattatcataaaactctggagcaatctccttcaccttgtgaagcttgtttccaggaattcttgggaaatcatggtgttcattatggtatcccacatgccaagtgagataattcagaggtccatagtaagaataagtctcctggtcaggattgaacacataatgctcggaaatgaagtgaccagccattggatgcatcccaccaccaacaaaagtggaaagtatcaaataggcaagggctttccagccaaaaaagtaaaccattgacacatcaagtgctatctgaacagagaagttgatgaattcccaaatgccaggaggctttggcttaagaaagagaggtctaagtgcataaaaaaagagctgtaaaaagacccaaatggtttttgcaataatatttttcacaagacggacttcagtgaggctagggacatccatatcaatgccatctacaccttggaagcggtggtgctccaagtgatacttttggaaggtaacagacatgggcacacctatagggaggttagcaaaaatccccaaccaacggttgtagactggggttgagaaggccaggttgtgactcaactcgtggatagccaaaaagagattgtggttgagaaaagaaccaaaaaagtatgctactaaaaatatcttcagccagccagcatcatgaagtaaagcacccgtaccaagctgaagcagaacaactccactaatcttgaagaaagcagagtggtcggggccaaagagttgtttgatttgagggtatttggagaggatctgacgacgtcgtgtggcatggggttcgtctgtgtaggaccagaagaagcccccggctactgcgaccccttctcgatcttctcctctacccattttcttttctctcccttcttctctcacggcacaaacttgatgaatgaacaatgtgtttttatttatacagaggaatgagaaagaaataggaaagtgcctaagaatagagagaggacataattacatgaccctcactcgccctggatggat

SEQ ID NO: 2668 - DNA, 2130 bp, Glycine max
aataaaagtaaaagtacttattttgcttgagttgcctatgactgtgcttgagcacatgcatatgcccggccgaggtagtctccagtgctgtttttcgctgcataacacaagacaaagctaacacaatcatatggatcatgacgagtgttcacaacacaacttgtttcaaactgtgattgagccaccgatggcaaactttctcaaaattttcgccaacatattaactaaacagacaaatgttacatgttaaaataacatcaactagaacaacctggaaaatagttacatacatccctgcaaggaggaggaggagagaatcatagggacaaaaccatgctgcttaagacaaaatggcatcacaaaccacaaagaaattctgcaagccttcattgttaaataatctcagtcatatgcttctataacattcacgagatgaatcaattgatccgattgatagttaatatttggttctgttcctgctgtttgcttagtgctccgctgctatgggttcttgtgccaagttgagctgtggtttctcttcaacgactaaatcaccattcacaggaagaactttacttgtctcattcaataaggcattgttctcttcagtggctgctgcagctatttgaactttctctttccctcttgcattggataaggtaacttcagccgttacacttgataaggaggttttgccaccattcactgccttagatgaggttctcacagacgctgaattggatgaactgatcttttcagaagccagtcgtggaggaagagactttcgttgtggcttctttggatgaacaggactaatgccattagtggggttagtctgagacattttctcatccagacttaaacgaccttgtcgagcactgttgctagtgtttccttctggctctgaatttattgaactcttcttgcgaccaagcttgggagatttagctctggtagttggcatctttcttaactccgccctaggaggaggaggctcctggtagaagcttggcattggagttgctttaaatcctagactttttctaagcatcttaatctcggcttcttggttctccttggtttttgcttgcaagttactctcctccacttcctttgcgtgaatcttttcctcaagcttagtgtagaactcttttcttctctcagctcgctcatcacacttgaaactgaatccatattttgggagcgcccccaccctgcgaggtttggcatcttctgcagtaggagaagaagattctgcttctccttgaagattatcatggggatctttcttcgataattgtggtctagtcttctccattgattcttcagaatgtgctgcgttagactttccagggtgcttggacaatcgagcctgcttgtcactcaatgatctgtttttaataggctgtcttgggtgagagtctgaagcaaaagtaccatttgaaacagaagatgctacctcttcatcttttccatctttgttctttttaactgaacttgcatgactgcctctggggcttggtggctttgcattcttattctttgcaggaccttttcctacttttaattgctctgtccgatctatgatttctgcttcctcttccttagaaatggtgacattgttcatatatatattatcgtttgatccttccttgatttcttccttggacgagtaatcagttgcagtgctatcatactggatgaaattttcaagatttccatttgtagctgcagtttctataattttggtaacaccagggtctacattggaggcaataccatcctttccagaattagacagttcgtcatgaacaccattttggtggacttcttcaagtccatcagctggcaaaaggttgcttggatccatcattcaagccaagctgaggtgtcactgtcaagagccgaatggcatcgtgggttcagagatctgaggaatgggggatccgagtccgaccaacaagatccgaaagattcaaactgtggtagaagatgttgctgatgctgatgctttatctattattttttattcttaaaaatgaaataaaatataaataataataggaaaacagagagaaggttgagacttgagagagtgtgaagtgtgggggggggggcctacgtagctga

SEQ ID NO: 2669 - DNA, 1068 bp, Glycine max
  misc_feature (62)..(62): n is a, c, g, or t
ttttttttttttttttgatcaaaagataaattaaaattttaggaagttagaccgcagttganaactgttcactcaatgaccgcagatagatacataacacgtcaaaagatcaactagctactctgacttaccgagtgctgcatgctaaaggaacgtcctacttgaatgtttaagttagaccactcctgaaggaagtcgaagaacaagttgtcccccaacaagactcttgacgtagtagtagcaaaaatctgccagaatgaaagtttggacaatttctgatagaagaaccatagaaggccacaatccataacccaatgcagtcagtagacgtccacgagtatctaatacctggaggacccaatgtgcacaactcaagaaccttgcaactccaagagcaaaaacatagtgtgctgtgaatggttcaacaatcttagtgttctgcatgacccgcagctgagggagaacagaaacagcttcaagataaacacaaaatgcccagagaatcctattaagtggatgatgccgggttgttggatgaattagcaaggacagcacggcacaaggtataaccacatagtacattgcaaggttgtccttatcatccatataactggatttcaatttgaagcgtatcatataaataacccaaagggttgtgaccaaggttgccatatcgagtagggtgtgtatatcatactccatcacaaaactgcaataaagtctaacacctagaaacatagccgtcagctcctgcgacttaagcgaaagcccggcacaggttttttccctggtgagtttgtaaatgaggacggagattcctaacgcatggacaagctcggcggcgacgaagaggctgtcgtggtcgtgaacgaagattctgaggaagagcagggctgccaggccggacagcaccgcgagaaaggccttcatcttgggcggttggcgccgaacccatgtggtgacggcgtggatgggcctcttgcttcccttcatttttttgttttccagcagattaattgattgtcttgtcttctgacttgtgttgtgtccttcttcccgtgataatct

SEQ ID NO: 2670 - DNA, 1067 bp, Glycine max
attctctcacttttaatcccacgccttcgctttctttctttcttcttttttctgccgaggaaaagaaagaaatagaaaaagaagaaaaaaacacagcgtcctagatttcctcttctctgcttcggaagaaagagaaaacaaacaaaacaatggcgttcgcttctttcctcggcagagtcctcttcgcttctgtcttcatactctctgcttaccaacaatttaatgaatatggagttgatgggggacctgctacaaaagcactcagacctaagtttgatgcctttacacatcgggtgcattctcaagtgggctttcaaattccagagattaatctgaaatttttaattgctggggctattgctctgaagggtcttggaggggttcttttcatatttggcagctcttttggagctttgcttctgctcctgcaccagctgattgctactccaatccattatgatttttacaattatgatagtgaggacaaagaatttactcaactgttcatcaaatttacacagaatatggctcttttcggggctgtattgtttttcattggcatgaaaaactccatccctaaaagggtacccaagaaggctccaaagacaaaaacatattagttttgcagcattgaggacccctttcaagaagtgggggctgtgggagctgttgtttcctggtttttcatcatatcctctccaatctggcaggatttgcaccgagtactctcttctctggttcagaaccaatcttcctccctttgagttttgtagttttggcttcacttggattatattattggctactattattatttttgtatgatctgttatcacggcgttaggaactatctttcaattgccaaacttgtctgtcaaaaaggaaaacaaaaggatgagaagcctttgcgcttaatcttcacagtgccaatttcattctgttctatctatcttgatgtaaagtctttgaaagtctggcacgtgaagttattatttaactaaaatggagttctcccactactctcgcaatcatacgaaagtggtggcataaaaaacaaaaaaaaaaaa

SEQ ID NO: 2671 - DNA, 506 bp, Glycine max
tcagctacgtaggccccccaccccactactactagttttgtgcatttgcctcctcttctcaagtctctttaatttctcaaaggaaaaagaagaagaaacaaaattttattttgagaaaaaaatggaggcattgaagatgaatcttttcttttttgtcatggccatgctgatcatggcagcatcagctgcagattcaccagctccaagtcccacatcggatgctaccaccttattcgtgccaacagcggttgcttcactcgttgctcttgcttttgggattctcttctgagtttctcaacaatgaagcaaacaactaattgtattgtatgggattcattgtgttttcatcattattatgatccatattgttttatgacacattcattccccactgtacttctttacttgttatgtttatatgggctttaatttgaatttgatgatgtaatattaatgtgatttggttggtttcattaaaaaaaaaaaaaaaaaaactcgagactagt

SEQ ID NO: 2672 - DNA, 1199 bp, Glycine max
  misc_feature (1197)..(1197): n is a, c, g, or t
acacgatttccattcaaaaaagcctaatttcccttttctgcatcatatttttcattctcccacaacacaacaccttttccttttcccttccgttggtgccattcgtgcagcaccggatcctctcatttctccggcgataactctcccttttccggcgaattcaccgcttcctcgatatgaatcccgagtatgactatctgttcaagctccttctgattggagactctggtgttggtaaatcatgccttcttctaagatttgctgatgattcatacattgagagctacataagcaccatcggagttgattttaaaattcgcactgttgagcaggatgggaagacaattaaactacagatttgggatactgctggacaagaacgatttaggacaataactagtagctactatcgtggagcacatggaatcattattgtttatgacgtgacagatgaagatagcttcaataatgtgaagcaatggctcagtgaaattgaccgctatgccagtgataatgttaacaaacttttggttggaaacaagagtgatctgacagcaaatagagttgtctcatatgacacagctaaggaattcgcagatcaaattggcatacctttcatggaaacaagtgcaaaagatgctacaaatgtggaagatgctttcatggccatgtctgctgccatcaagaatagaatggctagtcagccttcagcaaacaatgcaaggcctccaacagtgcagatcagagggcaacctgttggacaaaaaagtggttgctgctcttcctaaccaggtggtgctgcttggtctacacttaccttttgcatgtaaggggcatatgctatttcactaaatagtggaccagtgtcacgtaatccaacctgtggtttgggaattggcctagatgatcccattctttaccatatacttgaatgctatgattgtgcttagtacttgttaatgataaaacttttatatttctgctcatctatttttaccaccatggcctagttttaattttttttacttgtttggtttgaaacacgtgccatcttttgtgattgctccatgactgtcactgaacattagagaacaaaaagttgtgaacaatgactaatggcaaacaatcatggagaacaaggcattgcatggagaatctgttttcctcgcctgattgaataacaaactttatatgatnaa

SEQ ID NO: 2673 - DNA, 1126 bp, Glycine max
tatggggtttctccttatcatattgaggttgcagcgaagacgaagaggaaatgaaatgagcatatcctaatccagttatccataatttcataggcataaacgagaaattgagagagaatgtctcgtatctctacactctatcttctcgcttacaactcctttcaggccattggatggacgatttccttaactaagattttgtacaatcttctcgtcactgcatccatcaaaggaacctatgcttccgccgccagcttaatctgttttctgcaatgcgctgcattcttggaagttatacacggagccattggcattgtgcccagcggggttttgcttcctcttatgcaatggggaggaaggacgcactttgtgcttgccattgttaggaaacttgatgagcttcaggaattaccttcagtttttatcacttttcttgcatggagcatgggggaggtcattagatattcacattatgctttcggttgtttgggaaattgtccttcttggatgacctatctcaggtacactgcgtttattgtgctgtatcctttgggagtgggtcctggtgaaatatgggctatgtaccaggctcttccagttataaaggagaagaatctctatgcagattccttttcaagcctcccatttagttattatgatttccttaaggtggtacttatagtttatccatttctctggttcaaactttacctgcatatgttcaagcaacgacgtacaaaactatataaacgccatgacaagaaaagggcatgaggagctttacaaaactccattcatcttggtcagtgaatggagtcattgaattgattattgaacttccgaacttgtaattttagttccacacacgaagtattttgtgaaaaaaattaataactttcggagacactcgttcaaaatttatttatttgctactattttttttttttcttgactagataagagtgccaactgccaaataatggaattgttgctttcgattatgattaagatggtagtagttagaagaaagaccgtgatttgtaatatattgtcttttatttttatttttatttggtcttaagttatagactatgagtggcttttaactcattgaatcagagctcgt

SEQ ID NO: 2674 - DNA, 868 bp, Glycine max
agcttggcggggacccaatccacttcctccaattataacacccaccaaagaaccatggctacccagttcctcaaatccctccttctcctctccaccttaaccctaaccatctcagcagaatacacaggctttgtgggcacaatagacccaaagtcaataggcataaagcacaagaaaaccctaagccacttcagattctactggcacgaagtcttcagcggagaaaaccccacatcggttagaatcattcccgcactccccaaatacaacacaaccacaacctttggttcggttgggatcttcgacaacgctttaactgtgggacccgaggtttactccaaggttgtcggaaaagccgagggcttgtttgcctccacgtcgcaaacgcagttggatcttttgctgattttcaacttcgcattgacacaagggaagtacaacggcagcaccatcacgttcactgggaggagccccctctcggagaaggtgagggagttgcccattgttggtggaagtggggtcttcaaatttgccactgggtatattgagtccaggactctcagttttgatccccaaacgaggaataacacggttcagttcgacgtgtatatttactattgatgaatgtttaatgtgttttttttttttttctttttttcacattgatgtgctgtcacgactttgatgtttgtcactttgtttctatttaagtttcctcttttcatgggggcacgtggtgtcatggaataaagtcatgtttgggcaaatttaatgagttggataatgattcttacttttatttcttattaataatgtcatggactcccattatgtacttattatatatgtttcagtttctctctaaaaa

SEQ ID NO: 2675 - DNA, 1660 bp, Glycine max
tacggctgcgagaagacgacagaaggggatcaccaacacggtgtgtgtccttcatcctcctggagagcccctttccttacacattccgctttgactttggaggctaagggcctaaggcaggtttttttgctttgtcaggttcccaatcactgtgatatcatggaatccccacaatccgttgtgtcaccattcaagagctctgtcttgggtgaagccgagaagtataggtctgatgttttcacacaaagctcgggtcctttgtctaatgacattgaagtcaatggaaaggaagctgccgtggttaatccagaggaatccatcggtgttgttgatgtttcagttacctaggctaggcccccccctaacatctgcatataccacaagcaagatgtttatgctaagatttgcttgactagtaatcctgagaattctgtctctaccaagactatcaatggaggaggaaggaaccccgtgtttaatgagaatcttcgtctaagtgttaggactgttgattctgctgtcaaatgtgaaatttggatgctgagcagggtgaagaattatctggaagatcagttgcttggttttgctttggtgcctttgtctgaagtactggtgaaggatggaaaactagagaaagagttctctctttcttcaactgatttattccattccccggctggttttgttcaattgtctcttgcttacaccggtgcttcacctgatgttatggcgatttctgcaatgcctactgagttggccacaaatggcaccgagaaggactcagaatcatgcgagtcactggccagagatttggacaaaattgaattcccagatccaaaaattgtaaatgaagaccactggatggtttcggaatactttggcattccatgtgaggagagccagtgttctgatagcttgaccactactgatactgaaaatcttagttctgaagcaggtgttcagattgtggagagcttctcagcatgcagtgttgaatctgtccaacctcctaaggctgattctccacccagcagtgtgtcaacaaatggggtttcatctccttcagtggctgcaagctcagactcatctgatgttgctgcttccaagtctcccagtcaggaacaagtttcagccaccaaagagaaaaatggggatgtcaaagatggtgggagtgattcctcaaatggggtgctgaatgagtcattccctaagcctgttgtgactgttaacatcgagccggagccgaatgtggtgcagcaggattttgtagatatgtacatgaaaagcatgcagcaattcaccgagtcattggcgaaaatgaagcttcctatggactttgaaagtggaccaactagttcaggaaactctagctctgaacagaagatacagacaccaaagagcactaactcccgtgtgttttatggaagcagggctttcttctgaactttggatcaagggaaatactttcaggtgacttagattttagaatgaaaactgatatcagtagtgaatgaaataatgcactgtccagtgggattctcgcttctgtacttgttgatctgttataggtaacagggaatcttaactttgtactctcacaggcttggtcctatcttaactgctaaatgaacttttttctgtcacaaaaaaaaaaaaaaaa

SEQ ID NO: 2676 - DNA, 1802 bp, Glycine max
cggccgctcaggcggcgggcgggaaatcctggaaaaaaatgctgcgagcatgttccctacacggatccatacactcccagtaaacatttttcattctcagcaccagtcagcaacatccctttcctttccacaagacaccaaagttcacagcttttttgttctttcacctcgattcacgaactgggtcatcctctgattgtggattattggatttcattttgcgacacaccaaacccccaagactttgacttccaaagccaggttgccagttactgttgatatcataatggattccccacaatctgttgtgtcacccttcaggagctcagtgttgggtgagagtgagaagcacaagtctgatgttttcccaggaaactctagtcctttttccaaggacattgaagtgaatgggaaggaagttgtcatgtcaaatgtagaggagtatcttggagtgcttgatgtttacatacatcaggccagggacattcaaaacatttgcatataccacaagcaagatgtttatgctaagatttgtctgaccagtaatcctgagacaactgtgtctaccaaaaccatcaatggaggaggaaggaaccctgtgttcaacgagaatcttcgtattgatgttaggactgttgatgcttctctcaagtgtgagatatggatgcttagcagggtgaagaactatcttgaagaccagttgcttggttttgctttggtacccttgtctgaagtactagtccagaatgggaaacttgagaaagagttctctctttcttcaactgatctattccattctccttcgggttttgttcagttgtcgctttcttacactggtgcttcacctgatgttatgacaatttctgcaatgccgaacaaggtggccacagatgccgcagtgcaggactcagaaacgtccgagtcactggccagggatttagacaaaatcgagttcccggatccgaagattgtcaatgaagaccacttgatggtttcagaatacttcggtattccgtgtgaggagactcaatgttccgatagcttggctacttctgatgctgaaaaccagagttccgaagccggtgttcggcttgtggaaagcttctcagcatgcagtgttgagtctgttcagccaactaaggttgattcccctcctagcagtgtgtcaacaaatggggtttcttccccttcagtgccagcaaactcagaatcatctgatgctgctgcttccaagtctcccattcaggagcaagtttcaggcaccaaagaggacaaaaatgtggataccaaagatagtgagagtgattcctcaagtggggttcctagtgaatcattccctaagcctgttgtgactgtgaacattgaacccgagccaaaggtcgtgcagcaggatatagtagacatgtacatgaaaagcatgcagcaattcactgagtcactagcaaaaatgaagctccctatggacttggaaagtgaaccaactagttcaggaaattcaaccactgagcagaaactacagccatcaaagagcaataattctcgtgtgttttatggcagcagagctttcttctgatcttttgcttcccttgttcaagggaatacgagcagtcactgtagatttttagaagaaaactgattttagtagtgaagtgaaataatcaatgtactatcctgtgtggtttccccttctgtatttcatcacatgttggttgtagcttacagggaatataactttgtactctcacaagcttgttgctatcttaactgctacctgaacttttgtgttaaaaaaaaaaaaaaaa

SEQ ID NO: 2677 - DNA, 1855 bp, Glycine max
tacgtaggccccccccccgagcatgttccctacacggatccatacactcccagaaaacatttttcattctatttctcagcaccagtcagcaacaacaacacccctttcctttccacaagacaccaaacaaagttcacagctttttttgttctttcacctcgattcacgaactgggtcatcctctgattgtggattattggatttcattttgagctacaccacacccccaagactttgactttcaacccaaaaccaggttgccagttactgtgatatcataatggattccccacaatctgttgtgtcacccttcaggagctcagtgttgggtgagggtgagaagcacaagtctgatgttttctcaggaaactctagtcctttgtccaaggacattgaagtgaatggcaaggaagtagtcatgtcaaatgtagaggagtttcttggagtgcttgatgtttacatacatcaagccagggacattcaaaacatttgcatataccacaagcaagatgtttatgctaagattagtctgaccagtaatcctgagaccaccatgtctaccaaaaccatcaatggaggaggaaggaaccctgttttcaacgagaatcttcgtattgatgttaggactgttgatgcatctctcaagtgtgagatatggatgcttagcagggtgaagaactaccttgaagaccagttgcttggttttgctttggtacccttgtctgaagtactggtccagaatgggaaacttgagaaagagttctctctttcttcaactgatctattccattctccttcaggttttgttcagttgtcgctttcctacactggtgcttcacctgatgttatggcaatttctgcaatgccaaacaaggtggccacagatggtaccgtgcaggactcagatacgtccgagtcactggcccgggatttagacaaaatcgagttcccagatccaaagattgtgaatgaagaccacttgatggtttcagaatacttcggcattcggtgtgaggagactcagtgttctgatagcttggctacttctgatgctgaaaatcacagttccgaagccggtgttcagcttgtggaaagcttctcagcatgcagtgttgagtctgttcagccaactaaggtcgattccccccctagcagtgtgtcgacaaatggggtttcttccccttctgtgccagcaaactcagaatcatctgatgctgctgctgctgcttctaagtctcccattcaggagcaagtttcaggcaccaaagaggacaaaaatgtggatgccaaagatggtgagagtgattcctcatgtggggttcctattgattcattccctaagcctgttgtgagtgtgaacattgagcctgagccaaaggttgtgcagcaggatatagtagacatgtacatgaaaagcatgcagcaattcactgagtcgctagcaaaaatgaagcttccgatggacttggaaagtgaaccaaccagttcaggaaattcaaccactgagcagaaactacagccatcaaagagcaataattcccgcgtgttttatggcagcagagctttcttctgatcttttgcttcccttgttcaagagaatacaggcagtcgctgtagatccttagaagaaaactgatattaagtagtgaagtgaaataatcaatgtactatcctgtgtggtttccccttctgtatttcatcacaagttggttggttgtaggttacagggaatataactttgtactctcacaagcttgttgctatcttaactgctacatgaacttttgtgttaccttcttcctttgtcgttctcttgatttggatgccaataattttgaaatcttatttcccctcc

SEQ ID NO: 2678 - DNA, 2135 bp, Glycine max
gctcgtccaaccaaaccccctaaaccctgccatccatggtgtcaaagtcgatacacaaacccaggattcaaccatcttaatgttggtaacccaaacagcatttcccatcacagtcaccctcatccgctaatggaactctcttcctcctttctactctccccaaaaccatgctcatccccgccacctaacttctctttctcatcctccctctccccatttccaattcaactcttgatcagaaacggaaactccaaattcccccaaaccccccctttccgaattatcgcggtggccttggagccgcaacaggacttccccagcgggaacagtccccagcgtctcctcaaggaactcgccgaacgcaagaaagcaacttccccaaagaagggtcccccaaggaggttcattctaaggcccccaatagacgataacaaattagcagaaaggtttctcaacagcccacaactttctctcaaatcgttccctttattaagttcgtgcttgccttcgtcgcgcctcaacaatgcggataaattgtggattgacgagtacttgctcgaagcgaagcaagctctgggatactctctggaaccctcggagacgctcggggatgataatgataaccccgcgaagcagttcgacacgctgctgtacttggcgttccagcacccgtcgtgcgagaggacgaaggccaggcacgtgcggtccgggcattcgaggttgtcttttctgggacagtacgtgctcgagttggcgctgacggagtttttcttgcagaggtatccgagggagtcgccgggcccaatgagggagagagtgtttgggttgatagggaagaggaacttgcctaagtggattaaagccgctagcttgcacaatttggtatttacgtttgatgatatggataagataaggaggacggagaaggaaggtcctgtcaagtcagtattttgggctttgtttggggctatctatctttgttttggtatgccagaagtgtatcgtgttctttttgaagtcttcggaatggatccagatgccgaagattgccaacccaaattgcgtagacaacttgaagatgtggattttgtatctgctgagtttgaaggcaagctaagctggcaagatatcgttgcatataagcctcctgcagatgctctgtttgaacacccaaggctattcagagcttgtgttcccccaggaatgcatcggtttaggggcaatatatgggattatgatacaagaccccatgttatgaaaacacttggatatccattggaaatggcagacagaatcccagaaattactgaagccaggaacatagagcttggacttggattgcagctttgtttcatgcatccatcgaagtacaaatttgagcatcctcgattttgctatgagagattagaatacgttggccaaaagatacaggatttggtgatggctgaaagattattgatgaagcatttagatgctccggggttatggctacaagagaggcaccgtcatcttcttatgaacaagtattgtggaagatatttgagggccaaacatctccaccgggttattatatttgatgataaggttcaagacacttatgagcataaccggagaaagagaaacccagccacaacagctgttcaacaagctcttcatgggctttcgtatcttgtttatgggaagcgtgatgtgaggcgtctgatgtttgaggtttttgactttgagcagatccagcctaaagaagtagtctaaatatagagacaaaagtgacaataataaaagctcttttgtttttcctttattatttacctcttgttttccttttctatccccttgatttgagcttttttcatattatgatttgatctgcctagttgtaggtgaattgcggattcttctttagaacttgagcttgtatataatcgttgtatttatttttttcggatattgcacgccctagacaagtagataacccaacgtacaaagatgaggatacatatgacttgttctacttgttggttctgactatggacgttggtattggtatggttattggtgaattaaactcaacattttccctacacaaatgagaatatagttggcattttgcacttttgtttattctccccccaaaa

SEQ ID NO: 2679 - DNA, 1221 bp, Glycine max
ctcgagccgggtcggctcgaggagaacttcctcttcgtttcgctgattttggggttttgcatcggaatgaggctagtggcgccctgagtggattaacacgtgttaggagattccagcaggacgatgcacatattttctgcagggagtctcagataattggtttcacatatgagctgaagctttcaacgaggccagaaaaatacctaggagatattgcaacttgggacaaagctgaaagtgctcttaaagaagctttagatgattttggcaagccttggcagttgaatgaaggggatggtgcattctatggaccaaagatagacatcagtgtatctgatgcattgggtaggaaattccagtgtgcaactttgcagcttgacttccagcttcctgatcgttttaagttggaattctcagctgaggatgaagccaaaattgagagacctgtaatgatacacagagccattctaggatctgttgaacgcatgtttgccatacttttagagcactacaagggtaaatggcctttctggctcagtcctcgtcaagcaattgtatgccctgtgtctgaaaagtcacaagcttatgcattacaggtgcgagatcagatccaccaagcagggtattacgttgatgctgatacaactgataggaagattcaaaagaaggtgcgagaagcacaattagcacaatacaactacatcttggttgttggagaggaggaagctaatacaggacaggtgagtgtacgagttagagacttggcagaacataaggttatgagtattgagaagctacttgaacatttcagagacaaagctgcagctttcgaatgatactttgcatgtgaaaactgtcgaagaaaattttcagccccaaataccttagttttacacagttgtgtgcatttttattttcaacttaagcaatttatcctgattttatttatgatttgaatgatcactgtatttcgcactagaaacataatgtgaatcttggtcatacctggagcgcactctggttgatctttatatcgtttttgtctacgttccgagctttatatcagcattagagtttacatgtcacatgtttttattttcttttaagttggctgacatttgaggaaaatatacctttttgagttggtcctcaattataagtaacttgtctgagtttttcttaggacccaggattctctcgtggattatttagctcgtaatc

SEQ ID NO: 2680 - DNA, 994 bp, Glycine max
tcccacgcgtccgacggctgcgagaagacgacagaagggggactctgatgcgaacgtaaccaggctctggttttgcggttagggtagctctttctactcaaaacaaaacaaaacatcaatttctgtttcagttcgcggagatcaatatttgtcgctgaggtcgatcgtcgataaaaggcaatgtttttgtgggattggttttatgggattctagcgtcgcttggcctgtggcagaaggaggccaagatcttattcttgggcctcgataacgctggcaaaaccaccttgcttcacatgctcaaagatgagagattagtccagcatcagcctacccaatatcctacatcagaggagttgagtattgggaagatcaagtttaaagcttttgatctcgggggtcatcagattgctcgaagagtttggaaagattactatgcccaggtggatgcagtggtgtacttggttgatgcttatgacaaggaaagatttgctgagtcaaaaaaagagctggatgctctactctctgatgaatctttagcgaatgtccctttccttgtccttgggaataagatagatattccatatgctgcctctgaagaagaactgcgttaccatttgggcctgactaacttcaccacaggcaagggtaaggtaaatttgtccgactcaaatgttcgtcccatggaggtattcatgtgcagtattgtgaagaaaatgggttatggggatggtttcaaatgggtttcccagtacatcaaatagtccgttagcaagagatggcttggtatctgatttctagaggtttgtttttctagttaagatttggaggtgttgttggtacgaaattgcagtatatttcaattttatttatataaaatgactgggttgatttgtggtgattgatgattttttaggtgaaaattttaggtggcccgaaataatacgcaagcttaaacctgttttttaccattacgtttgccaccaaattaaagaa

SEQ ID NO: 2681 - DNA, 2692 bp, Glycine max
gtacgcccgcatttccggtccggattcccgggtcgacccacgcgtccgcccaaacccacatacggctgcgagcacaatatgctatgcgatgctctctaatccgtatccgccgtcacgctcctttccaccacactctccgctctctcttgccgattaaccgtttctcctcctcctcctcctcctccgcctccgccgccgccgccgccgccatggttgctcacgcgaaggacgaggcgtaccttagcgcggcgattccgaagcgcgtccgtctcttcgagaccatccaggcggagcagcgcacgcagcgcctctcgctttcgccggatcctatcaaggtcactctccccgacggcaacgtcaaggacgcgaagaagtggctctcgacgccgctcgacgtggcgcgcgaaatctcgaagaatttggccaacagcgcgctcatcgcgaaggtcaatggcgtgctctgggacatgacgcgccctctcgaggacgactgccagctccagatcttcaagttcgacgacgacgaaggccgcgacaccttctggcactccagcgctcacattctcggccagtcacttgagacggagtatggatgcaagttatgcattgggccttgcactacaagaggagaggggttctattatgatgcgttttacggggacttgggtctcaatgacgatcactttaagcagattgaggctggagcattgaaggctgttgcggaaaagcaaccctttgagcgcattgaagttacacgcgatcaggcacttgagatgttttcagataataagtttaagatcgagattatcaatgatttgcctgccgacaaaactatcacagtatacagatgtggtcccttggtggatttgtgtcgtgggccccatatacctaatacatcctttgtcaaagcaattgcgtgtttaaaggcttcatcagcatattggaggggggacaaagatcgggaaagtttacaaagagtttatggcatatcttatcctgatcagaaaagtctgaaggaatacttgcatcggctggaggaggctaaaaagtatgatcacaggattttgggtgtgaaacaggagcttattcttcatcatgaatggagtccgggaagctggttttttcttccacatggcgctcggatctacaacaaactcatggacttcattcggaatcagtacagggacagaggctatcaagaggtcatatctccaaatgtatttaacatggatctatgggtgcaatctggtcatgctgcaaattatagggaggatatgtttatcttagaggttgacaaacaagagtttgggttgaaaccaatgaattgcccagggcactgcctgatgtttaaacacagggttcgatcatatagagaacttcctcttcgctttgctgattttggggttttgcatcggaatgaggctagtggtgccctgagtggattaacacgtgttaggagatttcagcaggatgatgcacatattttctgcagggagtcccagataaaggatgaagtgaggaatggcttgaatttcatcaattatgtctataagatatttggtttcacgtatgagctgaagctttcaacgaggccagagaaatacctaggagatattgcaacttgggacaaagctgaaagtgctcttaaagaagctttagatgattttggcaagccttggcagttgaatgaaggggatggtgcattctacggaccaaagatagacatcagtgtatctgatgcattgagtaggaaattccagtgtgcaactttgcagcttgacttccagcttcctgatcgttttaagttggaattctcagctgaggatgaagccaaaattgagagacctgtaatgatacacagagccatcctaggatctgttgaacgcatgtttgccatacttttagagcactacaagggtaaatggcctttctggctcagtcctcgtcaagcgattgtatgccctgtgtctgaaaagtcacaatcttatgcactacaggtgcgagatcagatccaccaagcagggtatcacgttgatgctgatacaactgataggaagattcagaaaaaggtacgagaagcacagttagcacaatacaacttcatattggttgttggagaggaggaagctaattcaggacaggtgagtgtacgagttagagacttggcagaacataaggttatgagtattgagaaactacttgaacatttcagagacaaaactgcagctttcgaatgatactttgcttgtgaaaactgaagaaaaatttcagccccaaataccttagttttacacagttgtgtgcatgtcacaattttatttttattttcaacctatcaatttatcctgattttattttatgatttgaatggtaacaatattttctttgtatcgtttttgtttacgttccgagctttttacatcagcattagagtttacatgtcacattttttttttcttttaagttggtggctgacatttgaggaaaatatacatttttgagttggtcctcaattatgattgttagtaactgatctgcgtttttcttaggggccggccccctcgtggattatttagcttcgtttagttgaatatttatatccatcttggtttgaaacccgccataatatataaaaaacccccgcttcatgtggttggtgggagggtgatttattaagggggggaaagcggaa

SEQ ID NO: 2682 - DNA, 978 bp, Glycine max
cttcttttctctctctcctctggttttggggttagattaggtcttcctacccaaaacaaaacttcaatttctgtttcagttcgcggagatcaatattttatctaggtccatcgtcgatagaagatacgagaaaccaaaggcaatgtttttgtgggattggttttatgggattctagcgtcgctcgggctgtggcagaaggaggccaagatcttattcttgggcctcgataacgctggcaaaactaccttgcttcacatgctcaaagatgagagattagtccagcatcagcctacccagtatcctacatcggaggagttgagtattgggaagatcaagtttaaagcttttgatctagggggtcatcagattgctcgaagagtttggaaagattactatgcccaggtggatgcagtggtgtacttggttgatgcttatgacaaggagagatttgctgagtcaaaaaaagagctggatgctctactctctgatgaatctttagccagtgtcccttttcttgtccttgggaacaagatagatattccatatgctgcctcagaagaagaattgcgctaccatttgggcctgactaacttcaccacaggcaagggtaaggtaaacttggccgactcaaatgtccgtcccatggaggtattcatgtgcagtattgtgaagaaaatgggttatggggatggtttcaaatgggtttcccagtacatcaaatagtcccttagcaagagatggcttggtaactcatttctagaagtttgtttctctagttgagatttggaggtgttgttgggacaaaattgctgttaaagaaattgcagtatatttcaacttttatttatataaaatgactgggaaccttctcctgttttccccaaaaaaaaaaaaaaaaaaaaaaaaaaaaaaaaaaaaaaaaaaaaaaaaaaaaaaaaaaaaaaaaaaaaaaaaaaaaaaagaaaaaaaaaaaaaaa

SEQ ID NO: 2683 - DNA, 766 bp, Glycine max
  misc_feature (712)..(712): n is a, c, g, or t
  misc_feature (714)..(714): n is a, c, g, or t
  misc_feature (716)..(716): n is a, c, g, or t
  misc_feature (750)..(750): n is a, c, g, or t
cggctgcgagaagacgacagaagggggggaagagagaaagttagttacggctggtggcatttttcatttgaaagcgcagctgcagatagaggaaatggaaaagggtgccaaatcggaagcagcggcctcactgcgtcgctgtgcaaaagctgcattgcttctccatagcttgaattccccaatctcccaaaatcagtggaagagggaaatccatgacctgaaaattgaattgctgaaggagcgtttcatgaggaagaagatgaagctctgcgctatcacggagttgttcgttcagctcctcttgttgctctccgtttgtaacttcgtccttctctaatttctttgatattttcctctgcgttacgacttcagagagtgctcttcttccatgctctgttctacttccgtttacgcagctttaaactgctttagctcgttgatgaccgtaaacgaatcattagtcgtaaaatcaagcgttttcgttttttctcaagaatcacggcatttgtacatgtcaatggatcatgtctttgaattgaatcgggttttgaatgtgttgctctgattttgaatgtgagtaatgggcgtttgatttttcgtcgtcgttaagtgaatggaatgacggaaattttagttgtattgattattatcactggaagccaggtcgctagaagtctagaactttgacggtttgacctgatcattatgattngngntgtttttgttgaataacagtgaccatgtatatancaaaaaaaaaaaaaaa

SEQ ID NO: 2684 - DNA, 2858 bp, Glycine max
tcagctacgtaggcccccccccgtatgtatgtgtgtggatcatcaccaatctcttcttgctaaagcaacttcctttcatctcttcttgttagctttcaacacaatccatgaccccacaacattagtctctctctttctctttctctctctatatctctttagtgcagttagtagagtggtgagcttcataatggagaccatgaactagaacttgtctcaaaccatcactcacactcataccttcaaccccttcaaggttcaaagtttgtgggtgatgagctcctcatagacaaagactaacaagctggggcagagagaagaagagatggtgggaactccaattaacggaagaacaaggctatcttttggtgctgttaatggtggccatgatcttggccccagtagtgctccaccaagcaatgctggctcagattatggcattatagagttcacaagagaggatgtggaggccttgctgaatgaaaaggccaaaaggaaggacagatttaattacaaggaaagatgtgaaaacatgatggactatataaaaaggctgaaggtttgtatcaggtggttccaagaccttgagattagctactcactagagcaagaaaagttgaagagttcattggaattggcccagcaaaaatgcacggaaatagagctgctgctaaaaatcaaggaagaagagctaaattcaattattgtggaaatgagaagaaattgcacttctttacaagagaaattggtgaaggaagaatccgaaaaaacagcagcagcagaatctcatcttaaagagagagaagctaggcttaactttgagaggtcacagagtacactgcaggaggatcttggacgagcacaacgagagctccaaagtgcaaatcagaagatatcatctctcaatgacatgtataagcggttacaggattacataacaagcttgcagcagtacaatggaaaactgcattcagagctttctacagttgaaaatgaacttaagcgtgtagagaaagagaaagctactgtactggagtcccttaccatgttaaagggtcagcttactttgtctatggcttctcaagaagaggccacgaaacagaaggatgccttggctagtgaagttacatctctccgagtagagttgcaacatgcgagggatgatcgagaccaccaattatctcaagcgcaaactttaacatctgaattagagaaatctaaagattctacagaaaagtcctgctctgaactgaacaaattgactttaagaacaaatgaactggaggcaaaatgtgctttgcaagatgagcggataaaggtactacaagagaagctaactactgctgaggagaaacttcaggtttgtgacatatctgcaagtgagacaagaatagaatatgaagggcaacaaaaacttgtacacgagttgcaaagacgtttggcagatgcagaaaataaagttatagaaggggagaagctgaggaaagaattgcacaataacattttggaactaaaagggaacatccgcgtgttctgtagagtgcggcctttgttacctgatgaaggttctagcacagaaggaaagattatatcttatcccacatcgatggaagcttctggacggggcattgaattgacacaaaatggccaaaaacattctttcacatatgataaagtttttgcacctgatgcatcacaagaagaagtttttatcgaaatttcacagcttgtgcaaagtgctcttgatggttataaggtttgcatttttgcgtatggtcagacagggtcagggaaaacctatacaatgatgggaaggcctggacatccagaagaaaagggcttgattcctcgttcacttgaacaaatatttcaaacaaaacaatctcagcaaccccaaggctggaaatatgaaatgcaggtgtcaatgttggaaatatacaatgaaaccattcgtgatctgttatctacaaataagtcatcatcagaaggaacaccaacacgagtggaaaatggtactcccgggaagcaatacacaatcaaacatgatgccaacggaaatacacatgtttctgatctcacagtagtggatgttcagagtgtaaaagaggttgcatttcttttaaatcaagctgcaaatagcagatctgtgggaaaaactcagatgaatgaacaatcttctagaagtcattttgtattcactcttcgattatatggtgtaaatgagagcactgaccaacaagcacaaggtattctaaatctcattgatcttgctgggagtgagcgtctttcaaggagcgggtcaactggggaccgattgaaagaaacccaagcaataaataaaagtctgtcatcattaagtgatgttatatttgccttggccaagaaggaggatcatatcccattcaggaactcaaagcttacataccttcttcagccttgtctaggtggtgactcaaagacattaatgtttgtgaacatctctcctgaccaagcttcagctggagagtcactatgctcactacggtttgcgtcaagagtcaatgcttgtgaaattgggacacctcgctgtcacaccagtggacgccctgtagaatctcgcttgacctatttctaatctttccacacatgaatatggttatattgtttaacctatttgtgccatctctactacaaccaaaataactccaattctaacatcatgcgtatagattgtaatgtatagtaaacaagttaccaagtatgcattagttttaaaaaatatctcccattattatagttccatttacaattctgctccatgttattttcataacttcatattattctactttattatcagtaaaaaaaaaaaaaaaaaa

SEQ ID NO: 2685 - DNA, 1866 bp, Glycine max
tcgagtcagctacgtaggcccccccccccccggtactaacacaattcacacccaccattggatccaccaatctccaaccttcttctccactgttccgtttctctctccaacggagagtcttttgttttttgtggcgagtttgttgcacgtttaagaagcaatggcacgcaagaagatcagagagtatgactccaagaggttgttgaaggagcactttaagagaatctctggccaggagttgcccatcaagtctgcacaggttacagaatccaccaatttcagtgagctagcagagaaggaaccctggcttttatcttcaaaattggttgtgaaaccagacatgttatttggaaagcgtggcaaaagtggtttggttgccttgaatctggatttggcagaagttgattcttttgtgaaagagcgtcttggcaaagaggttgagatgggtggatgcaaaggacctataacaactttcattgttgaaccttttatccctcacaatgaggagttttaccttaacattgtctcagagagactagggaacagtataagcttttctgaatgtggagggattgaaattgaggagaattgggataaggtcaagactgtatttatgccaacaggagtgtctcttacatcagagagtattgccccacttgttgcaacacttcccttagagatcaagggagaaattgaggaatttctcaaggtgattttcactctatttcaagacctggattttactttcttggagatgaatcctttcactttggtcaatggaaagccttatcctctggacatgagaggcgaacttgatgacactgctgctttcaagaacttcaagaaatggggaaacattgaatttccattgccatttggaagggttatgagtactacagaggctttcattcatggattagatgaaaagacaagtgcatctttgaaattcacagtattaaacccaatgggccgaatttggacaatggttgctgggggaggtgctagtgttatctatgctgatacggtaggagatcttggttatgctcctgagcttggaaactatgcagaatatagtggtgcacccaaggaagatgaggtcttgcagtatgccagagtagtgattgattgtgcaacttcaaatcctgatggccaaaagcgagcccttgtggtaggtggaggaatagctaactttactgatgttgctgctacattcagcggcataattcgtgctctgaaggagaaggaacaaaagctaaaagaagcaaagatgcacatctatgtgaggagaggaggtcccaactaccagaagggtctagcaaaaatgagggcactcggagaggaaattggcattcctattgaggtttatggacctgaggcaacaatgactggtatatgcaaacaggcaatccaatacatcactgctgctgcttaattatccattcttaggccaatgccttctattacaagtattttcatggctagtttgaagtgattgttgattcttggttccctttccaactctcagaattggtaactttggtgagttagagcataggctgttacaagtagtcatttagtcatcaaataaagtggtcaagagtgttttgtatcgtgtagaattctgatattacagtcttggcacaataaactggaatgtgtaattgttttatgctatgtcaagctggaattttaaggctctcggctttactttcagcaagtaaattgattttctttccactttatgggaacttaaatttctgtttaaaagggtctttcaataaacttgtttatgtactccctccgtttcataatatttgttgtgtaaaaagaaaaaaataaatctaattgttattttaccttttcaaa

SEQ ID NO: 2686 - DNA, 1510 bp, Glycine max
  misc_feature (1509)..(1510): n is a, c, g, or t
tgggtaccgggccccccctcgagtcagtttcctaaaaccccccccccccccccatgattttccttctgtttgtgtttcaagattactgcatcaactgatttcactgagctacaagagaaggcaaccctggctttcatcttctaaattggttgtgaaacctgacatgttatttggaaagcgtggcaaaagtggtttggttgccttaaatttggattttgcacaagttgtttcgtttgtgaaggagcgtcttggaaaagaggttgagatgagtggatgcaaaggacccataacaactttcattgtcgaacctttcatcccacacaatgaagagttttaccttaacattgtctccgagagacttgggaacagcataagcttttcagaatgtggaggaattgaaattgaagacaactgggataaggttaagactgcatttgttccaacaggagtgtctcttacgtcagaaattgttgccccacttgttgcaacccttcccttggagatcaagggagaaattgaggagtttctcaaagtggttttcactctgtttcaagacctggattttactttcttagagatgaatcctttcacattggttgatggaaagccttatcctttggatatgagaggcgagctagatgacactgctgctttcaagaacttcaagaaatggggagacattgaatttccactgccatttggaagggttatgagtgccaccgagtctttcattcatggattagatgaaaagacaagtgcatccttaaaattcacagtgttgaacccaaagggccgaatttggacaatggtagctgggggaggtgctagtgtcatttatgctgatacggtaggagatcttggctttgcatctgagcttggaaactatgctgaatacagtggtgcacccaaagaagaggaggtcttgcagtacgccagagttgtaattgattgtgcaactgcaaaccctgatgaccagaagagagctcttgtgataggaggaggcatagccaactttactgatgttgctgccacatttagtggtataattcgggcattgaaggagaaggagtcaaaattgaaagcagcaaggatgcacatctttgtgaggagagggggtcccaactaccagaagggtctagctttgatgcgagcgcttggagaggatattggcatccccattgaggtttatggacctgaagccacaatgactggtatatgcaaagaggcaatacagttcattactgctgccgcttaaggtcaacaacaccttcatttatagtattttcatggcaagtctgaagtgaacgtttgattcttaatttccttgcccattcctgaaattcggaaatatagttagagaatgtttatgaaatcaatccatacaagaaagagtggccaggcttgtcatattgtttttgtagaattctgatggtgttgtcttgacacaataaagagtgtttttcatttgactgtagcaaaaaaaaaacaaaaaaaacgcaaaaaaacctnn

SEQ ID NO: 2687 - DNA, 1154 bp, Glycine max
attggttccaactggaatgtctcttacgtcaaaaatcgttgccccacttgttgcaacccttcccttggagatcaagggagaaattgaggtttttctcaaagtggttttcactctgtttcaagacctggattttactttcttagagatgaatcctttcacattggttgatggaaagccttatcctttggatatgagaggcgagctagatgacactgctgctttcaagaacttcaagaagtggggagacattgaatttccgctgccatttggaagggttatgagtgccaccgagtctttcattcatggattagatgaaaagacaagtgcatccttaaaattcacagtgttgaaccctaagggccgaatttggacaatggtagctgggggaggtgctagtgttatctatgctgatacggtaggagatcttggctttgcatctgagcttggaaactatgctgaatacagcggtgcacccaaagaagaggaggtcttgcagtatgccagagttgtaattgattgtgcaactgcaaaccctgatggccagaagagagctcttgtgataggaggaggcatagccaactttactgatgttgctgccacatttagtggtataattcgggcattgaaggagaaggagtcgaaattgaaagcagcaaggatgcacatctttgtgaggagagggggtcccaactaccagaagggtctagctttgatgcgagcacttggagaggagattggcatccccattgaggtttatggacccgaagccacaatgactggtatatgcaaagaggcaatacagttcattacagccgctgcttaaggtcaacaacaccttcatttatagtattttcatggtgagtctgaagtgaacgttgattcttaatttccttttccattcctggaatttggaaatttagttagagtatatgtttatgaaatcaagccatccaagaaagagtggccaggattgttgtcacattgtttttgtagaattctgatggcgctgtcttgacacaataaagagtgtttttcatttgactgttactacttttaactgcgttttgatctattttcttcggctttcctgcccctctaaacaatgttcttcgtacatattttaatatacaaaatacaacatctcacatttgcac

SEQ ID NO: 2688 - DNA, 2340 bp, Glycine max
gagcccaacgagagatgcaaagtgcaaatcagaagatagcatcactcaatgaaatgtataagcggttacaggattacattacaagcttacaacagtacaatggaaaacttcactctgagctttcgtcggttgaggatgaacttaaacgcgtagaaaaggagaaggtttcggtagtggagaacatcaccttgttaaggggtcaacttactgtatccgtttcttctcaagaggaggccataaaacagaaggatgtcttggctacagaagtttcctctcttagaggagagttgcaacaagtaagagatgagcgagaccggcaattatctcaagtacaaattttaagttctgaattagagaaagttaaagaatctacaaaacattcctccactgaattggacagcttgacgtttaaagctaatgatctggaggaaaaatgttctctgaaagataatcaaataaaggcattggaagagcagctagcaactgcagagaagaaactgcaggtgtctgatatatctgcatatgagacaaggacagaatatgagggacaacagatatttgtgaatgagttacaaagacgcttagcagatgcagaatataaacttatagaaggggagaggctgcggaaaaaattacataataccattttggaattaaaagggaacattcgtgtattctgtcgtgtgaggcctttattagctgatgaaagttgtagcacagaaggcaggattttcagttatccaacatcaatggaaacttctggacgagccattgacctagcccaaaatggccaaaaacatgcttttacatttgataaagtttttacaccagaggcatcacaagaagaagtttttgtggaaatttcacagcttgtgcaaagtgctcttgatggttacaaggtttgcatctttgcctatggtcagacagggtcagggaagacctatacaatgatgggaaggcctggacatccagaggagaagggcttgatacctcgttcattagaacaaatatttcaaactaagcagtctcagcaacctcagggctggaaatatgaaatgcaggtgtcaatgttggaaatatacaacgaaacgatccgtgatctgatatctacaacaacacgtgtggaaaatggtactcctggaaaacaatatacaatcaaacatgacgtaaatggaaatacacaagtttctgatctcacagtagtggatgttcatagtgctaaagaggttgcatttcttttaaatcaagctgcaaatagcagatctgtgggaaaaacccagatgaatgaacaatcatcaagaagtcattttgtattcactcttcgaatatacggtgtaaatgagagcactgaccaacaagtacaaggtgttctgaacctcattgatcttgctggtagcgagcggctttcaaagagtggatcaaccggggaccggttgaaagaaactcaagcaatcaacaaaagtttatcatcactgagtgatgttatatttgccttagccaagaaggaggaccatgtgccattcagaaactcaaagcttacatatctgcttcagccttgtctaggtggagactccaagacactaatgtttgtgaacatatcacctgatccttcttcagttggtgagtcactatgctcactcaggtttgcatcaagagtcaatgcttgtgagattggaacacctcggcgtcaaaccaatggacgttcaatagagtctcgcttgagctatttctaatcttcagaaatgtgtatttgttttttaaccatttgtggcaaccaagtgcctgtatgagtatcacaataaataaatgaaaatgagattgattctaacagcggcatatagcttgtatagtgaagaaagttactaagcttccatttatagaaccccttctagtagtcccatttgttttttttttttttttttggttggagccaagtccagtttgttattctgcttaatgttatgtattaatttatttataacatttctcttatacaaatgggaaagtgaattgtttgtgataatgggaatggtgaactagtttgtttacaagcatatcaataaaaaaagatttattataataaaaaaaaaaaaaaaaaaactctagactagttctctctctcgttcattactgctgccgcttaaggtcaacaacaccttcatttatagtattttcatggcaagtctgaagtgaacgtttgattcttaatttccttgcccattcctgaaattcggaaatatagttagagaatgtttatgaaatcatccatacagaaagagtggccaggcttgtcatattgtttttgtagaattctgatggtgttgtctgacacataagagt

SEQ ID NO: 2689 - DNA, 883 bp, Glycine max
tcagctacgtggccccccccatccccatctcccatctttgtttgttccatctcttgcttcttgcttctattacttgcttctttcttcaccatgtcacttgctgggaaaatcaccactgaaattggggttcatgcaaccgctgcaaagtggttcaacctctttgcaacacaacttcatcatgttcaaaaccttactgatagagtacatggaaccaagctgcatcaaggtgaagactggcatcacaacgagacagtcaaacactggacttataccatagatggtaaggctacaacatgtctggagagtattgaatccattgatgaacagaacaaaacaatcacctacaagctcttcagtggagacattgatcataagtataagaaatttaagttcacctttcaagccattgataaggatcaaggcggtgcttttattaaatggacggttgaatatgaaaggcttgctgaggaggttgatcctccatatggatacatcgaatacctgcacaaatgcactaaagatattgatgttcatcttctcaaagcatagctctaaaagttatgcactaagaaataatgggcttggcctctggataagtgcttatatgtataataatcggtgtggagtttgacgagaaggatgcttatatagatccttcctttgtatggaataaacttggatatgcatgtcggtgatgtcttgtatgtgttaaattatatatgtggaagtgctcaacgtgatacatatgaatattaatgaatgttttatgatcgattttgctaagtaaaaaaaaaaaaaaaaaaaaaaaaaaaaaaaaaaaaaaaaaaaaaaaaaaaaataaaaaaagagggaggatgcccgatcaaagcgggtgtaggtctgg

SEQ ID NO: 2690 - DNA, 882 bp, Glycine max
agggccctggcgagcgcccccgcgggccgcggcgcgccgatctcccatcctttgtttgttgatccatctcttgtttcttgctttctttcttcaccatgtcacttgctgggaaaatcaccactgaaatcggggttcatgcaaccgctacaaagtggttcaacctcttcgcaacacaactccatcatgttcaaaacctaactgatagagtgcatggaaccaagctgcatcaaggtgaagactggcatcacaacgagacagtcaagcactggacttataccatagatggtaaggttacaacatgtctggagagtattgaatccattgatgaacagagcaaaacaatcacctacaagctcttcagtggtgacattgatcataattataagaactttaagttcatctttcaagccattgatgataatgatcatggcggtactattatcaaatggaccgttgaatacgagaggcttcgtgaggaggttgatcctccatatggccacattgaatacctgcacaaatgcactaaagatattgatggtcatcttctcaaagcatagctagctctaaaagttatgcactaaaaaataatgggcttgacctttggataagtgcttatatgtataataaaatcggtgtgaagtttgacgagaagaatgcttagttatgtagatccttcctttgtatggaaaataaacttggatatgcatgtcggtgatatcttgaagtgtgttaaattatatttggaagtgctcaatgtgatgcatgggaatattattaatgaatggatgtttatgattttcgtgagtaaaaaaaaaaaaaaaaaacccgagactaacccaaagggctgatattcccgaaaccctcaccccaactaagtttttt

SEQ ID NO: 2691 - DNA, 1029 bp, Glycine max
gtgttttgaaagagaaacaaacttttacattattaggactgttgtggcaatacatgaatgtttatatacaggaaaagctaataacccccgactgactaatagaaaacagtttttaacaaccaaactaacttaattgggtattattaactgagaagatattctatttagccacatttcttcaagcatttttggtcatggatatcatagaagtagcacactccaatttctccacctccattaattgcacaactttcttttgatacatgatgaatacttcgtttataacttcttcaccaaactttgtggacaagagaggctccattgctgctcttacgtgcttggccatttatctggcttttatatttccatcaagaaatgaattatcaccaccttcatttaggccttcaacccaaggcaaggttaaaatctcaaatcgttgaacaaagaatgatccttcttcctcaatcacatgcctaatttcttcaactgtaggttcatacactggtatgttaaaggagtccaatttttcttcttcaatcaaaccctgggaaagccagtgtagactgttggaggaatgaaataggtttatggaattactgggaaagagcctcccatagaaggatccaggggttgcattaacaaagcatggaccaaacttgtgtcccttatcttctaccaatcttgtatagaaatttggaagtgacttgaagatggtattgaatccgtttccaaataaatcattgagataaaattggaattttggtggttcacgattcaagctagtgcaagcggtattgacaatgtcaataatatttgatatcaccagaagagcatttggtcctacagagcaacctaagtttgtcactttcatgcagtttggagaaaaatcacgatatagtctcattatagtttcttcaagtatgggtttggctttaagcattagttttttttgtagcaagcagttgtttgtataactcctttctcccttgccaccattcatgtgaagcaatagctttctttcggccgcgt

SEQ ID NO: 2692 - DNA, 1875 bp, Glycine max
  misc_feature (1598)..(1598): n is a, c, g, or t
  misc_feature (1606)..(1606): n is a, c, g, or t
  misc_feature (1610)..(1610): n is a, c, g, or t
  misc_feature (1621)..(1621): n is a, c, g, or t
  misc_feature (1628)..(1628): n is a, c, g, or t
  misc_feature (1634)..(1634): n is a, c, g, or t
  misc_feature (1648)..(1648): n is a, c, g, or t
  misc_feature (1651)..(1651): n is a, c, g, or t
  misc_feature (1660)..(1660): n is a, c, g, or t
  misc_feature (1663)..(1664): n is a, c, g, or t
  misc_feature (1671)..(1671): n is a, c, g, or t
  misc_feature (1674)..(1674): n is a, c, g, or t
  misc_feature (1682)..(1682): n is a, c, g, or t
  misc_feature (1684)..(1685): n is a, c, g, or t
  misc_feature (1688)..(1688): n is a, c, g, or t
  misc_feature (1690)..(1690): n is a, c, g, or t
  misc_feature (1693)..(1693): n is a, c, g, or t
  misc_feature (1697)..(1697): n is a, c, g, or t
  misc_feature (1701)..(1701): n is a, c, g, or t
  misc_feature (1704)..(1704): n is a, c, g, or t
  misc_feature (1708)..(1709): n is a, c, g, or t
  misc_feature (1714)..(1714): n is a, c, g, or t
  misc_feature (1716)..(1716): n is a, c, g, or t
  misc_feature (1722)..(1722): n is a, c, g, or t
  misc_feature (1726)..(1726): n is a, c, g, or t
  misc_feature (1732)..(1732): n is a, c, g, or t
  misc_feature (1734)..(1734): n is a, c, g, or t
  misc_feature (1738)..(1739): n is a, c, g, or t
  misc_feature (1744)..(1746): n is a, c, g, or t
  misc_feature (1748)..(1748): n is a, c, g, or t
  misc_feature (1754)..(1754): n is a, c, g, or t
  misc_feature (1756)..(1756): n is a, c, g, or t
  misc_feature (1758)..(1759): n is a, c, g, or t
  misc_feature (1761)..(1762): n is a, c, g, or t
  misc_feature (1765)..(1766): n is a, c, g, or t
  misc_feature (1769)..(1769): n is a, c, g, or t
  misc_feature (1771)..(1772): n is a, c, g, or t
  misc_feature (1780)..(1780): n is a, c, g, or t
  misc_feature (1784)..(1784): n is a, c, g, or t
  misc_feature (1792)..(1792): n is a, c, g, or t
  misc_feature (1797)..(1797): n is a, c, g, or t
  misc_feature (1803)..(1803): n is a, c, g, or t
  misc_feature (1806)..(1807): n is a, c, g, or t
  misc_feature (1811)..(1811): n is a, c, g, or t
  misc_feature (1813)..(1813): n is a, c, g, or t
  misc_feature (1818)..(1818): n is a, c, g, or t
  misc_feature (1826)..(1826): n is a, c, g, or t
  misc_feature (1839)..(1839): n is a, c, g, or t
  misc_feature (1843)..(1844): n is a, c, g, or t
  misc_feature (1855)..(1855): n is a, c, g, or t
  misc_feature (1858)..(1858): n is a, c, g, or t
  misc_feature (1861)..(1862): n is a, c, g, or t
  misc_feature (1865)..(1865): n is a, c, g, or t
  misc_feature (1869)..(1870): n is a, c, g, or t
  misc_feature (1873)..(1874): n is a, c, g, or t
cccacgcgtccgtacggctgcgagaagacgacagaagggggacattagccacataacataacctcatcattttagtaacgtcgtactctagtacaaagacattattattattgtcctcatagtgagtagaaggcagagagactagagcggagatagcaatctcatctcattcatttcaatggcaactcaaggtcaagtcattacctgcaaagctgcggtggcctgggaacccaacaagcccttaactgtccaagacgttcaggtggctccgcctcaggccggcgaggtccgtgtccaaatcctcttcaccgctctctgccacaccgatgcttacacttggggcggcaaggatcccgaaggtctcttcccctgtattcttggccatgaagctgcagggattgtggagagtgttggagaaggtgttactaatgttcagcctggggatcatgtcattccctgttatcaggctgagtgtggggagtgcaagacttgcaaatcagggaagacaaacctatgcggcaaggttcgttccgccactggagttggggtcatgctcaatgatgggaagagtcggttctcgattaatgggaagcctatttatcatttcatgggaacatccacttttagtcaatacactgttgttcatgatgttagtgtagctaagattgacccgaaggcacctctggagaaagtttgtcttcttggatgtggtgtttcaactggccttggagctgtctggaacactgcaaaagtggagtcagggtccattgttgctatttttggccttggaactgttgggcttgctgttgcagagggtgctaaaactgctggtgcatcccgggttattggcatagatattgacagcaagaagtttgatgtagcaaaaaactttggagtcactgagtttataaatccaaatgaacatgataaaccaatccagcaggtcataattgatcgcacagatggtggagttgattatagctttgagtgtattggaaatgtctccgtgatgagagctgcgttggaatgctgccacaagggctgggggacgtcagttattgtaggtgttgcagcatcagggcaggaaatatcaacccgtcctttccagttggtgagtggacgagtctggaaaggaacagcttttggtggcttcaagagcaggtcacaggtgccttggcttgtagacaagtacttgaagaaggaaatcaaggttgatgagtacattacccatactttgacactttcggagatcaacaaggcttttgatcttttgcatgaagggggatgccttcgctgtgtgctttctacacaagaatgaggtgatctgtgccagcctgcctggttttgtgaggaatggatgtgttgtgttgcttttccctcttgtagtggttgtagtttgaacttgaaataaatctcgagtggctatattttgtaagtaagatcattttggtctataatatggaattatggatgttatcttccgagtcttttggcaaacttgtgttcagaaagaaggtctttgcaattaatacttaaaagcatcctttttgagtcaaaaaaaaaaaaaaaaaatttttcctgccgccaggcggctccantattctanagcngccgcccccgnggtgganctccancttttggtcccttnacngagggtaanttnnaagcttnccntattcatngnncanancangttnctgngtnaaanngtttnangctaanattncacacntncatnnaaccnnnancttaantntnnanntcnnggngnnccatttgncatncttctccncttanatggcngtnngctncntgccntttcaatntggaacccttgtncgcnnctgcttaaatnaanacnncantgcnnggnng

SEQ ID NO: 2693 - DNA, 1038 bp, Glycine max
gggagataccaacctggtcttactgtgtggtgactgtgctctgctctcatctcattcatattcatttcaatggcaactcaaggtcaagtcattacctgcaaagctgcggtggcctgggaacccaacaagcccttaaccgtccaagacgttcaggttgctccgcctcaggccggcgaggtccgtgtccaaatcctcttcaccgctctctgccacaccgatgcttacacttggggcggcaaggatcccgaaggtctcttcccctgtattctcggccacgaagctgcagggattgtggagagtgttggagaaggtgttactaatgttcagcctggggatcatgtcattccctgttaccaggctgagtgtggggagtgcaagacttgcaaatcggggaagacaaacctctgtggcaaggttcgttccgccactggagttggggtcatgctcaatgatggaaagagccggttctccattaatgggaagcccatttatcatttcatgggaacatccacttttagtcaatacactgttgttcatgacgttagtgtagctaagattgacccggtagctcccttggagaaagtttgccttcttggatgtggtgtttcaactggacttggagctgtctggaacactgcaaaagtggagtcagggtcaattgttgctatttttggccttggaactgttgggcttgctgttgcagagggtgcaaaaactgctggtgcatcccgggttattggcatagatattgacagcaagaagtttgatatagcgaaaaactttggagtcaccgagtttataaatccaaacgaacatgataaaccaattcagcaggtcatcattgatcgcacagatggtggagttgattatagctttgagtgcattggaaatgtctctgtgatgagagctgctttggagtgctgccaccagggctcgggaacatcagttattgtgggtgttgcagcatcatggcatggaatatttacccgtacctctgagtttgtgcagtgacgtgtctgtaatagaacagctttcggt

SEQ ID NO: 2694 - DNA, 903 bp, Glycine max
attgttggagagagagatgggaaggtccccttgctgtgagaaagcacacacaaacaaaggtgcatggaccaaagaagaagatcatcgcctcatttcttacattagagctcacggtgaaggctgctggcgctctctccccaaagccgccggccttctccgttgcggcaagagctgtcgtctccgctggatcaactatctccgccctgacctcaagcgcggcaatttctccctcgaagaagaccaactcatcatcaaactccatagcctccttggcaacaagtggtctctaattgctggaagattgccgggtagaacggacaatgagataaagaattactggaatactcacataagaaggaagcttctgagcagaggaattgaccctgccactcacaggcctctcaacgatgacaaggtattggaacgctgccctgacttgaaccttgagctaaccattagtcctccccgtcaacctcaatctgatcagcatcacttgaagcccgttgggagaaactcaaacctttgctttgcctgcagtttgggtttgcaaaatagcaaagatcattgtagctgtgcgctcaacactgccaacgctgcttctggccatgatttcttggccttgaaaaccagcgttttggaaatgaaatgagtcaaattcattttggaatctttcttccctaattaattagttgttaatggatgcaaatgattgcctgcccaatttcctcgtggagccctttctattattcctatgttcatgtacatgtgcgtaagactacaaactttcttgtttatacgattggttctttccaaatagaatacaactatatatttttgttatttctataacaaaagttcaattcatcacttcgatcgatggtagagagaattaccacaatcatt

SEQ ID NO: 2695 - DNA, 2014 bp, Glycine max
  misc_feature (1)..(1): n is a, c, g, or t
  misc_feature (6)..(6): n is a, c, g, or t
  misc_feature (22)..(22): n is a, c, g, or t
  misc_feature (30)..(30): n is a, c, g, or t
  misc_feature (33)..(33): n is a, c, g, or t
  misc_feature (41)..(45): n is a, c, g, or t
  misc_feature (778)..(778): n is a, c, g, or t
nggggngccgttaaaaaagggnccccgggngcngaatcctnnnnnttttttctttttttttttagtccaaaacaataattttgaatagagaaaagcgccaaaataatgagcatgtacaagattttaatggtactttacaaacataaatccattacaaattaagcaagtttgtcaagtgattccagcccatcaaccatggcctattgtcagatggaagcacaaagttcagctcaaacatctcctttgacatgttgcctcctgtccggaaactcacaagctttgcaactatctctgcactctcctgtacatggatttggtcatgaggatcagtccaaagtttgctgataaactgcatcttcctctgcttcccatcaagagggacatcccatttcatatacaacgcctccctctcctccagcgacaaacgtgatgtcagtctcttggctagaaattccctttctcgtttcaaagctctaatgcttgaagacaatgagatagtaggttcttctccaacatgaggagctgggcttgcattcccaagttctgctaggtgttgctgcaaccatgtcaaacgccttagttctacttccatgtatatttgatcggctgggtctcccttgaataacaaataaaactgggtcctgtgaataatggagacataacatagatcccataattcaagaatctgctgccgctgctctttaaatgctatttgccacgaaatctggggctcctccggttcacatgagtactcttcattgtctatgtgtggccattntgcttcgtttgcttcaagttcaagcacctggcaaacaagtaactgcttttggtactgcagtttggctacacgttctttcaattctgtcacatatgctcttatacttcttacattctcctctgctgcattctgaaacattttctgcattttcttcatgttaactgaactagagcgtcgataaactggggtattttcctttgatgaaacatctccagcttcttcactctttgatggagtctccttctcggactcaggaagagtatcagttgaaacaatatcatcattctcaggggctctattttcaacatcagattccaaaacttgctgcgtagcagataatggtgagcagggagatcttaggaagttttggcgattggcagcattgcttgaagacaaaggaagcaactttttccttttgtgttcctttttattcttaggggatgcttcattgggtgagtgttggaagttgttcgggagagacatcaccaacttgtctatggacctttgaacattttcaagctgctgttcaagatttgcaatggtgcttccttgtgaatgaagtcgggtaatctcttccttgagattagcactgacactcttgttgatagaaaccatgcttccaactccaacattcttgggtgttattgacctaacagcacgcatttcccttatttctgcttgcagctttgcaattgtctcagctgcatcttggttacctagtctatgacatgccacttccttttgtaatacttccaaagctctattggcttcttcgcccagctgctcttggaggtgctcaagtttgcgaatttcatgcataagggtaaaaggagcagtagaggattgcctcatcgactgtcttaatattgagcttcttactctctcacatcctagctctggttttagtgatgatagtgcaccagtgaatgacaggcacttcttgactggctgatgcggtgattcaactgggtttgagaccttctggtcatcctgaagctttctgcgtaattcatccacctgagtttgtgcaagatctctctggcgtctcagctcttcaatttccatttccatctgttgaattttccaatccttttctttagatggatcagggggggggcctacgtagctgagccttgcaacttccttttgtaaatgtttaacaagctgtttgtctgatacaaccacattaacttgagcgttattcgtttcttcctttgcccgggaaaatggcaggta

SEQ ID NO: 2696 - DNA, 1054 bp, Glycine max
ggctcgagctcgagccgaatcggctcgagggctttaattccattggattctatcagatgacaaaacttgctatcataccattcactgtattattagaaactattttcctaaagaagcagttcagctcgaaaataaaattcgctttattcctattacttgtgggagttggcattgcttctatcacagaccttcagctcaattttgtgggaaccattctttcccttctagcaatcataacgacatgtgttggccaaattctgaccaacacaatacagaagaagcttaacgtctcttccacacagctactctaccagtctgctccattccaagcagcaattctttttgtttcaggccctgttgtggatcagatgctcaccaagcaaaatgtcttcgcctacaaatattctcctgtggtcttggcattcatcatcttgtcttgcttgatagctgtttctgtgaacttcagcacatttctggtcataggcaaaacatctcctgtaacatatcaagtgctaggccacctcaagacatgccttgttctaggatttggctacacattactgcatgaccctttcaccggaaggaacattcttggaatactaattgccgtttttgggatgggtttgtactcttatttctgcactgaggacaacaaaaagaaacagttagctggtgatctcccactggcctctcaggtcaaagacaaagatagcttaccacttttggccgggaaaaacgtgggtaatcaaaatgaggaaaatcatgagactaataaattaagcaaggattctgttatttgaaaggacaggctcccatttctttttcagatttcatatattttgggtttctttcaatttctaggaaaattgtaatgagtgtaaatcaaatttgtttaataagttttctgtaactttaagtcggtgcatttcatttacctaccatatattcattaaactgcaggaggaaattcaaatttcataaaattgcaatccctttaaaaaaaaaatgaaaaggtagacatcaattattttgtgattcaaaaaaaaaaaaaaaa

SEQ ID NO: 2697 - DNA, 1457 bp, Glycine max
  misc_feature (1203)..(1205): n is a, c, g, or t
  misc_feature (1311)..(1314): n is a, c, g, or t
ggctcgagtctctcttctttatccattatttctctctaccttgaacttccacaatacaactctctgcctatcgactcagctacgtagggcccccccccgggtgatcttttggagttgtaggagcccttacaccttgcagaatcatctctacattcccaagggctcctactacgcaataactccaagcccgatctcaaattaatatttcatttactcatcttaatcaatattaaataagaaaagatgggagagatgtcaaacttccaattgggtgtgattggtgcactatttctctctgtggcttcttctgtctccattgtcatctgcaacaaagccttgatgagcaatcttggcttcccttttgccacaacgcttactagttggcatttgatggtcacattttgcacccttcatgcggctcaacgcttgaatctatttgtgtccaaatccgttgacttgaaaacggtcatgctttttggtattctaaatggcatttccattggatttctcaacttgagtcttggctttaattccattggattctaccagatgacaaaacttgcgatcataccattcactgtattattagaaactattttcttaaagaagcagttcagctcgaaaataaaattctctttatccctattacttgtgggagttggcattgcttctatcacagaccttcagctcaattttgtgggaaccattctttcccttctggcaatcataacgacatgtgttggccaaatcctatcctttattgctaagtactcactcttccagttgtagcatgtaattatggttatcaattaattatgatggcttagacttgatatcattaattatcttaattaaatttgaggaagattggatatatttgtatccttaaccaagtgttcaatttagctgaccaacacaatacagaagaagcttaacgtctcttccacacagctactctaccagtctgctccattccaagcagcagttctttttgtttcaggccctgttgtggatcagatgctcaccaagcacaatgtcttcgcctacaaatattctcctgtggtcttggcactcatcatcttgtcttgcgtgatagctgtttctgtgaacttcagcacatttctggtcataggcaaaacatctcctgtaccatatcaagtgctaggccacctgaagtcacgccctgttctaggatttgggtannnactactgcatgaccctttctccggaaggaacattcttggaatactaattgccgtttttgggatgggtttgtactcttatttctgccctgaggacaccaaaaagaannnnccccctggtgatctccccttgtcctctcaggtcaaagacaaatgatagcttaccactcttggccgggaaaaccgtgggtaatcaaaatgaggaaaatcatgagcataatcaattaagcaaggattctgttatttgaaaggaca

SEQ ID NO: 2698 - DNA, 549 bp, Glycine max
atacaagctcaccctccaatccactatcactcactctctcttctcctaccattatttctctctaccttgaacttccacaatacaactctctgcctataaacgctcttgtttaacgtgagaacttgggtgatcttttggagttgtaggagcccttacaccttgcagagtcatctcaacattcccaagggctcctactacgcaataacgccaagctcgatctcaaattaatatatcatttattcctcttaatcaaatattaaataagaaaagatgggagagatgtcaaacttccaattgggtgtgattggtgcactatttctctcggtggcttcttctgtctccattgtcatctgcaacaaagccttgatgagcaatcttggcttccctttcgccacaacgcttactagttggcatttgatggtcacattttgcacccttcatgcggctcaacgcttgaatctatttgtgtccaaatccgttgacttgaaaacggtcatgctttttggtattctaaatggcatttccattggatttctcaacttgagtctt

SEQ ID NO: 2699 - DNA, 1689 bp, Glycine max
cagaactatttctctctctcacttgctgcaggcactccacgcgaacttgaaaatcaacaaaaacttatcaatctctctttttctctttctctctccggcacctcttgttaaaaaattgttcttttcaccgaaacccgtaaagggtcctgagctagcttcttctccatccatggtcctgatttttttcttcctcttgttttcagcttctatatgcaaaagggggtggaccaaatgctgcaaaatatttataatgtagttactcactaaccacctaagccatgaaaaccaaaatttttcccacttgggtattctgcgaaaattggtgcatttgtttatccctctagtttaagccgtggttggatctgcatttggtgtgcaggaactttggcaaaaaggttgaactttgatggttaattttgagaggcttcaagtgtgagccacatgaagaacttgaagtggcacaagcaaatttccaacagtggcaacaagttggggagaaggctttcgcttggtgagtataaccgtgcagtgtcatggtccaagtatttggtgtcaccaggggctgagataaagggtgaaggagaagaggaatggagtgcagatatgtctcagttgctcattggatccaaatttgcctctggaaggcacagcagaatctatagaggggtttacaagcagaaggatgtggcaattaagctgattagtcaacctgaggaggatgaggacttggctgcttttcttgagaagcaattcgcttctgaggtgtccttgctcctcagattaggccacccaaatatcattacttttattgctgcttgcaagaaacctcctgtgttttgcataattactgaatatttggctggaggttctctgggaaaattcctgcatcaccaacaaccaaatatacttccactcaagcttgttctgaagttagccctcgacattgcgcgggggatgaaataccttcattctcaagggattcttcatagggatctcaaatcagaaaatctccttttgggggaagatatgtgtgtaaaagtagcagattttggtatctcatgcttagaatctcagtgtggcagtgcaaaaggattcaccggaacataccgttggatggcgcccgaaatgatcaaagaaaagcatcataccaaaaaagtagatgtgtatagttttggcatagttctatgggagcttttgacaggaaagactccatttgacaatatgacaccagaacaggcagcatatgcagtttcgcacaagaatgcaagacctccattgccatctgagtgtccatgggcatttagtgatctcatcaatagatgctggtcaagcaaccctgataaaaggcctcattttgatgagatagtgtccattttggagtactacaccgaatcacttcagcaagatccagagtttttctcaacttacaaaccgagtcctagtagtagtaacacaattctggggtgcttccccaaatgcaatgctcgccataaatttggtgcatgcaaagcttagcaatatagaaatatgctacttgtcaagcaatagatgcatgcttctcaattgtgtgacttgaagaattgtattatattcaatcccatgggaagaaagtttgttcaattaacggatacaattattctcttcctttttaatgagctcttttgagtaaaaaaaaaaaaaaaaaaaaaa

SEQ ID NO: 2700 - DNA, 1497 bp, Glycine max
  misc_feature (1229)..(1229): n is a, c, g, or t
  misc_feature (1232)..(1232): n is a, c, g, or t
  misc_feature (1234)..(1234): n is a, c, g, or t
  misc_feature (1236)..(1237): n is a, c, g, or t
  misc_feature (1240)..(1240): n is a, c, g, or t
  misc_feature (1243)..(1243): n is a, c, g, or t
  misc_feature (1247)..(1247): n is a, c, g, or t
  misc_feature (1250)..(1251): n is a, c, g, or t
  misc_feature (1253)..(1254): n is a, c, g, or t
  misc_feature (1256)..(1257): n is a, c, g, or t
  misc_feature (1264)..(1266): n is a, c, g, or t
  misc_feature (1270)..(1270): n is a, c, g, or t
  misc_feature (1273)..(1278): n is a, c, g, or t
  misc_feature (1281)..(1281): n is a, c, g, or t
  misc_feature (1284)..(1286): n is a, c, g, or t
  misc_feature (1288)..(1288): n is a, c, g, or t
  misc_feature (1290)..(1290): n is a, c, g, or t
  misc_feature (1300)..(1300): n is a, c, g, or t
  misc_feature (1308)..(1308): n is a, c, g, or t
  misc_feature (1311)..(1311): n is a, c, g, or t
  misc_feature (1313)..(1313): n is a, c, g, or t
  misc_feature (1316)..(1317): n is a, c, g, or t
  misc_feature (1331)..(1331): n is a, c, g, or t
  misc_feature (1334)..(1335): n is a, c, g, or t
  misc_feature (1340)..(1341): n is a, c, g, or t
  misc_feature (1346)..(1346): n is a, c, g, or t
  misc_feature (1348)..(1348): n is a, c, g, or t
  misc_feature (1359)..(1359): n is a, c, g, or t
  misc_feature (1364)..(1364): n is a, c, g, or t
  misc_feature (1371)..(1372): n is a, c, g, or t
  misc_feature (1382)..(1382): n is a, c, g, or t
  misc_feature (1385)..(1385): n is a, c, g, or t
  misc_feature (1391)..(1391): n is a, c, g, or t
  misc_feature (1395)..(1396): n is a, c, g, or t
  misc_feature (1398)..(1399): n is a, c, g, or t
  misc_feature (1401)..(1401): n is a, c, g, or t
  misc_feature (1403)..(1403): n is a, c, g, or t
  misc_feature (1409)..(1409): n is a, c, g, or t
  misc_feature (1419)..(1419): n is a, c, g, or t
  misc_feature (1421)..(1421): n is a, c, g, or t
  misc_feature (1437)..(1437): n is a, c, g, or t
  misc_feature (1440)..(1441): n is a, c, g, or t
  misc_feature (1446)..(1447): n is a, c, g, or t
  misc_feature (1449)..(1449): n is a, c, g, or t
  misc_feature (1455)..(1455): n is a, c, g, or t
  misc_feature (1457)..(1457): n is a, c, g, or t
  misc_feature (1459)..(1460): n is a, c, g, or t
  misc_feature (1468)..(1468): n is a, c, g, or t
  misc_feature (1472)..(1472): n is a, c, g, or t
  misc_feature (1474)..(1474): n is a, c, g, or t
  misc_feature (1479)..(1479): n is a, c, g, or t
  misc_feature (1483)..(1483): n is a, c, g, or t
  misc_feature (1486)..(1487): n is a, c, g, or t
  misc_feature (1490)..(1491): n is a, c, g, or t
  misc_feature (1495)..(1495): n is a, c, g, or t
ttgcgatcaaggactctcactggtgctttgcctgttgatgcgggtgacattatgcccgccacgcctcctggctttgataatccaccatataagcaattgcatgggagtctggcgacaagcattaatcaagaagctcacgataactcaaaccaatcccagaacaagaaagagcttaatatggttagccaacctgtgttgaggaccagctccacctcttatgagaatgctcccaaatttacaactagagtctcttatcttgatcaaggcaacataataaggaatttgaatgaagaacctcgtcacactggaaacacaacaccacctgtgcatcattctaggaatataaactcactaacacatgaagagccattaaagcaaaatggacagtttgtcgagggtggatttgttacaatggggcaacaactatttgaaactggaactgtaaaccatgataattctgaatcacagtatagtgctccgtttatgaattcttggtcagacccatgcctagaatttgcatttaagactcttacaggcgtgataccagtagaggaaaatttaacacttcaaggatgtttccaggaacctgttaactatcatgaacgaagggatggtggctcaatgttgccagatttaggatcttcctgcttttctcaaagtgatttttcgtttctccatgatacaggggttaagtccatgccggggcagcagccatcaataagttcttcattcctaccgttggaaaaaacgagcctgcaaggtttcgctggcgttgatcctcaaacacagttttctcagtgcaacaataattttcaaagaaggtaagctagttatatatttgtagctacctccaggataactgctattagtatctagttatacttttgtagactgcaaaatgtttgtcattaagtatccttttattttcctggtgacaattgtaaatacattgtgaacataaggtctcgcttagtgttttgctttgttcgttgagaagatctaggtaagcaaagtaaggaggtacaggagtccaactgttgtgacaatggtatctaactactgtagtttgtatctctagttattatttgtttcaagtggtattatttcttattttctttctccttcagaaaatgctgtaaaaggcatataagctctcaattgttataaagtagcttactttgagaaaaaaaaaaaaaaaaaattgcatgatataataaaaacgtagactntanancnntanggnttgnagnntnncnncgggaannngacngtnnnnnnggnttnnntngnccccgggggnacccctanatntnaanncgccgccccccggnggnnccccnnctttngnccctttagggnggggntaatttnncccctggggnaanctatgncacnngnngntncctggncgaaaatgtntngccttcacatttcccncannatacnncncgggantnannagtgtaancccngnggggnctanatnnggnncacnct

SEQ ID NO: 2701 - DNA, 1961 bp, Glycine max
  misc_feature (21)..(21): n is a, c, g, or t
ggtacagcctgcaggtacaancggtctcgagtctccctacgtgggcccccccccgcagcaagtgccattttattttgccctacctcctcgattctagggtttcaacaatggcgctgttccttctctacgaatccgcttcgggctacagcctgttcgaggttcacggcgtcgatgaaatcggccagaacaccgaagcggttcggaactccgtttcggacctcaacaggttcggcaaagtcgttaagcttcgctccttcaaccctttcacttccgctctcgatgctctcaaacagtgcaacgccgtctccgaaggcatattaactgatgagctgaggactgtcttggagaccaacttgcctaaagtgaaggaaggtaagaagtccaagttcagtttaggtgtgtccgatcctaagattggttcccagatatctgaagtgactaagattccttgccaaagtaatgagtttgtgagtgaacttcttcgtggtgtgcgattccattttgatacgtttgttggtgatctcaagtctggagatttggaaaaggcacaacttggtctgggacatagttacagcagggcaaaggtgaagtttaatgttaaccgtgtagacaacatggttattcaagctatcttccttcttgatacacttgacaaggatattaattcattctccatgagagtcagagagtggtattcttggcattttcctgagctggtgaaaattgtaaatgataattatctgtatgccaaagttgcaaaatttattgaggataaggcaaagttggctgaagacacgattccaggcttaactgacatagttggagatgaagataaagcaaaggagattgtggaagctgccaaagcctccatgggacaggatttgtccccagtggacttaatcaatgtccatcaatttgcacagagggtaatggacctatctgagtacagaaagaacttatatgattacctggttgctaaaatgaatgatattgcaccaaatttggccactttaattggtgaagttgttggtgctcgtttgatttcccatgctggtagcctcacaaatttggcaaagtgcccctcttcaactcttcaaattcttggtgcggagaaggctttgttcagggcattaaaaacaagaggaaacactcccaaatatggtttgatattccactcttcttttattggtcgggcatctgccaaaaataagggcagaatggctcgatatcttgcaaacaaatgctcaattgcatcacggattgactgcttttctgaaaggggtactactgtttttggggagaaactgcgtgagcaagttgaggaacgacttgacttttatgacaagggagttgcccctcgcaagaacatagatgtcatgcaggctgctattgaaagtgctgaaaacaaagatacagagatggaaacagaagcacctgccgaagtttcaggcaagaaaaccaaaaagaagaaacaaaaagctgctgctgctgaaggtgatgacatggctgtagatacaaatggtgatgctgtggaggatcataaatcagagaagaagaaaaagaaagaaaagaggaaattggaacaggagatggaggtcgacgatcaggctgaagatgatggtgctaatggggtcacaagtgaacaagaaggaacagtgaaaaagaagaagaataaaaaggatagtaacggagaagctttggaggctggtggagagtctaagaagaagaaaaagaaatcaaaaaagaaggatacggagtaaactatgatgtattgcagctttaactgttgaaatcgaatcttttatgttatagttttggacaatgttaaatttgctttgtactttaccagttgctgcaccagtataaactttatgttgacttgtcatttggcatacaaattttgtcctagcaattttccgcgtaaaaacagtattgaaaaagtctatctcagggcggccgat

SEQ ID NO: 2702 - DNA, 1448 bp, Glycine max
ttttttttttttttttttgcagtattaactagacggttatttaaaaaattgtaatctaaatgattgtttaattaaattttgatgaaatattacccctacatatccacatgtagttgttgaagcaattcctaagcaaccctcccaaaatatacacacaaaatagctatggagtatggataacattaacatgtacttattcctatttgcaaattagtgtttctgagaagtgaaatctggttcagctggctttggaggtaacagaggtagtagtctctgttgcattctattgtgtctgctattttctctcaaatttcgcagtgcattggcagcaaaccttgatgcatatatggttgcaccaaggcttagactagactcttcctcatttgccaaagcatcttgtagctcatcttctgcttcgcgcaatgacctctcaatcttctttttccagtatcgacgccaagctgcttgtatgaaagtagcagcccatgtcttccactgtgaggaatagaacctgaaagcgtgttggagctgtttgctgtgaaggcgtcgtaattgggaaccaccaaacttcaagtcatcagccatgagagcaaaggctttaacttctgataaggtttctactgtcctggttgaaatgggtagatttgaggaagagttgggatccaaagcccatgtcagaagttcctctccacaaagtcaccagccacgaggaacatggagttgaagaaaccagttcttccaccattcgttgtcatggtcgaaacttttccgcgcataatgaaaagcatctcatcaactggatcttcttcacgaacaatgtagctcttctcagtataaaggactggcttcagtctatcacacattgcatccaacaactgctcatccattttctcaaacattggcacttttttaactaaagttaagcaaaggtgacgcttaatgtcccttctgagatctttaggaaggttacgaattaatgcctcctcctcaacacccctattttcttgccattggtactgttcgtactttctaattctttccctcaagttctcaggtagcatacggtgggacatccactgttctgcgtcctgtctcttcactctcatctcctccactcttacagttgtagattgcagatatttctgcatgtttccaataagtaatgagaataagaccaatccaaagatggcaatgaagattgcaaaagctatttctgagacatcagtactagtctttagattttgtccaagagaacttaaattgcgcaaaccccaccaaaagcagtagaagaacttctgaggaaaatctgttgttgattctacaacacgtgaatctagagcggcgggggggggcccacgttgctgggtgtttgggtctttgattgtgtcagggtcaaccaaagaacaagttcgattgagaagtgtaaagacatttggattgcggtctac

SEQ ID NO: 2703 - DNA, 761 bp, Glycine max
gcatttgtcatatatatatatccctccctcacccttgtttgttttcgagaagacacaacaaaagaacacacattactagaaagttagaaaacatggcagcggtggccggagcatcctcgtccgtgattaaggtggctgcactttccggatctttaaggaaaggctcttacaacagagccctcattcgttctgctattgagctaagccaaggtagagttgaaggccttcaaatcgagtacgttgatatttcgcctttgccccttctcaacaccgatcttgaggtgaatgggacctaccccccacaagttgaagcctttcgccagaagattctcgcagctgatagtatcctctttgcttcccctgagtacaattactctgtcgcaagtcctttaaagaatgcacttgactgggcatcaagggcaccaaatgtttgggctggtaaacctgctgccatagtgagtgctggaggaggctttggtggtggaagatcacaatatcatctacgccaaattggagtattcttggatcttcatttcatcaacaaacctgaattcttcctcaatgcattccagccacctgcaaagtttaacaatgatggtgacttgattgatgaagatgccaagaataggttgaaggatgtccttctgtccttgaaggaatttacccttagacttcaaggaaaaaattggaaacatttcttgattccccaaaaaattggtaaaaataaacctttgggattttgggcccattcctttttaagg

SEQ ID NO: 2704 - DNA, 1384 bp, Glycine max
cggtcttcttgggtctggggcagccggaggcagggaggcataagaagataattggaagattgaagaaggagtgattgtaatctggaaggatgaggagtactattgttttacgattgggaagacgtgcgcgtattccattccaacgagcattagcaacgcagagtaacaataataacactctggtgtttatccctctccctcgctgcctcagcgcaacgcggtcgtttcactttcagcgcaattcaccgtttggattctccagcgggcatgggcaacgcaggagcatgttcatccaaacgcagcccacgccaaatccctcgtctctcatgttttatcccggcaagcccgtcatggaagttggaagctccgacttcccaaaccctcgttctgcaatgaactctcccctcgccaaatcgctcttcgcaatcgacggcgttactcgcgttttctttggatctgatttcgttaccgttacgaaatcggaagaggctgcgtgggaattcctcaagcctgaagtcttcgccgccattatggatttctactcctccgctcagcctctctttttagattctcaagccgccgcggccatggatacagctattcaccaagatgattctgaaacagttgcaatgatcaaggaattgttagagactcgaattcgacctgcagtgcaagatgatggcggggacattgaatatagaggttttgacctagatactggaatagtaaaacttagaatgcaaggggcatgcagtggctgcccaagttcatcagtgactctgaaatcaggcattgaaaatatgctgatgcattatgttcctgaggtcaaaggtgtggaacaagaattggatgctgaggatgatggagcagcattaagtggagaaattaaatagttgaacttttttttgttttttctcaaaattgctacttgcatttagtctcttcatgcatgcattttcgcactcaacagagacttagaagtacaacagcagtacatgatggaaacaaaaaaaggtgtgagtctacacaaaaaatatattgaataagtcgtgagttggatacattatagtatggcatgaaatcatcgttccatgctagttggatcttcctgacatagatgaaagtaatttatgacacgatgccattacagagatagggtgtactgtaccttattcttttcggcctgcttggctatgattcttgtttttttcgttgtagttgggtttttacaagagtactaggcattgtttgcctgttgcctctgtctcagacacgcctttatttatatcgtcatgtggttataacttgcgatttcctccttttagggttcaaatagatggatttgcatatcaaggagaacagaaaaaaggcatgcatggatcgt

SEQ ID NO: 2705 - DNA, 1754 bp, Glycine max
cggctcgagctcgagccgccctccctctccttttatttcttctataaataccccccctccctcccccccccccccaaattcattttagaagaagaagaagaacttggactattcattcatataattaattttctctcttcttcttctttctccttttccttattcacattagatcagactatggatcgcccaacactatcatcattattttcattcctactaacacttcatctatcattatcaggggtaatttcaacaacattcactctagttaacaaatgtgactacaccgtgtggccgggaattctttccaatgcgggtgttcctcctctttcaaccaccggcttggttctccaaaccggcgcctccaccacaatcgccgcacccgcgtcttggggtggccgtttctggggcagaacactctgctccgaagactccaccggcaaattctcctgcgtcaccggcgactgcggctccggcaagctcgagtgctccggaaacggcgccgcgcctcctgccaccctcgccgagttcaccctcgacggagccggaggcctcgacttcttcgacgtgagtttagtcgacggctacaacgtgccgatgctggtggtgccgcagggtggctccggcgagaagtgcaccgcgacggggtgcgtgggagatctgaacggcgcgtgtccttcggagcttaaagtgatgggcgcggatgggagagagggcgtggtggcgtgcaagagcgcctgcgaggcgttcaactcgccgcagtattgctgcagcggcgcgtacggcacccccgacacgtgcaagccatcggcttactcagcgatattcaagagcgcttgcccacgcgcttatagctacgcgtacgacgacaagaccagcaccttcacttgcgcttccgcggattataccataaccttttgcccttcccctaccaccagtcagaaggcatcacaggggcaagatggttcttcaacctctccctttcttaacaacaacagcacaatggtgtatgaaggtgcatttgatcagagtgaaatgtcgtgggccacgtgcagacacgtgttccaatcccaagccattgccggcattgtcagtatcacgatggctatgtggcggttgtgccagctcttctaacttgagcattattcttcacagggtagttgggcccatgaccttgcacgaggccacgttcattggcccaaacaaacaagttataagatatctttaccataattttatagggtagcagtagcagactccaatactacgtatatacattatattatgtatgtattatacatgtagcaaaataggtaacaacgtagtaagggaatttttagtttgttattttatgttccagttagtatttatttatttttctaggttagattatcaataggaataccattattgaattctttgtttatggccggggaaattctttatcggttcgggaatgtgcgactgtaatatttgtctaaaataaagaaatggattcgtatatcaaaaaaaaaaaaaaaaaatgcgatattgcatattattacaacattgtcaacgtgaggtgtgttcaaatatacaacactaaagttgacaaaaattgcaacattgtaagaacggataatgtaaattatgatgctgtctactaagcgatgattatgatgtaaacaagagatttaatataatggttaatgttctaaatttaaaaatgaattatttaaataatatttgagtttaatctttgaccaaaaata

SEQ ID NO: 2706 - DNA, 1035 bp, Glycine max
gaaattgaatctaaaaaataaattagaggaaaaaaaatactaaattaatctacgtggtttgatatttcaaaaggttaaaattgctaaaaattaatttagttcttaaaatgtttttttacttagacttggtctggttcacttggtcttttagatggtctcgccttattctttttacatggtcttgggtggttttagaaacactttttttccctttataaatatcaatatttctgaaccctcatcttaagagttcttgctcccatgtctttttccttttccgagttcccaagccattacttgaaaagtttcctagttctgtcgcaccaactattgttgggaagagagtatcttgtttacatcttaagggactttggagggatgtgcataataagttcttgaggagaatgtgaattcatatacgtattgatcacaattcgtgtataagaagggatgtgctagttccctatggtacaagagattcatgaactccaatctcaagaacttatggacgtgatgtgctagtccctatggtacaagagattcatccaacaatgggaggggcaatagaactagcaatctgttagtgagactaacccaaaaattcactagggaggagaaagaaaatgtgagaatcactggagaccaagtcaaagataagactcaatccaaaagattaagtgaacaagatcaagtcaatgtaaaatatctctcttgataagcaataagttaatcaattaattaaaggtatataccttttgaaatatcaatacaataaaatctctgttgctcttttctagcattccaatttcccaagtattttgtagatttacataaacactgttatgaagcctctgctgccagaaatgcaaagtgtaaccgtaccatgtatttcagtgatcttccccagcttttctgtaaagaattacaaagttcatgtctgcaaaaggccaagttcaaggaatgttttattcatcaatgttgaggtagccttctcaatttgagttaatgaagttccatattatggtttatctttca

SEQ ID NO: 2707 - DNA, 1805 bp, Glycine max
tcagctacgtaggccccccccccaaagagttgcatgtttcagagacactgcaaattcacatgaagaccccttgggctgccccttcccttatggccaataagagtgtgcttgaccacagatcatcttcatcccctactcgtgtgaccacagatttaggattgggaacgttatatacatcaactgctcaggatccagataccccaaaactgcaagatcaaagaaagcatcttcagcgcttgtcagattctgtttcaactgattgtgatggtacgaatgaaaatacttctcaccgaactgctagatcttcctgctctggttcaaatttggaaggaaaatttgatttagcagatttcaagtctcttaatcgacttctcaatgaaaaggttggctggcaggatcaggccatacgtgctatcagtcaaactttgtccctttgtaaatctggtgcaggaaagcgtagaggctcacatggtagagcagacatatggttggctttccttggaccagatagacttggaaaaaggaaaattgcttcagctcttgcagagactatatttggaaaccctgaaagcctaatctctgtggatctgggcttccaggatggcttttacccattgaactcggtttttgaataccaaaaatcacgttgttatgatgtgcttaggaggaagacaattttggattatattgctggggagttgagtaaaaaaccccattctgttgtctttcttgaaaatgtagataaagctgatgttttggtgcagaatagtttgttgcaggcagtaagaacaggcaaattttcatattcgcatggaagggtgattagcatcaataacactatctttcttgtaacctcaactgtctgtaaaggtaatggctcttttgttttggaagagtctaagatgttttctgaggaaagaatgcttgaagccaaaagatgccaaatgcaattattaattggacgtgcttctgaggatgccaaaagaattggtggcacaaatgttaaggttgtacccagaaaagggttttccaaatcatcatctctgaacaaaagaaagcaggctgatattagtgactccaaggagggagcaacaagcaagatgcagaaacaagacagcgaggcatctcgatcctttctagatctaaatatgcctgtagaggagggtgaagagggtgtcaatgacaatgaccatgaaagtgaatccatgtcagaaaacacagacgcctggttgagtgatttctttgatcaaattgacgagaaagtggtttttaagccattcaatttcaatgagcttgctgagcaagtattgaaaagaattggcatgctatttcaaaggacattcggctcagagcttcagctggaaattgatcatgaggtaatagcatacatactcgcagctgcttggttatcagacaagaaaaatgcagtggaggattggattgaacatgttcttggcaaaggcttcgttgaagctcagcagaagtaccatcctgcagctcaatatgtagtgaaactggttaattgtgaatccatttttgtggaagagcaagcccctgatgtatgccttccagctagaattaacatggactaaattttttgctctctttgtattgttgtaatcagttgtaaaatgtagcttttaggatatatatagcatttggtagttggtagcggtgttcagctaattaatctcactatttttgttttctttaaatcattgtgttgtaatttctatgataaatgaatgtgtaattttctatatattatacctatttaatacatcctttaaaaaaaaaaaaaaaaa

SEQ ID NO: 2708 - DNA, 1804 bp, Glycine max
aactcactcactcattcaagtcgctaatcctagttccttcaactcctcgctggcaacaacagcagtactaccattagccgcgtttttcaaaagtgattttcgagaattagcgatgggaattgaaagaggaggcttcaagggattcaggagcgcctggagcgtgccgcccaagccgtgcgattcctgcaagctggcctcggcggcgcttttctgccgccccgattccgcgtttctctgcatcgcctgcgattccaacattcactgctcgaacaaactcgcgtcgcgccacgagcgcgtgtggatgtgtgaggtgtgcgagcaggcacccgctgctgtcacgtgcaaggccgacgccgccgccctctgcgtcacgtgtgactccgacatccactccgcgaaccccctcgcgcaacgccacgagcgcgtccccgtggaacctttctttgactccgctgagtccatagtgaaagcctctgctgccgccaccttcgggttcattgtcccatccgacgacggcggcgcctccgacgctttcgcccccgatgactccgacgccgccgcgtggctcatcccgaaccctaatttcgggtccaagctcatggacgcccccgaaatcaagtccaaggagatattcttctctgaaatggaccccttcctcgattttgattactcaaactccttccaaaacaacaacagcgccggaaacgacagcgtcgttccagttcaaaaaccctctctcgcccctcccctaatcaataatcaccaccaccaccaatcagaaacttgcttcgacgtcgatttttgtcgctcgaagctctcctcctttaactacccttccaattctcttagccaaagcgtttcgtcgtcgtcgcttgatgttggagtggtgccggacgggaacacggtgtcagacatgtcgtattcttttggtcggaacagttcggattcgagtgggattgttgttgtgtcaggaaatagtgtggggcaaggtgcgacgcagttgtgtggaatggatcgggaagcgagggtactgcgatacagagagaaaaggaagaaccgaaaattcgagaagacaattcgatacgcatcgcgaaaagcatatgcggaaacccggcccaggataaaaggccgcttcgccaaacgaacagaaattgactcggatgtggagcgtctctatagccctggccctgcggtgctcatgctggacactccatacggcgtcgtaccatcgttttagttaatttcaaaatgaagaaacgatggagtgcatgaatcttagaataatgattagcgattctgtgggattgttaggggaaaaaggtgaagaatcgaatcggtacgaacgtgattcttagctggagcgcgatgggggaagattattgtgaagatttgtctcgatcgaccagaaaagcccgtttactttttataaaaaaaaaaaaaaaaacttttaaaagggggctgctgtttcatattcacctcgtgtagaattagaatctgtactgtaaactcttttcactgccttgccttctgtctttttttagtataaaagtgtcttttttctatcagccagatcacggatctcttcctccgttcctgttggctgtcactcccaactatatttatcatatcacttttttattatatgatgatcatcaaagcctttgttttatcaacgagttatatgcattctatgctcaccccaagtcaagtttcggcttttgattccctaaaattcgtttgagaaatgcttgtacttttatttagtcttttatgtaaatatttcaaatattgttcaaaaaaaaaa

SEQ ID NO: 2709 - DNA, 1792 bp, Glycine max
  misc_feature (1781)..(1783): n is a, c, g, or t
  misc_feature (1785)..(1785): n is a, c, g, or t
agaaagaaatcaactcactcactccccaaacacattcaagtccctaatccttttccttccactcctcgcaataagaggattagtaccattagccgcgtttttcaaaagtgcttttcgatgggaattgaaagaggaggcttgaagggattcaggagcggctggagtgtgccgccgaagaagccatgcgactcctgtaagctggcttcggcggcgcttttctgccacctcgattccgcgtttctctgcatcgcgtgcgattccaagattcactgcgcgaataaactcgcgtcgcgccacgagcgcgtgtggatgtgtgaggtgtgcgagcaggcacccgcttctgtcacgtgcaaggctgacgcggccgccctttgcgtcacgtgcgactccgacatccactccgccaacccactcgcgcaacgccacgagcgcgttcccgtggagcccttcttcgattccgcggaatccatcgtcaaagcctccgccaccgcctctttcgggttcgtcgtcccctccgacgatggcgctgcctccgacgtcttcgcccccgacgactccgactccgccgcctggctcatcccgaaccccaatttcgggtccaaactcatggacgcccccgaaatcaagtccaaggagatattcttctctgaaatggaccccttcctcgattttgattactcaaactccttccaaaaccacaacagcgccgtaaacgacagtgtcgttccagttcaaaccaaaccctctctcgcccctccccccatcaacaatcaccagcaccaccaccaatctgagacttgcttcgacatcgatttttgccgctcgaagctctcctcctttaactacccatcccagtctcttagccaaagcgtttcttcgtcgtcgcttgatgtcggagtggtgccggacgggaacacagtgtcggacatgtcgtattcgagtgggattgtggtgtcgggtggacaaggcgcgacgcagttgtgtgggatggatcgggaagcgagggtgctgcgatacagagagaaaaggaagaaccgaaaatttgagaagacgattcgatacgcatcgcgaaaggcttatgcggaaacccggcccaggataaaaggccggttcgcgaaacgaaccgaaattgactcggatgtggagcgtctctatagccctggcgctgcggcgctcatgctggacactccatacggtgtcgtaccaacgttttagttaattaatcaaaaagaagaagagacgatgggtgcatgaatatagtgttgggaaatcttagaataatgattagtgattctgtgggattattaggggaaaaaaggtgaagaatcgaatcggtacgaacgcgattcttagctggagcgcgatgggaagattattgtgaagatttgtctcgatcgaccagaaaagcccgtttacttttaaagggggcttctgttccatattcacctcgtgtagaattagaacctgtactgtaaactcttttcactgccttgcctgcttctgtctttcttagtattaaagtgtctttttttcgatcagccagatcacggatctctttccccattcctattggctgtcctccccaactatatatatatatcacttttttaatacatgatgatcatcatcaaagcctttgttttacttttatcaactccttatatgcattccaaggtcacaccaagccaagtttcggcttttgattccctaatattcctttgagaaatacttgtgctttatttactcttttatgttaacatttcaattactgttgagcattnnnantccaaga

SEQ ID NO: 2710 - DNA, 1277 bp, Glycine max
tcagctacgtaggccccccccccatcgataaacaatttacagaagccaccctctcaacagaggcaaagggcaaaaaccatcgatgatgtttctctgagtctgaggattcacgcgttactgttactgttactcaactcttattcccttccttgattccaattctccgcacttcatttcatttgaattctgaaaaattaggattagggttttctttctttcagtgaaaaaagaagaagaagaaaaaagtggttttggagaaatggttgagcaatcggtgctggtgctcgaaaagcaagggccaaatccagtgttatcagaaggaatccacgattgggtgtttgagtgccatgggcttttgcacaatgcggttttgatcatcgcttcttttcttttcgtcttgtacttagcactgcaagctaaaaagagcttcctcagactctcccatggccgctcttatatcattatatcctattacgcttccctctggcttgtcagcatccttaatcttctttggtgcttttcccaggcatgggagtgctctcctgggaaagagttcgcatggaacttgttatccctctttactacttctggaatgctgtttctagaagtgagcttgcttgcttttttacttcaaggaaatagtaccagtggcttagaagcgttgacgcgaacttttggtatatcagggattattgttggttttgatatcttgttgaagcaaggcctgcttactataagtatgttaccattatgttcatcttgaatgcaattgcgctgtttgcttgtggcattactggaaacggcgctgcttttggtttctggttatatcatttcacggttgtatgttaccatgctgcctatcttcccctgctgtatataaccttcctggctgacttttttcaggaggaagatttgcatttggagaatgtgtactactctgaaatgaaagatgctggtttctttgaagcagattggaactgatgtggtatcgactgctagattagattaataaggcctcaaaggtactaatggaagggcattcgttcacgaaatttgtaaataaagtaaatattttagtagatcgccttagtagataaatttttaaaaagaaaagctggtagcctcatgttagtgttatattagaatgttctatgcgtgattatattgaattaaagttgtctgttagtgcaatgaatcaatttcttaagaaagatgagtactagaacaatcaattaccttttaagcatttaacgtgtgtagaaaaatatgatttttat

SEQ ID NO: 2711 - DNA, 1369 bp, Glycine max
aatggcttcagttctattgaaatagcatctataacttctgcttcagccactgttttggtaggcccccccccatagccctgattgttctattcttttacactcggaagtggaagccaaggtccagggttgttggttctataagaaaagaagttacagtgttcactgatattggggtcccgttgacgtttgaaacggtagtccaagccacaggaaacttcaatgcaggtaactgtattggcaatggaggttttggcgcaacatacaaggcagagatatcacccggaatcctggtggctgtcaaacgacttgcagttggacgtttccaaggtgtccaacaattccatgctgagatcaagacccttgggaggcttcatcatccaaatcttgtcactctgattggttatcatgcttgtgaaacagagatgtttctcatatacaattttttatcaggtggtaatctcgaaaagtttatccaggagaggtccacaagggatgtggagtggaaaattcttcacaagatcgcattagacatagcccgtgcactcgcctatctgcatgatacgtgtgttccccgcgttcttcaccgcgatgtcaagcccagcaacatcttgttggatgatgatttcaatgcttatctatctgactttgggttggctagacttctggggacttcagagacacatgctaccactggtgtagccggaacattcggctatgttgcacctgaatatgccatgacgtgccgtgtttctgataaggctgatgtgtacagctacggtgtggtgcttctggagttgctctcagacaagaaggcattggatccttcgttttcttcttatagaaatggtttcaacatagtggcatgggcatgcatgctactgaagcaaggaagggcaaaggagttcttcactgctgggttgtgggaagcaggacctggagatgatttggtagaagtgcttcacttagcagttgtgtgtactgttgacattctctctaccagacctacaatgaaacaggttgtaagaaggcttaagcaacttcaacccctaacatgctagccccttgtgtgtgtggctgtgttcctttaacattattaatcttagaaatattccctttggaatttgtaatctgtaatttagcattttttgtggatttaggttgagttcccaatttgtacttattccccccgtgtacatttttatatagttgtgtccccaattttccatgctcttgactaggtatatttaggtttgggggcttggtgttgattctgcagaagaatgcagatatttgatttccccttcatacacgtgcattccatgtctatttgttcaataaaattgaagaatagaatatgtattttgaaagg

SEQ ID NO: 2712 - DNA, 2053 bp, Glycine max
tcgatcagctacgtaggccccccccccatcataaaaaaatggcatctatctctcctctatccttcgtgcccacagtcaataatgtctcttccaactccatcgctcccccttctccgttgcatccattttcacgattccaatccattaaaaatagaaagccaaaaccccatcatattcctagaatcacatgcagtggaaaccaaaacaatccaacaccaaaccctaattcccagggagaacctccacatattgtaggacataggaggaacgttctacttggcctaggagggctttgtggtgctgttactcttaacaacaacaacccttttgcctttgcagctccaatatctcctcctgacctaaacacgtgcggtccaccagacctacccgcaggtgtaaaacccaccaattgttgccccccatcttccaaaatcacagatttcaagttctctccctctaaccaacccttgagggtaagaccagccgcacatttggtcaacgatgagtatctagccaaatacaaaaaagcccttgacctcatgaaaaaactcccctctgatgacccgcgtaatttcacccaacaagccaacgttcattgtgcttattgtgatggtgcatatcaccaagttgggttccctgacctcgatctccaagtccacaactcctggctcttcttccctttccatcgttggtatctttatttctatgaaaggatcttggggagcttgatcaatgatccaacctttgcccttccattttggaactgggatgctcctaagggcatgcaacttccttccatttacgcagaccctaaatcacccctttatgacactctccgcaatgccaatcatcaacccccaacactcgtagacctcgacttcaatctcgaggatcctatttccaatggcaaaatttccaacaacctcaccataatgtataggcaagttgtgtctaacgggaagactcctacattgttccttggaaatccttaccgtgctggggatgagcctgacccgggttttggatcagtagagaatgttccacatggccctgttcatctttggaccggtgatatcaaccaacctaacattgagaacatgggaactttctattcagctgcaagagaccccattttttattctcatcattcaaacattgataggatgtggtccatatggaaaacacttggtgggaaaagaagggattttactgattcagattggttagaatctgcgtttctcttctacgatgagaacaagaaccttgtgcgtgtgaaggtcaaggattctcttgacactagaaaactagggtatgtttaccaagatgttgacattccatggttaaattctaagcccacgccgcgtaggtcaagggttcagaaggtagcattagcacaaaattttggtgttggtgcagcacatgctgctgagacttcaaggaatgtgaagttcccactagtgttggattcagttgtgagcacaatggttaaaaggccaaacaagtcgaggagcaagaaggagaaggaagaggaggaagaggttttggtgattgaagggattgagtttgagagaaacacacctgtgaaatttgatgtgtttatcaatgatgaagatgataagcagattcgaccagataatacagaatttgcaggaagctttgtgagtgtgcctcattcacatatgcacaaaaacaaggacatcattacttgtttgaggctgggacttacggatttgttggaagaattggaagcggaagatgatgacagtgttagggtgacgctggttccgagatatgggaaagggcgtgttaaaatcagaggcatcaaaatagagcttctttcggattgaaaattatctatatgcttcaactacttatatatgtgtgtgtggtaatacatatatggttactagtttccaataaagtgtgtaactcataaagagatattatgtatttcctatcatatgctgattcatttaatacttgataaataaaataaaagattaatgcgtatggataatataaaataattttataaaaaaaaaaaaaaaaaaaa

SEQ ID NO: 2713 - DNA, 1863 bp, Glycine max
atcgagtgtgggaggccattacaaaggcttttgcaagccaaatgaagtctgctttcactggatcaagttttgttaaagagatttttacaatgggatatccaaagctttactccatgatagagaatctacttgaaagaatttcacatgacacagatatcaaaggagtgttaccagctatcaatttgtctggaaaagagcagataatttcagctgtcgaaatattccagaatgcatttttggctcattgcttgagtcgcctttcagatctagtgaattctgtatttccaatgtccagtcgtggtagtgttccctccaaggaacaaatatcaagaattatatcacgcattcaggaagagatagaagctgttcaggtggatgcacgcttaactcttcttgttttgcgtgaaattggcaaggtgttaattcttcttgcagaacgagctgaataccagatatccactggtcctgaatcacgtcaagtgggtggtcccgcaacaccagcacagctcaagaactttacattgtgtcagcatctgcaagatgttcatacacggatatcatctatacttaaaggaatgcccagtattgctgcagatgtgttgtctgcttcattaggtgctctatatggtgttgcctgtgattctgtaacagctttattccaggcaatgctggatcgtcttgagtcttgcatattacaaatacatgatcataactttggagtgctcggtatggatgctgctatggacaacaatgcatcaccttacatggaggagctccagaagtgtattcttcactttcgcagtgagtttctgtctaggttgttgccttccaggaattcaacagctcctgggacagagaacatatgcaccaggcttgtccagagcatggcttcacgtgttctagtattcttcatccgacacgcatctcttgtgagaccactttcagaatcaggcaagttgaggatggctagggatatggctgaattggagctagctgtgggtcaaaatttgttccctgtcgagcaacttggtgcaccatatcgcgcacttagagcatttcgtcctcttattttcttgggaaacgtcccagcttgcatcatcaccacttcttcaagatctgccaccaaatgtcatacttcatcatctgtacacccgtgctcctgaagaattgcagtcaccgctgcaaaggaacaaactaacaccattgcagtattcactatggctagattctcaatgggaagatcaaatctggaagggcatcaaagcaacacttgatgattatgctgcaaatgtgaggagcagaggagataaggagtttagccctgtttatcctcttatgcttcaattgggttcttctttgattgaaaaagatcagacttcctcaaagtcatgatccagtaaagaatttgtagtctagcaaattaaaccacatctggtacttcccatattgcttcttgaaagttattgaaaagagtttggttgtggaaacatgaggaagaggcctgctacttctgctagcaagcatgaggtacaaacatttaaatgattaaattttttttctttctttcatttctattcatcttccttcctccttccttccttcctttttttttttttttcctttttaaatgaaattactgttattggttaatctcgaatttcttgattatttgttgttactttcaatgtagagaaatataaccttttcatggaatgtagaaacaagtgctgttgtatactccccatgattaatagacatgtaaacgattatttcatcaaaaaaaaaaaaaaaaaaaaaaaaaaaaaaaaaaaaaaaaaaaaaaaaaaaaaaaaaaaaaaaaaaaaaaaaaaaaaaaaaaaaaaa

SEQ ID NO: 2714 - DNA, 1135 bp, Glycine max
atccttggcaatcaaacctaaaattgattaaacacaacgaagaagcaacttttttttttttttttcaaatcagaagcaaaaaaataatacaaaaagatagtctcaatattctttatgcaagttttacccaacatttgacgatttctagctttaaacggtgttacacatggaataaatacccaaaaaagaatgatagaaaatacaacaacatttgtattttacacttgacctttcgtgaacacatatgagcctcgatgacttgcttttgctatcaccagcatttgaaaactattgtagtattatgcaaccactcacctccatggagaccgtgtaatgtatctaagaactctgtactttcccttgagagtgtgcatgagaattggcaagcccttccttccaccctttcttgcgcgctctaagttcccataatgcagttagcttcttctgcgtgactaatgtcaactcagccttctccctagcctcctcgcacgtttccatccctgaattgcacttgtctgcttccttctgatactgagatgcaatcttctttgcctcaagcaatgccatgtcagcatgttgctgattttccacggcttggttctcccgtagcttgagttcttctgccaatagctcagcaaaattcttttcagtgtctccactcacttctggatcaggctttgcacaatctccgaaggaagtgttgctcagtccttgtggaatagaaagaatgggttgtgaagagcaatcgcagatgcagggggcacaagtagaagaagagtggttgaccgcagccaaaccttcaacgaaatgccagtagagagggggacccactatgtaccctgctatgaagagcgccaccaccaccaaactcaccctcaacaacacggcttttgattggttcagagccatgtttttcgctctgtgttggcacacacaaacagaagaagacagcaacaactaaatgaaatctagagagagaaaaagaatgatgggtggtgttgtgggaaagttaaggttgtttatctggaggcgtcggcaatgtcaaagtggaaagattgacaagagttaccactacactgcttcatcttctgtcttccacttttctccacttttaattcctcttctcgcagccgta

SEQ ID NO: 2715 - DNA, 1117 bp, Glycine max
attagatataataggtattgttaacattaatataatagaatttattttttagcaacagtccgagccttggttcaaatctgttgcctttttaatacaaaaaagacagtctattttttatgcaagttttacccaacatttggtgatttctagctttaaaccgtgttacacatggaataaagacccaaaaatgaatgacagaaatacaacatttgcattttacacttgacctttcatgaacacatgagcctcgatgactcacttttgctattaccaacatttgaaaactattgtagtattatgcaaccactcacctccatggaggtggctgtgtaacgtatctaagaactctgtactttcccttgagagtgtgcatgagatttggcaagcccttccttccaccctttctgacgtgctctaagttcccacaatgcagttagcttcttctgcgtgactaatgtcaactcagccttctccctagcctcctcgcacgtttccattcctgaattacacttgtctgcttccttctgatactgagatgcaatcttttttgcctcaagcaatgccatgtcagcacgttgctgattttccacagcttggctctcctgaagcttgagttcttctgtcaatagctcagcaaaattcttttcagtgtctccactcacttctgggtcaggctttgcacaatctccgaaggaagtgttgctaagtccttgtggaatagaaagaatgggttgtgaagagcaatcgcagatgcagggtgcacaagtagaagatgaagagtggttgttcactgcaacgaaatgccagtagagagggggacccactatgtatcctgctatacacagcgccaccaccaccaaactcaccctcaacaacacggcctttgattggttcagagccatgtctttctctctctttctgtgttgttggcacacacaaaaagaagacagcaataactaactgaaaaaatctagagagaaaacgaatgatggatgggtagtgttgtgggaaagttaaggttgtgtatttggtggcgtcggcaatgtcaagtggaaaaaagaatgataagagttcctcagttctcactgcttccaattctgtcttccccttttctccc

SEQ ID NO: 2716 - DNA, 787 bp, Glycine max
aaaaattagattgaattgaaaaatagataaaacagtccagccacttgcaaccacgctcagagcgacaagttcagtgttgggatcattcgggtttttgttactcggttcactcgaatggcgacatccttgtcaaacatgttcttgaagggaatcgcagctcgttctctcagcagacccttaaatgggttgttttattgcacaagatactcgactactgtgtcaaatgattctgacacgcatgatgacttcaagccagctaataagcttgagaattctggcatttctttgtcaaatgttattgagcaggatgtcaaggataatcctgttatggtttacatgaaaggtgtgcctgattttccacaatgtggatttagttcgcttgctgtaagagttttaaaacactatgatgttcctattagtgctagaaacattttggatgatcctgaccttaaaaatgctgtaaaagccttcagtaactggccaacatttcctcaaattttcatcaagggagagtttattggtggatcagatattgttctcaatatgcaccagactggtgaattgaaggaaaagcttaaagatattacttccaagcagtgaacacacgcctaaggtgaactaaggtgatgaagttttaagagatgtagtttacaagaacatgcttcatatcaactattaagagatgtgaatactttgtactttaatttctggattatattcaaataagagagggcgagccctggtgcagcggtaaagttgtgccttggtgacttgttggtcatgggtt

SEQ ID NO: 2717 - DNA, 1750 bp, Glycine max
ggcgtgacttggcgcatgttgtattgtagagtttggggtagaagttggcatttgtgtgagctcactctctattctaagtttccgcagccaccactcagagccagcgagtgatgatcgcttcgccgcagtaatcgccggaaacgaattcgccgtttccctgccgagatctctcaatctccgacgactcagatacctctattaattttcctccggttaggttgttagggtataaatagtacgtagtttttccttatttatggcttcggagaatgtgaagaccggggattccgccgtcaccaccatcgtcaatctcgccgaggaggccaagctcgccagagaaggcgtcgtcaaagctcccagctacgccctcgccagcatctgcaagtcgctcgtcgccggtggcgtcgccggaggagtgtcacgtactgcagttgctcctctggaacgattgaaaattttgctgcaggtccagaatcctcataacattaaatacaatggaacagtacaaggcctaaaatatatatggaggactgaaggatttcgtggacttttcaaagggaatggtactaattgtgctagaattgtccctaattctgctgttaagttcttcagttatgagcaagcttctaaaggtatactgcatctgtatcagcagcaaactggaaatgaggatgctcagctgactcctcttttacgtcttggagctggagcatgtgctggaataattgctatgtctgcaacttatccaatggatatggttcgaggcaggattactgtgcagactgaggcatccccatatcagtacagaggaatgttccatgctttgtctactgtgcttagggaagaaggtcctcgtgctttatataagggctggcttccttcagttattggagttattccttatgtaggtctcaactttgctgtctatgagtctctaaaagattatttaattaaatccaacccatttggtctagttgaaaattctgagttgagtgtgacaacacgcctggcttgtggtgctgctgctggaactgttggacaaactgttgcttaccctcttgacgttatccgtcgaagaatgcagatggtcggttggaaccatgctgcttctgttctaactggcgatggaagaggcaaagttccactggaatacactggaatggtcgatgcattcagaaaaactgttcagcatgagggatttggtgcattatacaagggtctggtgcccaactctgtaaaggtggtcccatcaatagcaattgcattcgtaacatatgaggtggtgaaggacattttaggagttgagatcagaatatcggactaaagtttgataacctcagatatctgttcacctggtgtggtttttctttgttttcttttttgtaggcaaggggatgcagagatggtaacttacagatattttcttgtttttcatctctccaaggatgagtttagaaactcttagagatagtgtccataaatttattcccttgttctatttgttttccttgttctatttgtccataataagtgttgtggaaaaacaatgcaaggacatatcttcctagctttctgcactagttgagaaatcatttttcttagtggaatttgcatttaactgaaaaaaaaaaaaaaaaaaaaaataaggaattattagttttgaatgatttcattacagcgtatgctgctgtgacaatgtttattactcttcttttgggagtcaattagaaatagcagggttggacgaaaa

SEQ ID NO: 2718 - DNA, 2358 bp, Glycine max
  misc_feature (1605)..(1609): n is a, c, g, or t
  misc_feature (1645)..(1649): n is a, c, g, or t
  misc_feature (1906)..(1910): n is a, c, g, or t
  misc_feature (1929)..(1933): n is a, c, g, or t
  misc_feature (2100)..(2121): n is a, c, g, or t
  misc_feature (2132)..(2136): n is a, c, g, or t
tcgagtcagtacggctgcccggacgcgactgggggggttgtgtttgtggcctctctctctctctcagccgtcgcagtctctgccaaacactcgctcatccaaaattatgatcatttctgtgccgtaaattcgccggtaacacgagatctcaacttctcgcgccgttttcttttccccctttaaaaaaagtacaagttcaggttaagttagggttccatggcttcggagacgaaggtcgtgaatctggctgaggaagccaagctcgccagagaaggtgtaacgactccctcatatgcttttaccaccatctgcaagtccctcgtcgctggtggagtcgccggaggagtatcacgaacagcagttgctccactggaacgcttgaagattttgctacaggttcagaatccacacagcattgtttacctttaaatgtggatttagctatcatttattcttgttataaagaaaaaaagtgcatctgacaagctaccttttttgttggttcttttgtggttgggtgtatcgatatcatctgtgcgatgtgatgtgcctctgccatttacaggttcagaatccacacagcattaaatacaatggaacaatttcaggtctaaaatatatatggagaactgaaggttttcgtgggctgttcaaaggaaatggtactaactgtgcgcgaattgtcccaaattctgctgtgaagttcttcagttatgagcaagcttccaaaggcatactacatctgtaccggaagcaaactggaaacgaggatgctcagctgactcctcttttccgtcttggggctggagcatgtgcgggaataattgccatgtctgcaacttatccaatggacatggttcgaggcagaataactgtacagacagagaagtccccttaccagtacagaggaatgtttcatgccctgtcaactgtactcagggaagaaggtccacgtgctttatataagggctggcttccttcagtcattggagttattccttatgtgggtctcaactttgcagtgtatgagtctttgaaagattggttaattaaatctaatccattaggtctagttcaagattctgagttgagtgtgacaactcgcctggcttgtggtgctgcagctggaactattggacaaactgttgcttaccctcttgatgtcattcgtcgaagaatgcagatggtgggttggaaccatgctgcttctgttgtagctggtgatggaagagggaaggtacctcttgcatacactggcatggttgatgcttttaggaaaactgttcggtatgagggatttggcgcattatacaggggtctggtgccaaattctgtaaaggtcagtcttcatctaatactcatgattcatgaattatgttctgctatgaaaaaaatgtgggtaaaccatatctgggtaaacatgtgcatctatttagaaagtaagattttccttccttcttttgaagaaaatattattaatttactatatctatgaagcacctaaaaaatgtttgttcgtgcattatgtcacctggatgattcctgtgtgcgatccctccatcatactctgttggtgttgcttctctgattaaagctgtgaacttnnnnngcttctacctgattagaacaaagtctgattttcaannnnntattgcaagactcaagtctgtggtcttggtcaaacatatgatattttgaacgtaaattatttactactcccgctcagcttcagatcagcttaatgaaatgcatgatcaaccacctataaacacatgctatatcttaggcttttattattattacccttgtctggcgttgtctcaattttatgtggtgtttaaacaatctaatgagtcataagtcatggcattgtttaagaatccctaattttatgcagtggtcatgnnnnntttggtttcatgttggaannnnnattagatgttgtctggaaccatgaaatcagtgcactttgcatagcagcctccgtgtaaagcaatcaactgaaaatgttatagttacatggttccatttgtttaatgcctccactgatggttggtgtttataaatgatctcaattcccatttactttagcaattgtgnnnnnnnnnnnnnnnnnnnnnngccaaaattannnnngaatggcattgatcttcctttaactagagctgttttgatattacttgaatcttgatctgttgcaggtggtcccatccatagcaattgcgtttgtaacatatgaggtggtgaaggacattttaggagtggagatcaggatatcagactgaagatttgcatccatgtgatatttgattgcctgttgttttcttgtaggcaaggggatgcagagatgataaatta

SEQ ID NO: 2719 - DNA, 909 bp, Glycine max
ccggtctacggctgctttgttgttgtgtttgggtttgtgtttgtggcctctctctctctctcagccgtcgcagtctctgccaaacactcgctcatccaaaattatgatcatttctgtgccgtaaattcgccggtaacacgagatctcaacttctcgcgccgttttcttttccccctttaaaaaaagtacaagttcaggttaagttagggttccatggcttcggagacgaaggtcgtgaatctggctgaggaagccaagctcgccagagaaggtgtaacgactccctcatatgcttttaccaccatctgcaagtccctcgtcgctggtggagtcgccggaggagtatcacgaacagcagttgctccactggaacgcttgaagattttgctacaggttcagaatccacacagcattaaatacaatggaacaattcaaggtctaaaatatatatggagaactgaaggttttcgtgggctgttcaaaggaaatggtactaactgtgcgcgaattgtcccaaattctgctgtgaagttcttcagttatgagcaagcttccaaaggcatactacatctgtaccggaagcaaactggaaatgaggatgctcagctgactcctcttttacgtcttggggctggagcatgtgcgggaataattgccatgtctgcaacttatccaatggacatggttcgaggcagaataactgtacagacagagaagtccccttaccagtacagaggaatgtttcatgccctgtcaactgtactcagggaagaaggtccacgtgctttatataagggctggcttccttcagtcattggagttattccttatgtgggtctcaactttgcagtgtatgagtctttgaaagattggttaattaaatctaatccattaggtctagttcaagat

SEQ ID NO: 2720 - DNA, 1290 bp, Glycine max
accaaaaaatcgacacacaccataatctgtttttttatgtttctctctcttctttccatttgtattgcgcggaattcagatctagcgtttgcactttgcacaatgcgagttctataggatcgtttggttataccgattagtgttactaaaacaacgtttttgtgatatcgagaaaaaagaaaaataaaaagtgatgtcgaggagaccggggaatccttatagaaggttcggtgacagtggcggtggactgttctcgaaatctaggtcgccaccggttttgtctattgcgctcgtagttgtgggaggtttgtttctcgttggctatgtgtatagaggctcaggtggaattggaaaccgtatagaatctgttagcagggttgaaggtgattatttgtgcagtagagaggtccaacaagcaattcccattttacagaaagcatatggagatagcatgcataaagttttgcatgttggtcctgatacttgctatgtggtctctaaattgctgaaggaggaggaaactgatgcctggggaatagaaccatatgatacagaggatgctgataataattgcaaaacacttatacgtagaggcagtgtgcgtgtgtctgatatcaagtttcctcttccatacaggccaaaatctttctctcttgtaattgtttcagatgctctggattacctgtctcccagatacctcaataaaactcttccggatttggtgagggtagcatctgatggtgtagtgatatttactggttttcccaccactcaaaaggccaaggtagctgatgtttctaaatttggaagagcggccaagatgaggagttcatcctggtgggtcaagtttttcctccagattaacttagaggagaatgaagctgctgttaagaagtttgaacaggcttcaaccaagagttcatatgttccaaaatgccagatattccacttgaagtcactccattgactcgtgggatggttcagcattggagctctgattgctgcttctccgttttcatttaaaacactttcttctctataaaggcaatttaattctttgaaatatactcgccatagatggtgtatcgcttttgttgatagatttttattctttgaattccagcccctggctgtaaaagacaaatcaatttagtatttttactaaattattagttgaattaggcgatctataagttgcagtgattgttgtgctaaagtaatattccttcttttgttgagatataaattaaatgttatcatattttctggaataaaaaaaaaaaaaaaaaa

SEQ ID NO: 2721 - DNA, 1217 bp, Glycine max
acggcgcccagttcacgtctggcgggggcacaatgcaagttctataggctcgtttggttttgccgattagtgtttactgaaacaacgttttttgtgatatcgagaaaaaaaaaaaagagtgatgtcgaggagaccggggaatcctactagaaggttcggtgacaatggcggtggattgttctcttcgaaatctaggtcgccaccggttttgtctattgcgcttgtaattgtgggaggtttgtttctcattggctatatgtatagaggctcaggtggatctagcagccgtatagattctgttagcagggttgaaggtgattatttgtgcagtggagaggtccaacaagcaattccccttttacagaaagcatatggagatagcatgcataaagttttgcatgttggtcctgatacttgttatgtggtctctaaattgctgaaggaggatgaaactgacgcctggggaatagaaccatatgatatagaggatgctgataataattgcaaagcacttatacgtagaggcagtgtgcgtgtgtctgatatcaagtttcctcttccatacaggccaaaatctttctctcttgtaattgtttcagatgctctggattacctgtctcccagatacctcaataaaactcttccagatttggtgagggtagcatctgatggtgtagtgatatttactggttttcccaccactcaaaaggccaaggtagcggatgtttctaaatttggaaaagcggccaagatgaggagttcatcctggtgggtcaagtttttcctccagattaacttagaggagaatgaagctgctgttaagaagtttgaactggcttcatccaagagttcatatgttccgaaatgccagatattccacttgaagtcactccattgacttgtgggatgattcagcattggagctctgttgctgcttctccattttcatttaaaacactttcttctctataaaggtaatttaattcttggaaatatactcgccatagatggtgtatcatttttgttgatagatttttattctttgaattccagcccctgactgtaaaagacacatcaatttagtatttttactaaattattagttgaattaggcaatctataagtaagtcgcagtgattgttgtgcgaaagtaatattacttcttttgttgagatataaagataaaaattaaatgtcatcatattttgatgaataaa

SEQ ID NO: 2722 - DNA, 869 bp, Glycine max
  misc_feature (866)..(866): n is a, c, g, or t
ccctcgcgtccgacggctgcgagaagacgacagaaggggacgcaactgaaaaagaaaagccttccactattccatatatagcagccaaaaaagaatgaagaatactgcgttgttcactatctttctactccttgctttcacctcatacctaccttcagccaccgctgctagtgtgtacgatacggatggtaatattcttcaaaagggtcgcacatattttgtgttggcagctacaagaggaaacggcggtggaatagaatttgccgcaactggaaacgacacttgccctctaactgtcgtgcaatctcccagtggcgactctattgggtttccaataaggttttcatatccatttatagaaacgcttgatgatatccttgaaggctttggtttggagattcgtttcgcttatcgaccgccgtgtagccccagttctatagccactactaagtggactatcgtcaatgatgctgttaagcttactaaaacttcatcatcgataatacccggttttttttatatttggggggcttcacctaactctaaggactataagcttgagttctgtgatcttgacaatatcaaatgtggggatgttgggattcataccgatgatgatgggagcaggcgtttggtgatcactcagaacgatccattactagttcactttcagaatactagatcatcatctgcatgaattaaggcaccactggcatagccctgaaaaaaaaaattggtgcttttttcttctagtgagagactagtataagacttaaataaatgctttggttgtaatagcattattgtaagactgcataaaataatcagagcttatgtctcaaaaaaaaaaaaaaaaaaaaaaacgncca

SEQ ID NO: 2723 - DNA, 1123 bp, Glycine max
gtcactcaccacttcaaaacattcataacacaaagcacaaagcaaagctcatcctagagttttaaaaatggcagcagcctcctccatggctctctcttccccatccttggctggcaaggccgtgaagctgggcccatcagcccccgaagtcgggagggtcagcatgaggaagaccgtcaccaagcaggcctcctccggaagcccatggtacggcccagaccgcgtcaagtacttgggcccattctctggcgagcccccgtcctacctcactggcgagttcccaggtgactacggctgggacactgctgggctttcggccgacccagaaaccttcgccagaaaccgtgagctcgaagtgatccactccaggtgggccatgctcggggccttgggctgcgtcttccccgaactattgtcccgcaacggggtcaagtttggagaagctgtgtggttcaaggccgggtcccagatcttcagcgagggtgggctggactacttgggcaacccaagccttgtccacgcccagagcatcctcgccatctgggccacccaagttatcctaatgggtgctgttgagggttatcgtattgctggtgggcccctcggtgaggtcactgacccaatctaccctggtggcagctttgacccattgggccttgctgatgacccagaggcttttgctgagcttaaggtgaaggaactcaagaacgggagattggccatgttctctatgtttgggttctttgttcaggccattgtcaccggtaagggtccattggagaaccttgctgatcaccttgcggacccagtcaacaacaatgcctgggcctacgccaccaacttcgtccccggcaagtgagcatgaaagaaaaggatgacttgtggacttttgagagtttttagatttgtgtttggtgaagtatatgttattgcaatgtacttcagataatgtgaattatcttgtgtatccgaatccaacttaatgttacttgctttttacgaaaaaaaaaaaaaaaaaaaaaaaaaaaaaaaaaaaaaaaaaaaaaaaaaaaaaaaaaaaaaaaaaaaaaaaaaaaaaaaaaaaaaaaaaaaaataaaaaaaaaaaaaaattggggggggggc

SEQ ID NO: 2724 - DNA, 1083 bp, Glycine max
aatttttcataagccaatgtctagtactcccacgcgtctcagctacggaggcccccccccacccggggactacaaatcagttttttacttgaattttcttcatccttctctgttctcctagaacttgattacttgaacattccctatgacagatgaggtggttcttctggatttctggccaagtccatttgggatgagggtcaggattgcacttgctgaaaagggtatcgaatatgagtacaaagaagaggacttgaggaacaagagtcctcttctcttacaaatgaacccggttcacaagaagattccggttctcatccacaatggcaaacccatttccgaatccctcattgctgttcagtacattgaggaggtttggaatgacagaaatcccttgttgccttcagacccttaccagagagctcaggctagattctgggctgattatgttgacattaagatacatgatcttggaaagaagatttggacatcaaagggagaagaaaaagaagctgccaagaaggagttcatagaggcccttaaattgttggaggaacagctgggagataagacttattttggaggagacaatattggttttgtggatatagcacttgttccattctacacttggttcaaagtctatgagacttttggcagcctcaacattgagaatgagtgccccaggtttgttgcttgggccaagaggtgcctacagaaagagagtgttgcaaagtctcttcctgatcagcacaaggtctatgagttcgttgtggagataagaaagaagttagtcatcgagtaggtttcatgttggatcttaatagccatagtgaagtattggtcgttcttgacctttcaactaaataatatttgtgtaataaaaaggcatttggatgtgccaaacttcatgctttctgttggattgtgtaggttttaaaatttttctgatgtatctttcatgtgtttgttggttttgcaatagagtattttccgtattatcatatatttgcatagattaacatcgaattatttaaaaaaaaaaaaaaaagaaaaaaaaaaaaaaaaaactcgagactagtc

SEQ ID NO: 2725 - DNA, 1241 bp, Glycine max
cggtttctctggttaaagtcacatttccataaggcagtgtctaatactcatcacaatatgtaagcaggccataacctgacgcttgggcactacaaatcagttttctacttgaatcttcgttatccttctttttttctccttgaactcgaatattcactatggcagatgaggtggttctgctagatttctggccaagtccatttgggatgagggtcaggattgcacttgctgaaaagggtatcaaatatgagtccaaagaagaggacttgcagaacaagagccctttgctcctcaaaatgaacccggttcacaagaaaatcccggttctcatccacaatggcaaacccatttgtgaatctctcgttgctgttcagtacattgaggaggtctggaatgacagaaatcccttgttgccttctgacccttaccagagagctcaggctagattctgggctgactttgttgacaataagatatttgatcttggaagaaagatttggacatcaaagggagaagaaaaagaagctgccaaaaaggagttcatagaggcccttaaattattggaggaacagctgggagacaagacttattttggaggagacgatctaggttttgtggatatagcacttattccattcgacacttggttcaagacttttggcagcctcaacatagagagtgagtgccccaagtttgttgcttgggccaagaggtgcctgcagaaagacagtgttgccaagtctcttcctgatcaacacaaggtctatgagttcattatggacataagaaagaagttcgacattgagtaggttcatgttggattttaatagccatagtgacgtattgatcattcttggcctttcaactaaatagtatttgtgtagtaaattaaaggcacttggatgtaccaaacttcatgctttttgtaggagtgcgtaggttttaaaaattttctgatgtatctttcatgtgtttgttggttttgtaacagaatatttcctatattatacatatatttgagtcactagtaaaaaaaatcttaaaaaaaaaaaaaaaaaaaaaaaaaaaaaaaaaaaaaaaaaaaaaaaaaaaaaaaaaaaaaaaaaaaacaaaaaaaaaaaaaaaaaaaaaaacaaaaaaaaaaaaaaaaaataacaaaaaaacataacatctaacttaaataaggggcgctctttttaagggccccattttttggacacgtttgtttaaactataaattt

SEQ ID NO: 2726 - DNA, 1147 bp, Glycine max
  misc_feature (1087)..(1088): n is a, c, g, or t
  misc_feature (1092)..(1092): n is a, c, g, or t
gcccgagaaattacataatccaaagtccaaaactcacactatatgtacggcccgggaggacgccacaggggggcactgcaaatcacttttctactttgagtcttcttgatccttctttttctccttgaactcaaacatggcagatgaggtggttctgctagatttctggccaagtccatttgggatgagggtcaggattgcacttgctgaaaagggtatcaaatatgagtacaaagaagaggacttgaggaacaagagtcctcttctcctccaaatgaacccggttcacaagaagattccggttctcatccacaatggcaaacccatttgtgaatccctcattgctgttcagtacattgaggaggtttggaatgacagaaatcccttgttgccttctgacccttaccagagagctcaggctagattctgggctgattatgttgataagaagatatatgatcttggaaggaagatttggacatcaaaaggagaagaaaaagaagctgccaagaaggagttcatagaagcccttaaattgttggaggaacagctgggagacaagacttattttggaggagacaatctaggttttgtggatatagcgcttgttccattctacacttggttcaaagcctatgagacttttggcaccctcaacatagagagtgagtgccccaagtttattgcttgggccaagaggtgccttcagaaagaaagcgttgccaagtctcttcctgatcagcaaaaggtttatgagttcattatggatctaagaaagaagttaggcattgagtaggttggagcttaatggccattgtgaagtagtggttttccattggtcgttcttagcctttcaaataagtaatatttgtgtaataaaaggcacttagatgtgccaaacttcgtgctttctgtaggaatgtgtgggttttggaaaatctctgatgtatctttcatgtgtttgttggttttgtaatttttttttggtattgtcttatacttgaataatttgagactactataatctcaattaatcttcacatgaaaaaaagtaaaaaattactaaaaaaaaaaaaaatgtaaaaannaaanaaaaaaaaaaaaaaaaaaaaaaaaaaaaaaaaaaaaaaaaaaaaaaaaaaaaaat

SEQ ID NO: 2727 - DNA, 2783 bp, Glycine max
aattcggctcgagagaatatacaaatttgagtgcggtttcgacgcaatagcgccaacagcaaaatctagttgttcgccgtttcggaatcagagggagagaagaatcctttccaaacggcgccgtattgtcattcacccctctctttaaaaggggaactctaacaccagaagaggcaagaatcccaataatcaaattcaagagattcccaaacttttttactttttattccctttttctcactatacaatacaaatacacattcaacaattttcgattcaagttcaaagccatcgacgagtgttgaggaagaataacaatgggaatgatagtggattttgaaaatgaccaaaacgacgccgttctggttccgccccctaacttcgccatggttgaagactgcgttttccgatccagcttccccaccccttccaatttcccctttctccaaaccctaaaccttcgctccatcatatacctgtgccccgagccttatccggaagaaaatctcgagttcctccgctcgcagaatattcgcctctttcaatttggaattgaggggaaaacggacgtttctatgcctgttctcaaggattctatcatggatgcactgaaagttttaattgatgtgagaaatcaccccattttggttcattgcaagcgaggaaagcatagaacaggttgcctagttggttgcttgcgaaaattacagaactggtgtttgtcctctgtgtttgaggagtaccaacgatttgctggtgctaaatccaggacaacggatttaacattcatagaaatgtttgatgttctaagtctgagtcagtgcctttacagcatcatctaccagtaccatggttcaaagaagcgtcggttgttgtataaagatgaaaacttacagaagccccgactgacatcattttagctgccccgggattttattttttttcccctttttattttgtagaactcatacttaatatagttgctcagattcttacatcgttattttcaaatttctttcaagactactactgctaaagaaaaacatatggtcctgtcttttccacctttcctgttacccttataattttcattgtcttacaccttcacaaatacttttggtgcaaccaattatttttaatgggtatgcattaattgtgggtgttttgaagccatgtatcttcaagcaaataataacagttcttagtatataagaaaatttggatccgatatttccaatgattggatccgtctgatattttcatgatccttctcaagtaacacaagaaggggataagtgcgaatttggtaacgcagcataatggagggagcaacttggattggtttagcgtttgaaatttgaatgttggagggttggagtctactgtttattgtccataagtgaagaaaagtcagcagagctttaagacgatgggaccaatgtgtcatcttgacttatccgagagaaattcgtgaagaaagaaagtgtatcattttcctttggattaataagtttggtcttgtggatagaaatgaagggcaaagcacttcaaaataaggctgtttggattgatgtaaaaaggaacaatactatgttctattgtttgaattgtttacaatagaattttacctcgtattctaaaaaaaaaaaaaaaaaaaaaaaaaacctatgaagaaccccggggacttacgcccccccggcccggcctctcacttcctcacattaatgtgtgtttgtcacgagacccatagtgctgccaaattatagtaactctctttctctatctgaagaagaagaagttctgaagaagcatgtgtggaggtgctatcatctcagacttcattggtgtgaagcgtggccgcaacctcgccgcgcaggaactgtggtccgagcttgaccctttctctgacctccttggcttcgataccaccaccaccaccaccaaccaaccaccccttccagacaaaaaagtggtgtcatcatgtgagaagaagaagaagaaaagtgtgagtgcagaaaagaagagtggtgggcgagctcggaagaacgtgtacagaggaatcaggcaaaggccgtggggcaagtgggccgcggaaataagggacccacataagggcgtccgcgtctggctcggcaccttccccaccgccgaggaagccgcccgagcctacgacgacgccgccaagcgcatccgcggcgacaaggccaagctcaacttcccggccaccgctccgccaccctccaaaaaacaacgctgcctcagccctgacaccaccaccgaacaaagcagcagctcacaatccaccactggatccaccggatcgccgccttccgccgccttccacggcggaggagatgaactcgacctgaaacaacttgaacggtttctagggttggacaacatgggtgctgagtgggacaacatggatgacctgtggatgctggacgacgtcgttgtgcccaaccgtcacttaatttactagaagggagataattaattaattaataaatggcgttttcttaagttatagttttataaaactatgttggtgtatgtgttcttagttttctgttttgtcttgtcctctcgctttggtaatttctgttttgtacggtcgaatgatttcaaaattatgtgcaacgtatcatgagagggatgattatatgttatgattatgattataaataaaggccaattagggtgtgttagcgtttgggtcgtgcatgtttatatgtagtttatgcgttgtatataatatatttggcatgacattatttggttct

SEQ ID NO: 2728 - DNA, 1129 bp, Glycine max
tctcgtctctcacattaatgtttgtttgtttgtctgtcacgagactcatacattgtgctgccaattatagtaactctctatttctctttccatctctcaagttctgaagaagaaacatgtgtggaggtgctatcatctcagacttcattggtgtgaagcgtggccgcaacctcgccgcgcaggaactatggtctgagcttgaccctttctctgacttccttggcttcgataccaccaattccaaaaaccaaccacccctgcagaaaattccagacaaaaaagtggtgtcatcatgtgagaagaagaagaaaagcgtggtgggtgcagaaaagaagaagagtgatagtgggcgagctcgtaaaaacgtgtacagaggaatcaggcaaaggccatggggcaagtgggccgcggagataagggacccacacaagggtgttcgtgtctggctcggcaccttccccaccgccgaagaagccgcccaagcctacgacgacgccgccatacgcatccgcggcgacaaggccaagctcaacttcccggccaccaccatttccgccgccgccgctccgccaccttccaaaaagcaacgctgcctcagccctgacatcatcactgaagaaagcagcagcagcagctcacattccaccactggatccaccggcgaaagcggcggaggaaacgacgaactcgacctgaaacaaattgaatggtttctaggtttggagaatgagctgcctgttagcaacaacattggtgctgagtgggacaacatggatgacctgtggatgctggacgacgtcgttgtgcccaaccgtcacttaatttactagaaggctaataattaataaatggcgttttcttaagttttagttttactttataaattgtagtataaaactatgttggtatttgtgttcttagttttcttctgctgttttgtctcttctctggctttggtaatttctgttttggacggttgaatgatttcaaaattaggtacttaattacaccctatcatgattgggatgatgattatatattatgattatgatgattatatataaataaagggtgattaagttagggcgcgtgagtgtttgcgactttgcgccgtgcatgtttttataaa

SEQ ID NO: 2729 - DNA, 1614 bp, Glycine max
  misc_feature (1547)..(1551): n is a, c, g, or t
ctgtcagctacgtaggcccccccccgcagataggaaccctaaattgcagtttgacctagagaggccgagcgagagagcgagggagcatggaggagggaaaattgagagagctgaagcaattcatagagatatgcaagtccaatccctcacttctccacaatccatctctttcattcttcaagacttatcttctcagcctcggtgctcgcatccctccccaacccaaaacggaaccaggtgattttgatgacaagtcagatcctcctttatccgcacaaaatgacattgtagaatctgatatagagttggataatgctgatgttgttgaacctgataatgaccctcctcaaaagatgggagatccttctgctgaaataacggaagaacaaagggatgctgcacaactagcaaaatcaaaagcagtcgatgctatgtcacaaggtaatttggatgaagcactggcccaactgacagaagccattttgttgaatccgcaatcagctatactttatgctactagagctagcatctatatgaaattgaagaaaccaaatgctgctatacgtgatgctgacactgccttgaagattaacccagactcagctaaaggctacaaaatacgaggaatgtcaagggctatgttgggactatgggaagaagcagcaagtgaccttcacgtggcttcaaagttagattacgatgaagagattagtatggcacttaaaaaggttgaacctaatgcccttaaaatcgaggagcataggagaaaatatgaacgcttaagaaagcaaaagcaacagaaaagagctcctatcaagactgaagctcctattaagaaggagcaagaaactgaagcccaagtacaagcagcattatctgctttaaaagatgggcaagtcatgggtattcactctagtggtgaattggaaaagaagttaagtgctgcatcaaagacatcacgcttggcgatcctgtattttactgcaacatggtgtggcccttgtcgcttcatttcccctatttatacaagcttggctgaaaagtacccaaaagtggtttttttgaaagttgacatagatgaggccagggacgttgctgcaggttggaatattagcagtgttccgacatttttctttgttaagaatggcaaagaggttgacagtgtggtcggggcagacaaaagtacacttgaaagcaagattgcacaacatgctggctctctttaagtgaataccttataaaaaccctgatacaattaacattttcttgtttcttgttttaacatgtccatagtgtcatacaaaggcaaaagatcaaattgagttacaatgtgttatggcttggcgtttcctctgtctggttgcatgtacaaaatgttgtattgatttgtaataagtttcatattttcaagccgattttatgtttgtgatgtggctgtaattaggggtggaaatgagtcaagtcaagccaagttttactaggtttgaacttggtttgagttgaatacgtaaggtttgagcttgactcattacttgtcataggttttnnnnnaaggctcggcttgacttatataaaagtctggtttggcccacgagcctatttaaaagcctgctt

SEQ ID NO: 2730 - DNA, 3571 bp, Glycine max
  misc_feature (409)..(414): n is a, c, g, or t
gattccaaatgtaatgatgatgacagcttaaaagagaagattgcagaagtaatctccctctggttttagcttaaatgttttatatcttcaataatggtaagttttgtttactctgaggattgcggtaatctctgaattatttatactgtgaaatttaattgtaaagaacatgagaagcttatttgcatttcgttttgttgaaatattagacatacaacatcgtctggagaagggctgttggatgaagccaccctttatagcttgatttaaagactttcattgtttcctatttaaaatttgaggtcttgtcctgtagattacaaagggtaggtaataacttcggatctatggacaaatggggtctgaaggaaaccctaatcaaaagcacataaatgccacggaggataannnnnncaggcatatataggcatcgtgaagtcttggagcagaagaacttcggtaaatttattaattgaatgtcaaaaacacatggaggcatcaaaattttctgatgaagttatctctgagttggagagtgaaaaccttatgcaacagatggagctagagttcttgttagacgaaatcagaaagttcaaaatggggattcatcaagttcttgcagctcttcagattgattcaggtggggggcatggcaaagggatcaagcaagaggaaatgcctatatcgcatattttcaataatattgagggcttgaaaggctctcttgtgaaaacccaagaggagaagctgcagctacttgtagagaatcctatcctcctaactgtacttttgcaacaagaatccgagggagaagaactggtgttagagaaaaggatcctagagcaagagtttgaaaatacacgagagcagcatgcaatgttgcagaaggtttagcttgaacttctggagatgaacaagcaacttaggtctgaagtgaccaagggagaagaaaaggagagtgaattacagcccaaattggaagcccttcagtggagttgatagatttgcaaagaactaatctagtgtttgaggaagaaaattgtaagctacttgaggagaaaaatttactacttgggagtgttttggagctcaaagatgcaaagtttgctgctgaacaagagaatagtgtaatcctccatgaggcactggctctaaaaaaccttagtttggtctatgagagctttttcactgagaaggtcttggaacagcgtgcacttgctgaacatctcagcgatcttcactctgtgaacagtgaccttaaacaggagcttgttctattaagggagaagtttgaggtgaaagaatctgaaaatgtttatttgaaggagtcagttgagaggatggacaaagatctgcatgaagccaaaactgaaaatgaccatttcaattgtcagattgagagttcagagcatcttcttgagaagaagaacgtggaactgttagaaatggagggaaggctaaaggctgcagaaatgttgagtgcagagttttgcagagatattgagaaattgaagatggaaaaaccaccttcaagactgatcaacgaaaatcttgaaaggcagattcttgaactatcagaaggttgcatgaatcacaaaagagaaattgagcaccttaatgaagcaaacagaagtttacagtcagagatgagatgcttacgtcaagaagttgaacaacagagggctagggaggaaacattgagttcagagctgctggataaaacaaacgaatttgaactttgggaggctgaggctgctacattctattttgatcttcagatttcctccattagtgaagcgttgttggaaaataaggtgaccgagcttactggagtatgcatgaggcttgaagatgaaagtgatgcaaaaagcttggagattaaacagatgacagaaagagtctgtctactggaaagtgaaattggaggactgaaagggcagttatctgcatataatccagtcattagttcattgaaagaggattttgcttctttagaacacactgccctagttcggataaacaaaatgcctgttgaatgcaatcaagaacaaaaggatgcagtaattgaaacttgtctccatgaaaatggctatcaaagttcaagagataacaaaagcactttgataccagatggggtttcagatttgctgagtgtgaaggcaaggattagagcggttgaaaaatcaatggtggaagaaatcaagaagcttgtgaaggaagacaatttaaccactaaagctaatccaggagctctgacaaaggcaacaaatgtggaagtttcaccctatgtggagaattgcaacagaaaagaagacaaggtacccaaggatgagagcacacatgatgtcaactcgtggagaacaaaaactgaaaatgggtcattgatgaaagatattccacttgatcacatctcagacaattcagcctccaaaagttgcaggagagaaaatagtggtactgatgatcagatgcttgaattatgggaaactgccgagcaagattgctttgctagttccatgattagtgaagcaatgaaacaaagttctgttccaacagaggatgttattgcataccatcagtcagatcattcaggtaaattccaaaatacctcttcagaattggatgtggaaaaggaattgggtgttgacaggcttcagttgtcgagaagtataaaagagagaactcaagatggcaagaggagaaagatactggagaggctttcttctgatgcgcagaaactgaccattctcaagacagctgtgcaagatttgaaacagaaaacggagacgaagaaagacgacagaagggagctggcactgaatatgaaacagtcaaaagacaaatagacgaagttgagggagctgttgtgaaattagtagatactaatgatcaactgacaaaggatcttgaagagagcgccccgtctctgaacaggcagacttcggttgagttggaaaagagtagacacatccagagaaaaagaataaccgagcaggcacgaaaaggttctgaacagataggaaggttgcagtttgaggtgcagaacatccaatacactttgctgaaattggctgatgagagcaaagggaagagcagattcactggaaaaacagtggtcttgcttagggactttattcacagtggcagcaagagaactagcaaaaagcgcaacaaggggttctgtggatgctcaaggccttcaactgatgagcactaagtgagaaaatgtagaatatcattttgttgtaagtattttctttaattgatatgtgtctaatcttagcataataatttttaattttagatggtaaagatgctattaggctttatctgatcacagtaacttatgtcagatctgtatgttctagctttcagaggacataacatgtactgagcgacattttagctaaggagttgtgctgtcatgtttgacaatgtttaagctatgaaagcacagagcacttcaacatttatatgtctagtgtgatggaaagtttgtttccctttaaggcaatctaaaatcaagctgaatggctgccccaaaagaaaagaaaagaaaagagggcgggcc

SEQ ID NO: 2731 - DNA, 1818 bp, Glycine max
acgaggcctcctttaaaggtggagcaactaatgacttttcttgagtagctatgggttgcaaattgacaccattagcttagatttcaagtctggtttggaggctttgctaaaggaaaaaccgattcgagctatcttccttggagttcgaattggagaccctactgcggttggtcaagaacaattctcccctagttcgcctgggtggccacctttcatgagggtgaatcccattttagattggtcatacagagatgtgtgggccttccttttaacttgcaaggtgaactattgcagcctttatgatcaaggttatacttcaattgggagcatatacgacacagttcccaactcattattatgcattagcaattcttccaataaattcaaacctgcgtatttacttgctgacggaagattagagagggcagggagggctaaaaggccatctacttcaactggtggacaaattcctgcagagagcaatggcctgactagccaggattcatataaaaacagcatgctcacagcatcaatcattgctgtgggagatgagattctgtttggcaatcttgaggatctgttgggaccttatttgtgtaggaaactgcattcaattggttggtctgtgtttcaacattctgctgtgcacaacaatatagattctgtggccgaagaagttgagagacaaaaatctaaaagtgatatggtatttatatatggaggtgtaggtccactgcattcagatgttaccatagcaggcattgcaaaagcttttggtgttcgtttggctcctgatgaagaatttgaagaatatctcaggcatattattggtgatcagtgtactggtgaccgaaatgagatggctcaattgcctgagggcataactgaattgtggcatcatgacaaattgtctgtgcccttgatcaagtgcgaaaatgtaataattcttagtgcaacaaatgttccggagatggaaaagcagtgggactgttggattgaattagcaaaatctagtgacctactagcattgctggaaccatatgtatcaaagcatgtgacaactaatctttcagatgttgaaattgctcaacctctgtcaaagctttgccttgaatttccagatctttatattggctgttaccgcaatgccagatatggatctcttatagtaagcttcaaaggaaaggacctaacacgcattgaatcagctataaaagctttacacaagaagtttcaacccagtgctttcgttgagatgaactaggatgatgttctaaatgctatggtccatttcttttggatgccaacagaatgaaaacctttcatggctgggatcatatcattctcatattatctacaaatataagatgcattgggataaagatggagagggcagaaaacaaggtgctgctgtgttgctagaagaaagaacaatggtacaaggaggtgactgaatcttcaattctattgccacagcacttttaactgcttcatgggggcatggacaacctatagattattatagaattattattgaattatctcaacttacatcaccactttacaagtatatactatacaggttttttcattgaaaatccatcatttaaaactttatttagcagggcgaactgcatcatcagctttggctgctatatatccgattttgttgattaaaatattgctttatagttagcaagaagtaggccatctggtgtatgaaccattttactgattattttaaccattcaacactgaggcataatttggccagtgcaataacgtagttatagggaaaaccataccccttctcgtttt

SEQ ID NO: 2732 - DNA, 2284 bp, Glycine max
  misc_feature (1936)..(1956): n is a, c, g, or t
ctaggaattcggctcgaggttactttctttaaagttgttgctacttgctagtatccaatattagcttactactagggtgtttgaaagagatggggaagacaggcaaatggcttagaaacttgttgacaggtaagaaagacaaggaaaaagagaagggaaaatctacaaccaacctgaattgttcttcaaatggaacagaaaactcaaccactccaacttgcacaaccccaaaggagaaaaagagatggagttttagaagatcatcagcctcagccactactgccacaaccacaccaccaacaacttccaaggaattgaattttgtagaaacaaatgtgactgtttcacagacggtgcaaactgacactgatattcagaatgagcagaggaagcatgccatggctgtggctgctgccactgcagtagcagctgatgctgcagtggcagctgctcaggctgtagctgctgtgatccgtttgacttctgcttccaatggaacatctaaaagcattgaagaggctgctgccatcaaaatccaatcttcctttcgctctcacctggcaagaaaagcattgtgtgctctaagaggattagtgaagttgcagggcactagtaaggggtcacttggtgagaaaacaagccaaggcaacactgagatgcatgcaggctttggtgacagcacaagtcagagctcgtgctcagaggatccaaatggggtctgaaggaaaccctaatcaaaagcacagaaatgccacggaggataatttgttcaggcatatatataatgaaatggacagaggcttggaagacaacatcaagattgtagagatggatgtttgtgaatcaaaaggtaactccacgagcagaaacagcagtgtatgtcatcatggacatgaagaacaatatgacaacagattttccacacattattcaacaaacggtttctactcaaaggaagaaaattacaaggtatcaccggctccatcagcattgacagagttgagtccaagaacctgcagtggccattttgaggactctttcagcacagcacaaagcagccctcaccctcagttctactctgcagtgtcaagatcagaagattcaaagcacccttttgctttccctaggccagcttatgcagaatccatgtcctatgactaccctttgtttccaaattacatggctaacaccgaatcatcaagggctaaagtcaggtcacacagtgcaccaaaacaaagaccggattcattcgagaggcaaccgagccggcgaagagcttcagttgagggaagaaatgtcccaaggccagtgaggatgcaaagatcatcttcacatgtgggtgccactgtccataactaccattatccttggtcaataaagctcgatagatccgcagtttcactcaaagacagtgagtgtggctctgcaagtacagtgctcactaacactaattattgcagatctcttgttgcatatggcccacgtggagatcggtactgactactgagaaagtgcaccttgtgctacgccaaatagtagccactttgcaagaacaccaaaatctagagttgagagtttcagtttgctgagtttttctccttttagatttcaaaacaaaataataactctggttttacaataaagagttgttgcgagggattgattgaagtccaatgattgtagagattcttcttctattcgttgtctgccatgtttgtggattgctttgtaataaaacattgtaacgggttttggtctgtataaattttactaagtgagatattaacaatgtgagcaatgatatttgtgataacaattcataaaggccgtcgaatgctaatacattgttctttaaaacccagatagttatgtaactaatttccatgttgatttaccgcactaactttggcagaccaatggcaataaaccagattgnnnnnnnnnnnnnnnnnnnnncagcatagcgatgttcagccaataccttgattctcctcatcaaagtcattattatgcagcacttcatatacttaggtatatcaagggttgtccagggaaaggtcttttcttctcttccactaatggtcttaagctcacggcctttagtgattcggactgggcagcttgtccggataccagaaaatctatcactggttattgtgtatttcttggtccttctttgatttcatggaagtctaagaagcaacctacagtttcaagaagttcaagtgaagctgagtatagagcactcacagatactgcatgtgaagttcggtggctgcaggca

SEQ ID NO: 2733 - DNA, 2686 bp, Glycine max
ggctcgagctcaaacaagaagaggatcaggatctggacgaaggtgcatggaatattgcaatggcaggtggtacatgccttggtttagttgcccgtactgttggagatgatattgtgccgctggtaatgcccttcattgaggagaatatcacaaaaccagattggaggcaaagggaggcagcctcttatgcttttggatctatcttggaggggccttcacctgacaaattagctcctcttgttaaccatgccttaccatttatgcttagtgctttagtgaaggacccaaacaaccatgtgaaagacaccactgcttggactttgggacgaatgttcgaatttcttcacagttcaattgttggtacaccaatcattaatgagggaaattgccaacagattattacagttctccttcaaagcatgaaggatgttcccaatgttgctgagaaggcctgtggtgctctgtattttcttgcccagggttatgaggatgttggaccaacatctccgctaactcccttgtttcaggaaattgttcaatcccttctaactgttacccacagagaggatgctacagaatctcgattgagaactgcggcatatgaaacattgaatgaagtagtaaggtgttcaacagatgaaacagctactttggtggtacaactagtttctgtcatcatgatggagctgcacaaatgtcttgaagcacaaaatctttcatcggatgagagagaaaagcggagtgaattgataggccttctttgtgggtgcatgcaagtaattattcagaaactagggtctttggattctaccaaatatgtgttggtgcagtattctgatcagataatgagactattcttcagggtctttgcttgtagaaatgccactgcacacgaggaggcaatgctagccattggagcccttgcctactcgattggccaggagtttgccaagtgcatgccggaattttaccagttcctcgagatggaccttcagaactttgaggagtaccaagtttgtgctgtcactgttggtgtggtaggggacatatccacgcgtccgggcattggaggtaaaaatactgccttattgtgatgggattatgacacaactcctcaagaatttgtcaagtgataatttgcaccgttctgtgaagccccctttattctcatgcattggtgatattgcacttgcaataggagataacttcaataaatacttaatgtatgcaatgaacacactacaacttgctgcagagatgtatgcccacacgtcaggttttgatgatgaaatgacagagtacattaattccttgagaaatgggatattagaggcatattctgcgatttttcaagggtttaagaattcatcaaaaacccagctcttgattccttatgcacctcacatcctccagtttttggatagcatatacatggaaaaagacatggacgatgtagttatgaaaacagcaattggagtccttggagatctagctgatacacttggaagcaatgctggttctttaatacagcagtctttgtcaagcagagactttttgaatgaatgtttgacctctgaagatcatttgattaaggaatctgctgagtgggccaggttggctatcaatcgtgctatatctgtttgaggttcatctgagttagcatatccattgtcataaactatctgcatgcatttgggtgtgtcgaggtgggtcttgggattgcatgtgtcaatttgtctccatggtcagacaacagaaggtatcagtctgaaggtcttctagttgtcactaactcttgcatcatcaccaatgcatcactgacttttgcatgagcaccactaagtccaggtctgtcaagaggaagaaggtagcaatgaatttgcaaatgggggtgtaggtcttcatgaaattgattgaatgaccaaggggatgcaactgattcctgattgagaaattaagctactctttagttggaattggatgatgagtttggagttgatgctacgagaagataaacccatttgagcttgaaaacagttttttctggaactggtcatgcgttatttgagtggttgaatttgcagggttgagcgaactagttttcatctacaccaccctaagtgctttatttcaagtgaatctcttcctttttttttcttctgacttttaacctgcatcaaaatcattgttttaatcatcctattgtgtataattgcccctaggctgtttggtcatccatataattttttttcctccatacttgcttttctaggctggggatccattgtgattgttgacccaggatgggaaagattacatcctagcattatgcatttttttacatgtcagttggtttcgtaggtcaaaaatcatcatgcattcatgaaaatcatcaaccgttaaattcctttgttttgaaatgcatatgtaaatcatatattggctattcctggggatacagaagaaacttgccatatactgtgatgataccaaaagaactttagtgtggtggattgttgtttcaattgttggaaggagtcgtctgagtttagcttattattggtgttatctttctcttgtctaagtaaaagtttgtgaatgttggcgacttttgtggtaattttgtcatatttcctgtatcttattatgatttggtgacgtgaatctttttgttaataagaaaaat

SEQ ID NO: 2734 - DNA, 2238 bp, Glycine max
  misc_feature (13)..(13): n is a, c, g, or t
  misc_feature (450)..(450): n is a, c, g, or t
agagctatgacgncgcatgcccgccttccttagcctcggatttcggttcaagtccacttttgacactgccaagtgccatccattcttttgctttatgttattacagcaaactgaactgaagcaagttccatccatgtctcggcttcaaaagtcaacaggtcagcagcaaatgtttcattccctacaccaaattctgtccccatacatgtcaagtgttgttgtatctgtgttattgtggcatgtcattgctgtgcttttggtttcaaatttggcctttgcttcaagccttgaggaaacaaatggacacccaaaacacaaaggtgaggtgatctatgcccacaatggagctgttgccactgatgaccgtagatgctcaaggattgggaaggatgttcttagagaaggagggcatgcagtggatgcagcagtggcttcttccctttgtttggnggttgtgaccccaaaccaaagggaagaaaggccctgcttcaagtggccttggtggtggagcctttttgcttctcaggttgaataatggggtggcaaaggcttttgatatgagagacactgctcctgctcttggcctccagggatttgtatgctggacatactacttggaaccccccccgtggctatctgtagcagttcctggagaacttgctggccttcatgaggcgtggaaacaacatgggaagcttccatggaaaagacttgtaaagccagctgagtttctagcacgtagagggtttaaagtatcaccatacctccacatgcagatggaagcatcagagtcagatatattggaagacaagggtcttcgtagcatatttgcaccaaatggaaaactcttgaatataggtgacatttgctacaataacaaactagctgagactctcagaacaatatccgagtctggtccacaagccttctatgatggattgattggtcttaatttagttaaagatgtccagaatgctggagggatattgagcatgaaagacctcaaaagttacactgttaaacagaaggaacccatatctaatgatgttcttggtctaaagctccttggcatgcctcccccttcaggtgggcatccaatgatgctactgctgaacattctagatcaatataagctcccttctggcctttctggtgcccttggtttccatcgagaaattgaagctttgaagcatgtatttgccgtgagaatgaatcttggtgaccctgattttgtaaatataactggggttctttctgatatgctttctcataggtttgctaacgtgttgaaaaatgacatcaatgataataagacttttggccccagtcattacggcagcaggtggaatccgataaatgatcatggtacaagtcatttaagtataatagatcccgagagaaacgccatttccatgactagcactgtaaattcatattttggttcaaagatcctttcaccaagtacaggaatagtactgaacaatgaaatggatgatttttccatccctagaaatgttaccaaggatgttccaccaccagctcctgccaatttcatcaagccaggaaagcggccactatcatccatgtcacccactattgtccttaaggatgggaagctaaaagctgtagtaggtgcaagtggaggtggtttcatcattggtggaactgcagaagtacttttgaatcacttcgttaaaggactgaatcctttttcttctgtaacggctccaagggtctatcatcagctactacctaacgtggttaattatgagaattggacaactgtgttcggtgaccactttgaagttccagctgatatcaggaaagcccttaaaagtaagggtcatgtcctaaagggtcttgccggtgggactatttgccaattcattgttttagacactattgtgccctccaaacaaaataaagggattgaaaacgaaacgcttgtggcagtgagtgatccaagaaagggtggttttcctgcaggcttttgagataattcatctcatctatgcaagttttctcctttacatgattcttatactgcttgctgtatttcgttaatgggaataaaaaatctatacaatttggcttctggctaaaaaaaaaaaaaaaaaagttcaactaccctgcttgttctcatctatgcaatttttctcctttacatgattcttctactgctaattgtatttaaattgaataatgggaatgaaaaatgtacacaattttcttctggtt

SEQ ID NO: 2735 - DNA, 962 bp, Glycine max
tacggctcgagaagacgacagaaggggatacatggtggagggacagagagtcacaacactacactatatggaatcatcatgcatcaatatcatcactagagaatagagatataaagagagagaaagtgtgagagaaagagaggaagagagaaggtgtgagagaaagagagaaagtggagtcttttgactgagcctagactgcaaaagccgtctaaggttgttgtctggttgatgataatgtttctttttaatgtctgaatacgcgttgaactttcaaacgtaccaccaccacactatttttttagttagccttctgatccattttcacccttaaccttaatcccaattcaaaggtccacttagtctttttccttttatttttttaaatgatggtttataaattgcattagtctccgagtgtttttattgcttgaatttcctctcctttatggagcaatgattcctttatgacagtttgcgatttttgtcggagggttatgaattgtgggtttgattcaagtttgcttctttggaattgggccgggttggaatcttccagtattggagttttggtatctgattttgaattgggtatgtgcgtatgaaggaaagttttcatctttgcttttgaatagagaaaaaaaaaaacaaaaaacaaagaaggtactgtgtggtgggtgagtttttagtttttatgagttttggtggagttggtagaagatgtgtttgctggtgaacggtgatcctactttttgaaggatattattgttgtatagttgatgtgatatctttgtgctccaacatgggttgcatatgttctaagagttcagctatagaggacagcaaggaaagtgtcactaagaaatttcaatcgtatagcacacggccttcagagttgaatgttttacggttgaattcaactaggaaggttgatgagggtggggtgaaagatgttgtaatag

SEQ ID NO: 2736 - DNA, 1901 bp, Glycine max
tcgatcagctacgtaggccccccccccgatcacaccgagtcaactcgcccccgctgttttctcggaactcagtgctgcttcagatccagcttcagtaacgtacactgaaagcaattgttgatatctccgtgttgcaaacgcgctttctgaatgcggcaatggcttctcacagcgacgccaattccttgagggacttttggatcccgggccacgttctcgtgccggattccgtggttgaaggaagcaacatcgatatcgaaggacctaagtgtccggtgctcgttttcgttaactcaaggagtggtggccagctaggaggagaactcttgaaaacgtaccgtgcgcttcttaacgaaaaccaggttttcgacttgggggaagaggctcctgataaggttctgagcaggatctatgcgaatttggaaaacctcaggcttcaaggcgatcatattgctatacagattatggagaagttgagattaattgttgcagggggtgatggaacagcaggctggctacttggagttgtttgtgatctcaaattatctcatccgccacccattgccacggttccgttgggcacagggaataatctaccatttgcatttggttgggggaagaagaacccagggacggatgaacaggcggtcaagtcatttctagatcaagtaatgaaagctaaggaaatgaaaatagacaactggcacattcttatgcggatgagggctccaaaacaaggtccctgtgatccaatccctcctcttgagttaccacattctttgcatgccttccatcgtgttcagaggcagatgaacttaataaggaaggtttccatacttttcgtgggggattttggaattacttcagcatgggaatggatgctcaagtctcttatgcgtttcattctgaacgaaaattgcatcctgaaaaattcaagaatcagttggtcaatcagagtacttatgctaagcttggatgcacacaaggatggttttttgctcctctgttccatcctccttccagcaacatagcacatcttgcaaaagtaaaagtcatgaaaacgcatggtggttgggaagacttgcaaattccttccagcatcaggtcaattgtatgccttaacttgcctagcttttctggtggattgaatccatggggtacaccaaacaagatgaagcggcgtgatagagatttgacacctccatatgtagatgatggccttatagaggtggttggttttagagatgcctggcatgggcttgttttgcttgccccaaatggacatggaactcgccttgctcaggcacacagaatccgctttgagtttcacaaaggtgcggcagaatatacattcatgaggattgatggggaaccttggaagcaacccctcccagttgacgatgatactgttttggtggaaatttctcaccatggccaggttaacatgctcgccactcatgattccaagtccaaaagtgagaatgatccgtcatcaccacaccataatgatgtcgaggaagatgatagtgatgatgaagaagctaaagcagatgaataccggaagtttggtgcggcagatacatttaaaatcccagatgaggtagaccttgctcatcttagttagatctttcattgtgaaagccattctttagagttatgcagttgacaacattgtctgcttagctgttagtaggatttttataaatatttgttagttgcctttatcaattgtatcacctatttgatctattctagcagcgttatgtctgtgaacatgtgaatagtaattaagaattgagatgcaataattcctttgatataaacgtttgtgctgttgaaatacataagaattgagatccaacaattgctttgttataaaagtttgtgctgttgaaatacaa

SEQ ID NO: 2737 - DNA, 859 bp, Glycine max
gatccgctacgtaggccccccccccatgtaaccctcaaacgttttctcacttcacacgttcattttcatttcaccttataaggttactagttattgtgaccaaccaccccatgcctaattaagccccactttactctttctatttcttccttttcttttcatcttggttcactctcacacctacaaattaataataatacaaacacatatgggcaagttgtggaccttgatcatccagcttcattctattgctgggccggttgtgacgttattgtaccctttatatgcatcggtggtagcaatagagagtcagtccaagttggatgacgagcagtggctagcttattggatcatctattcgttcctcacccttacggaaatggttcttcaacctatcttagagtggataccaatttggtacgatgtgaaactattgacggtggcatggctggtgttaccccagttcgcaggagctgcgtacttgtatgaaaggttcgtgagagagcatataaggaaatacataacggagaaggagtatctctatgtcaaccaccagcaacaaagcaaaaagtctcccaataacgggggcaaggccaagaagttcgttgaattcgtcacacccaagaaaggggatcaggaggtgtattgagttggcaattggacggtgccgagaagtgtagagttttttaactgaggatcttcgtattggtctttgaatcaactttccttttaatttggttaactgtgttttatttatgttttacgtatatatatatgtgtatgtggatctctttcgtgatcacctccttaattgttgtatcatattataatctcgtgttgcaaaaaaaaaaaaaaaaaa

SEQ ID NO: 2738 - DNA, 827 bp, Glycine max
ataatgcgttctaaatttaattccagtagacccatgcacaccagaacactgcctactgcggcgggttgcttcctcctcttacgagcctttcctttcagtccattgattcggtgggtgcgggtgcagcgaaaccgagctagaccctgatcggcgtcggcacaccgccggagaacaagatgattgtctgcgtcgccgtcgtcggtcaccagaacaatccgctgtacatacagagcttcacggaggccgatgatgctctcaagctccaccacatcgtccattgctcgctcgatgtggtcgacgagcgagtgaacaatcctaaaaagtctgggccgatgcttaatgagacgtttttgggactgctttatcctattgaaaactacaaagtatatggatatctgactaatacgaaggtgaaatttatcttggtgaccacggatctggatgttaaagatgcggatgtaaggaattttttcaggaggttccatgccgcatatgtagatgcagtttcaaacccattccatgtaccaggcaaaaagataacctccagaacttttgcagaaagagtgagcacaattgtcaagtcatttggcttgagttctgctgggtgaacatctataactggtgctagtatgatgcttgcttgatatttggcacaaacttcttttattattctaagctcttgccgttgagttttacgctggggaaaatgcttaggaacattttgatcaaagttctatgtccaatatatcctatcccaattggaccttcacctttgctttaaattgaatctgaatttttgaaaactttccccccacacacttgtatac

SEQ ID NO: 2739 - DNA, 2140 bp, Glycine max
  misc_feature (1897)..(1917): n is a, c, g, or t
  misc_feature (1956)..(1960): n is a, c, g, or t
  misc_feature (2000)..(2082): n is a, c, g, or t
  misc_feature (2084)..(2136): n is a, c, g, or t
agaggcgtaccctagtcaataagcggtgttggaatttctctccatagcatcgtttcctagctctacactcgcgctttgctacttgagctccccattcatcggaaactccattcttctctttctctctctatttttccgtttcgtttaccgatgccccttctcgatcgcggcgatgtttggaagagcaaggcgcgatccttgcagctacagctcagggaccgtttccgtgtcgccgtcgaccgccattggcgccgccgccacaaccaccacacctttatcccctccgccgatggctacttctcctccaccattcaacgctggctcagccgatttcgtgatttccgcagagactcgttgccgtcgtccacctctttttatcgcaaacgagtgattaaggatttcagttctgaagaagattcaactcttgttcgtatgatgcaagctgttgcggttcctgttcttggaaatgtctgtcacgtgtttatgaacggattaaacagtgtgcaggtatatggtttagaaaaactgcactccgctttactgcaaagacctaaaggaaaacctcttcttacggtcagcaatcatgttgcttccatggatgatcctcttgttattgcttcgctgcttcctccgagtgttcttttggacgctaggaatctcagatggacgctttgcgcaactgataggtgttttaaaaaccctgtgacttctgcattctttcgatcagtcaaagttttgccagtttctcggggtgatggcatttatcaggagggaatggacttggccatatcaaaattgaaccatggtggttgggtccacatattcccagaaggcagtcgctcccgggatggtggaaaaaccatgggctcttccaagagaggtgttgggaggttagtcctggatggagattacggctgcgagaagacgacagaagggcatacagggatgcaggagattatgcctgtaggtgctaactttcccagaataggcaagatggttacagtgctcataggtgatccgatcaattttgatgatataattgaatttgacaaagacaaaggctcaaatgtgcccagaagacgactatatgatgcagtagcatctagaattggtgatcggttgcatgagatgaaggtccaggttgacactatcgcaattgatcaagaaatgcagctacaagataagtcctcacacagcactgaacgaacatctaaaatactgcagcaggttgattgggaattatttggaatggatagcttcatgtctgtagaagatgattccaagcagagacaagaaacagttgccctctcaaatgttagtgtttctcagcatcatcaacaatctcatagtgatcagagttggagagctgggttctcatacaggatgcgtggttatattgatcagatggagcttgtgtcttttgctgcgagaggtatatttctgaataatgatacaaagaactctgctcgccctagcagagagatgggccccttaaaggcatggaagcagtttttggaagctaatctattaaggcagtggaattacgtccattactgaaaaaaacatagttctatagagggtgtaaattcaaatcttcggttttcaattaaaataattgagtttttgttaaataaaacagttaaatgcagtagaattgttgagaatttgtgactcaaatagctaacattttcgtttagtttgattaagtttcagggttgaaattatattgttgcacgcggtcctgaagatagaactgtataagccctttcatgtaatatatgcatagttatttactaatgtatacagtatactcttattttttagagaatatattttagtaagttgtaattttcattttctaaaaacataattaagttgaaaaagtgactatgttagnnnnnnnnnnnnnnnnnnnnngtcctgcttgtcttcaatccttatggataaacaaaatcnnnnnctatgacatgattggtatacacattgactatcatgtaatnnnnnnnnnnnnnnnnnnnnnnnnnnnnnnnnnnnnnnnnnnnnnnnnnnnnnnnnnnnnnnnnnnnnnnnnnnnnnnnnnnnannnnnnnnnnnnnnnnnnnnnnnnnnnnnnnnnnnnnnnnnnnnnnnnnnnnnatat

SEQ ID NO: 2740 - DNA, 504 bp, Glycine max
gtttggacaaatgttacaactgcaaccaatggtccttctgctagattttctgtggctggtgactgtttagacccttttaggagtggtgttcttatattcatcggtggttgtaataaaagtcttgaggccctggatgatatgtattacctatatacagggattgctcgggaaagtgaacagagaccagaaaaattatctttaaagaagcaattgaaactgaaatgcctagaacaaaatcccaatcctagccaaaatcaagttctcgttagatatggagtgggttctgatgtgggacagaccatgacagtgttgaattatagccaatcaagtagactaaatatcccagtaaaccaatccctacctcctggtaagaaaatgtttgaagccaaggttactgaaaacatctcagaaggatatactattgaaactgttattgatggaaaacctcttcgtggaattctgtttttaaacaagcctatctctctgtacacagatgctcatact

SEQ ID NO: 2741 - DNA, 1778 bp, Glycine max
cgcgtacgtatgcttggatcctctagtgcggccccgctttttttttttttttttttttagttattcagttaaaccaatgattcgttattggagcagatagcaacaaccatctcatctgggaaaagccatctttttctcaacaatgtctttgtcatttgatccaatagcgcttcgttagataggaacagatttgataaatattgataactctcagatagagtattagaacggaaaaatccattagataatgaactattgattctaagccatctctggcaatgaatcaacaattcaaaatgcttttcttgcgtattcttgataaaccagtgtttatatatagatgtaggaagatctgtttgggaagtaagaagttcccttgacatctcttcatctgtaaagaattgtcgatgtgaaaacacagagacaaaaggctgatctttgaataggaaaaagagtggatccgcggggtcccaaatgaattggcttattcgaaaaaagccctgttctttggaagatctatctcgtgtctggtactgcatggttccaccctgcaagaactctgaatcattctcttgaagctcatcctcttcatcataaatgatccgcttgtcccgaaatgacctggcccaatagggaaatcccaattcattgggcctttcaatacaataaaatagaaagccccaagggctccatattctaggagcccaaacgatgtgattgaaaaaatcctcctctatctgttgtgggtcgaggactccccccccttcttcaaactccgattcatatttttcatagagaaatctctgatcaacgatagaataagatccattttgaatcatatttaagggattccttggttcggaccgaagaagcaatgtcactcgatccttatcaaactgactgcaatctttttctgtacgtgaggatcccaccagagcgccttctacttctaataggccatgaactagatcagaattattctcaacgagtccataagatgtgatcccatttttttcatcaggtccgggtagagaccaaaggtcttgagcgaccgatccggcagaacaactcaaaaggtaaagaagtatcgttaatttcttcatactcgttccaagttcgaagtaccatttgtacaaataagaatcccccccgtcacatgatttcttcttcatatagatagatataggatctatggagcaattacttagaagtacattttgtgaaacagcccttcctatctgatagaaaaggatcccatgatcctgaaccgatcttacctgagatcggaaatcccaagtttgtctatgaagaacagatctaattatattagtgtctatgatggattttttttgtataatactaatcgatagggcctcgttggtaagtgctacaagatctcgtacatttgaacccatcgttgtggacccgaatccattagtatgggacattttcttttccaagtgaaatcccctagtatatgaaagagtgaaaaagtgttttcgttgttgtgaaataagaagccttcgtatcttaatgcatgtatttaatttattcggagctattagagccggatctactttttggggaatatgagtcgaagcaataacaagaatatttctagtagaacatctttcacaatccctggagagatagttcactaaaagaccgagggataagtaattcgactcattcacatccagatcatggatgcccggctgccgtcttctcccagccgtcattgcttttgctaattcgaattgaaaggtgatataaaatcg

SEQ ID NO: 2742 - DNA, 2860 bp, Glycine max
  misc_feature (90)..(94): n is a, c, g, or t
  misc_feature (158)..(158): n is a, c, g, or t
  misc_feature (2821)..(2821): n is a, c, g, or t
atgcctgcagcggtgaccacgtttgtgttttggggttcccctacatttgtatctgtggttacttttggtacttgtatgcttatagggatnnnnnttgaatcagggaagatctccgctgctcccgcctcgtccccgcgtccgcaagagcccatttaccngtcttccagatacaatttcgatgatagcacaaactaaagtttctcttgataggattgtgtcattccttcgtcttgatgacttacggtctgatgttgtagagaagcttccttggggcagttccgatacagcaattgaagtagttgatggaaacttctcttgggatttatcttcccctagtccaactttgcaaaatataaatcttaaagtttttcatgggatgagggttgctgtgtgtggtactgttggatcaggcaagtctactttactttcttgtgtattgggagaagtgccaaagatatcaggcatccttaaggtttgcggaacaaaagcctatgttgctcaatcttcatggatacaaagcggcaagatagaggataatatattgtttggtgaatgcatggatagggaaaggtatgagaaggtacttgaagcctgctccctgaagaaggatctggagattttatcatttggtgatcagacaattataggagaacgtggaataaatttgagtggtggacagaagcaaagaatacaaattgcacgtgcactttaccaagatgctgatatatatctatttgatgaccctttcagtgctgtggatgctcacacaggatctcacctctttaaggaatgcttgctaggccttttatgttcaaagacagtggtttatgtcactcatcaagtggagttcttacctgctgctgaccttatattggtcatgaaagatgggaaaattactcaatgtggaaaatatacagatctgcttaatagtggtgctgattttatggaacttgttggtgcacacaaaaaagctttgtctacactagattcattggatggagcggcggtatctaatgaaataagtgtgttggaacaagatgtaaacctctctggtgcacatggttttaaagaaaaaaaggatagcaaagatgagcaaaacggtaaaacagacgataaaagtgaaccacaaggccagcttgttcaggaagaagaaagagagaaaggtaaagttgggttttcagtctattggaaatgtatcacaacagcatatggtggagctcttgtaccattcatattgttggctcagattctttttcaagctcttcaaattggaagtaattattggatggtttgggcgactcccatctcagaggatgtgcagccacctgttgaaggaacgactcttatagcagtctatgttggtttggccattggaagttctttctgcatccttgccagagcaatacttcttgtaacagctggttataaaacagctactatactcttcaataaaatgcacttctgcattttccgtgctccaatgtcatttttcgattccactccaagtggacgaatccttaacagagcttcgaccgatcaaagtgcattggatacagacattccttatcaaattgcatcatttgccttcattttgatccagcttctgggaattatagcagtgatgtctcaagctgcatggcaggttttcgttgtctttatacctgtgatagcaatcagcgtcttgtatcagcaatattatattccatcagcccgagaactatcacgcttagttggagtctgcaaagccccaatcattcaacactttgctgaaacaatttctggtactacaactattagaagctttgatcagcagtcaagatttcaggaaacaaatatgaaactgactgatggatattctcggccaatgttcaatattgctggtgccgtggaatggttgtgtttccgcttggatatgttgtcttctatcacatttgccttttccttaatattcttaatatctattccacagggattcatagatccaggccttgctggtttagctgttacatatggacttaatttgaacatggtacaagcttggatgatatggaatctctgcaatatggagaacaaaattatatcagtagaaagaatacttcagtatacttgtattccttgtgagccttcccttgttgtagacgataatcggccagatccttcttggccttcatatggcgaggttgatatacaagatttgaaggttcgttatgctccacatctcccacttgtcttgcgcggtcttacatgcaaatttcgtggaggactgaaaactggcattgttgggagaacaggaagtggtaaatccactctcatacaaacacttttccgaattgttgagcctactgccggccaagttatgattgacagcatcaacatctcttcaattggacttcatgatttgaggtctagactaagcattattcctcaggatccaacaatgtttgaagggaccgtgagaaataatctggaccccctggaagaatacactgatgaacaaatttgggaggccttggataagtgtcaacttggagatgaagttagaaagaaagaaggaaagctcgactccaaagttaccgagaatggtgagaattggagtatgggtcagaggcagttggtctgccttggcagggtgctgcttaagaaaagcacggttttggtgcttgatgaagccactgcatcagttgatacagctacggataatttgattcagcaaactcttaggcaacaattctctggctctacagtaattactattgcacatcgaataacttctgttctacacagtgatatggttctgcttctcagtcaaggactcatttgngagtatgcccaccccacaaggatgatagagaataagtca

SEQ ID NO: 2743 - DNA, 4036 bp, Glycine max
aagagattaatatcctccgtcatgggatggcaatctaggtcggtgtaagaaagtatttccgatgatataaacttgtttgaattctccttggcagcagcaagaagcagagtataaatggcaggaaatgattggctgaacagctaccttgaagctatacttgacgtgggtcctggcctggacgatgccaagtcctctcttcttctccgagagagaggcaggttcagccctactcgctacttcgtccaagaggttattggcttcgatgagaccgatctctatcgctcttgggttcgggcttcctccaccaggagtcctccggagaggaacaccaggctcgagaacatgtgctggcggatttggaacctcgctcgccaaaagaagcagctggagagtgagactgcgctgagagtcaacaagcgtcgtttggagcgcgagcggggtcgcagggaagccaccgctgatatgtcggaggacttgtcggaaggagagaagggcgatcccttgagtgacttgtccgctcacggcggcgtcggcgacttcaaccgatccaggttgcccagaatcagttccgctgatgccatggagacttgggccaacagtcagaaagggaagaagctctacattgtgctcatcagcattcatggcctaatacgaggcgagaatatggagctgggacgtgattctgacacgggtggtcaggttaagtacgttgtggaacttgcaagggcattgggatcaatgccaggagtttatcgggttgatttgctaactagacaagtgtcggcgccagatgtagattggagttatggggagccgacggaaatgttgtctccaagagacacagatgattttggagatgacactggagaaagcagtggttcttatatcgttcgtattccctttggtccaagagataaatatattccaaaagaacttctctggccttacattcctgaatttgttgatggagcgcttaaccacattatacagatgtccaagtctcttggggaacagattggcagtgggcatgctgtctggcctgttgccatccacggacattatgcagatgcaggtgactctgctgctcttctgtctggcgcattaaatgttccaatgctttttactggccactcacttggccgagataagttggaacaacttttaaagcaaggtagactatcaaaggatgaaataaacacaacttacaagattatgcgtaggattgaagctgaggaattggcccttgatggttctgaaatagtcatcacaagcactagacaggaaatagaagaacaatggcgcttgtatgatggttttgatcctgtattggagcgtaaactacgagcaaggatcaggcgtaatgtgagctgctatgggagattcatgcctcgcatggcgacaattccacctggtatggagttccatcatattgttccacacgatggtgatatagaaggtgaaccagaaggaaatttggatcatcctgccccccaagatccacctatttggtctgagataatgcgcttctttaccaaccctcgcaagcctatgatacttgctctcgctagaccagaccctaaaaagaacatcacaactttggtaaaagcatttggagaatgccgtcctcttcaagagcttgccaaccttacattaattatgggtaaccgagatggaattgatgagatgtcaagcacaaatgcttctgttcttctctcggtacttaagttgattgacaagtatgatctgtatgggcaagtggcatatcctaaacatcacaaacaatatgatgttcctgacatatatcgcctagcagcaaagacaaagggtgttttcattaatccagctttcattgagccatttggtcttaccttaattgaggcagctgctcatggtttgccaattgttgctactaaaaatggaggtcctgttgatattcatagggtacttgacaatggtctgctcgtagatccccatgatcagcagtctattgctgatgctcttttgaagcttgttagcaacaaacaactttgggcaaaatgtagacagaatgggttaaagaatattcatttattttcatggcccgagcactgtaagacttacctttctaaaatagccacttgcaagccaaggcatccacaatggcagcgaagtgaggatggaggtgaaagttcagaatcagattcaccaggtgattccttgagagatttacaggacttgtctctaaatctgaagttttcattagatggagagaagagtgagggtagtggaaatgacaattctttgaattctgatggaaatgctgctgatagaggggcaaaattagagaatgctgttttgtcatggtcaaagggcatctctaaggacacacgcaggggtggggctacagaaaaatccgatcagaatccaaatgctggtaaatttcctccattaaggagaagaaaacatctgtttgtcattgctgtggattgtgataccacttcaagccttcttgaaactattaaagccatctttgagtctgctggaaaggatagggcagagagcactgtaggtttcatattgtcaacatcattaacaatatcagagatacagtcatttctaatctcaggtggcttgagtcccattgattttgatgcttatatttgcaatagtggcagtgatctatactatccatccctcaatcccggagatcgcccatttgtggttgacttgtattaccactcacacattgaataccgttggggtggagaagggttgaggaagactttagtgcgatgggctgattcaatcactgataagaagggtgataatgacgaacaaattgtgagtcctgctgaacagctttctactgactactgttatgctttcaaagtgcgaaagccaggaatggctccccctgtgaaggagcttcgcaagttattacggatccaagctctgcgttgccatccgatatattgtcaaaatgggacaagactgaatgtcattccagtgctggcatctcgttcccaagccctcagatacctatatgttcgatggggttttgaactgtcaaagatggtggtgttcgttggagaatgcggtgacacagattacgaaggacttcttggtggcctacacaaaagtgtcatactgaagggagtgggaagcagtgcaatcagtcaactccataataacagaagctaccctctttcagatgtcacgccattggacagccccaacatcgtcgaggcaactgaggggagtagcggtgctgatatccaggctttgatcgaaaaagtgggatatctcaatggatgaaaaaatttgaaagtcatttctagttatatgcctcttagtgtgtgtctgctatgaaacctacttctgagcaagcagatatctgaattttatccacaatgttcataaagcttttttcctcctctcttctctgtaacttctatatcattctcttcctcacaaacttccccatgaaacatatttcctcttgtttccccacttatctccttgttggttctgtatctacatattacatttttaatgaaggccacttctcatttctcgtgcctcacttcttttgtcgattttataccggcttatatctcgtgactggtgatcacaatctcgctggatggcaaatatccaaattcctcttatactcaacatactctttcttcttttccttttcttcttcctcgttcagtatacacaaatctataaaaaaagatttcgaagtaaaaaatcaagattcaagaaccaagaatataggagattcaattcaggtcagtaaagatcattgtccagaccttttgtgaatcataaagaaacttgatggtttctactcgaatagggtattttatgccttgagtgtcaagtacatctttattttgtcgtgtggcacactcgattcctaatatgaagtggcccataatatttcatttgacgtgagaaatcttatttgttacagttttatatgtcatccccattcttttgcaattcatttgtattcgttactcagttagaataaacgcccaattggttcgtg

SEQ ID NO: 2744 - DNA, 1829 bp, Glycine max
ccacgcgtccgcgaataaatgcatgtttctcagctacgtaggcccccccaccctctctagctagctttcttctccactctctcaaatggcccaaaatgattccaaccctactccgcctccggaaccccatgtagcggcggaacccattactgaggatttggtccaagacaaagaagaagaggatgatagtagtaagattgttattccagtcccagagagcgagtccttgtcattgaaggaggatagcaatagggtttctgattccgagaaaaatgccattgatgagctgaagaagctcctgaaagaggaattagaggacgaggaggtttccatctggggcgtccctctctttaaggatgacaggactgacgtcattctcctcaagtttctcagagctcgtgagctcaaagtgaaggacgcccttgtcatgtttcaaaacactctccgatggaggaaggacttcaacatcgacgcccttctggatgaagatctgggcgaccacttggagaaggttgtcttcatgcacggacacggcagagagggccatcccgtctgttacaacgtctacggcgagttccagaacaaggacctctaccacaaggccttctcctctcaggataatcgaaacaagtttctccgatggcgtattcagttgttggagcgcagtattcggcacctcgacttcactccttcctccggcatcaacaccattttccaagtcaatgacctcaaaaactcccctggccctgctaaacgtgagcttcgccttgccaccaaacaagctttgcagttgcttcaggacaactatcccgaatttgttgccaaacaggtttttatcaacgtcccatggtggtatcttgctttctataccatgatcaatcccttcttgacttcgaggaccaaaagcaaatttgtctttgctggaccatccaagtcccccgatactcttttcaagtatatttctcctgagcaagtgcccgttcagtatggtggcctcagtgtagatttctgtgactgcaaccccgatttcactatgtctgatcctgtcaccgaaattcctataaagcctaccactaagcaaactgtggaaattgctatttatgagaagtgcattattgtttgggagctgcgcgtggtgggctgggaggttagctacaatgctgaattcaagcctgatgttgaagatgcatatacggttatcatacagaaggccacaaagatgtcccccaccgatgaaccagttgtttccaatagctttaaagttgttgaactgggaaaattgttgctcaccatagacaatcctaccttgaaaaaaaagaggcttctttacaggttcaagatcaaaccctactctgattgagagaaaataacctctggtggtggttttgggtacatgaaggaaattgaacttgaagagtaagaaatatgcatgtcatcatttgttcggtccatttttcatctatagttttggtcgtgagttgtttgcagattgtctttctctgtctttgttgtttgttgtgttgtatgtaacactttattgctagtctaaattgttcttttattttctggtgatgaacaatgttgggagtagcaaatggaattaaaattggagttggttttggaaattacatttattctcagaattacggatcacattgatgagtgaaccaaaccaacaacatgtagaaagccttgttatgaaaagtttcaatgtaaaaatttgttcttgtacttatccaactcggagtttggtccaattataatcattttgaatgtcatagatatgtaatacaaaaggaatgaatgagaagtatgcctgatttcttatc

SEQ ID NO: 2745 - DNA, 1424 bp, Glycine max
  misc_feature (866)..(866): n is a, c, g, or t
attagctgggtcaatttgcttctatattccaaattttccatttaatgattattctttccaaggcatttcaagtaatacacaaacttttgttctttcgtttttctagtttccttgtctatgtgactatgttcacataaaaacaattcaaagtatgacaaacaattgttgtaaaatagtgtatggtactaaaacaaattgaatggcagctagcagcagaagaaactgcattttgttcctccttgtagtgaatgaaatgccagccaaatgacagacacttgaaataattctgatgaaggagttcctctatgaatttggaacaaaggtgccaacatagccaacccccgcaacaaagaaggccatagattgcagaaaaagatatatgaagtagtggttcttcccatatttaagatcatagcatgcacagaaaaagagataggcccccacaagaagttccaggaaatgaagcctttcaccaatcctgatacgagacttcctagctgctttaccacctgattttgttttaagagcatctcccaatttctcagtaactacccattcatttactctccctgcctctaacaaacctgtaagtgtagccttggtcctatgcattgacataacattttcaaagagtatccagaataccagcaagtggattgaccttggagttccaactgcattaaggagtgtgatgatagaaggtatatacacagcaccccacttggggacttccacttctggaaatagaacagttgctggcataatcacacagtagaatacaaatgtgaccacatgagcaacaattttccggacaaagaagaaactataaatcacatataacttcttccacatggagactttcttgnttctcattatttccatggccattttcttgaaaagattagctgggccacatgaccacctgtgctgctgataacgataggctttgaaggtacttggcaattcacttttcaccttgagatcgctaagatacacaaatttcccgcctttgagaccagcacggacagccagatccatgtcttccactgttgtgcggtccttccatccaccagcttcatttaatgctgaaattctccacacaccagctgtgccattgaaaccgaagaaggcataggttgaggacccaacttcctgctccacaaggaaatgataatccaatgacatctcttgcattcttgtcattaagcattcatcagcattaactgccatacacaaggtatataaatgtcacaccttacctaaggcagatattgacattcaaaaattgtgacaaatttatgtcttgtaaagtggaaatgatttgtttttgtagctaagacattggtatgagtccagttcttttctaactgttgatttgctttagtggaattaacttttggggggggcctacgtagctgactcga

SEQ ID NO: 2746 - DNA, 978 bp, Glycine max
ataggctttgaaggtacttggcaattcacttttcaccttgagatcgctaagatacacaaatttcccgcctttgagaccagcacggacagccagatccatgtcttccactgttgtgcggtccttccatccaccagcttcatttaatgctgaaattctccacacaccagctgtgccattgaaaccgaagaaggcataggttgaggacccaacttcctgctccacaaggaaatgataatccaatgacatctcttgcattcttgtcattaagcattcatcagcattaacgaatttccatcgagcttggactagtgcaacttcggggttgtgagccaggaacggtatagtgcgccaaaggaagttaggctcaggttggaaatcagcatcaaagatggccacatagtcacacaaattcacatagctgtgcttcatgccttctttgagagccccagctttgtaaccatttctgttctttctgatctcatactttatgtttacgcctttactggcccatctctggcattccatctccaccatattcttaatgattgggtcagtggaatcatcaagaacttgaataataatcctatcagatggccatgatagcccacatgcagctccaattgataattgatacacctctttctcattgtacattggaatttgcaccaagaccatggggggggcggggggcccacgctcctggtcatccctgagtggctcccatttatacttcttttctggcttgtacctaaacaacttcacaaagattatgactatacccatataaactctctccacaaataacataagtgacatggctaggcacaaaaccactagcaatttcatcaatggaaccaccaggggtgccctggcttgttgccaaatcaaacccatttggcttgcactgccatagtgcatgctttcaaacgtagctgctgatgaaagccgatccatttggtgctttcttcggacgcgtgg

SEQ ID NO: 2747 - DNA, 1504 bp, Glycine max
acgcggacgcgtgggcggacgcgtgggtcgagtcagctacgtaggccccccccccaaatgatagtttagtatgtagtggttctcaggatcgtacagcttgtgtttggagacttccagatctagtatcagtagttgtatttaaagggcataaaagaggaatttggtcagtagaattttctcctgttgatcaatgtgtagtaacagcatctggtgataagacaataaggatatgggctatatctgatggctcctgtttgaagacatttgaaggacacacgtcaagtgtgttaagagcattgtttgttactcgtggaacacaaattgtttcttgtggtgctgatggcttagtaaagctgtggactgtaaaaactaatgaatgtgttgctacttatgatcatcatgaagacaaggtttgggccttggctgtaggcaggaaaacggaaaagcttgcaactggtggcggagacgctgttgtcaatttatggtttgattccactgcagctgacaaagaagaggctttccgtaaagaggaagagggagttgtgaaaggtcaagagctagagaatgctgtctcagatgctgactatactaaagcaatccaaattgcatttgaactgcgcaggcctcataggctttttgagctatttgcagaactttgcaggaagagagaggctgaagatcatatggacagagcacttaagggcttggatagtgaagaacttcgtatattatttaactatgttcgagaatggaatacaaaaccaaagctttgttatgtttctcagttcgtgcttttcagagttttctgcatctttcctccaacagatattgttcagattaaagggattggtgaatatcttgaaggtcttatcccgtatagtcaaaggcattttggcaggatagatagacttgttagaagcacatttttgttagactacattctatcaggaatgtctgttattgaaccacaagctcaactgacagaatcaaagactgagttactgttgcagtctgaaattggcattccagatccggacaaagaaaatgacactaatgaaattaccgcttcaaagaaaaggaaatcaaacaaatcaaaacatggttcccataagaaagttaagaatgtagcttacaacaaggtcgaatctatacaattacaggcataggattggtgctttcatcgtcttctcatgtatacatatgttggttgatcgatggaagagctgttttgattcatccaaattttgaaatcttgctgtcatttgataaaatgtaagccgaagtattgctgtcaattaagaagatgtaagcatagccagccactgtaattgtatcagtatttattctttcatgtaggttggttttcctgtcctgctcatcacgtggtatagaaatgtttcttcagctgtcttaacaaaagaaagttattgtgagagacgctgaggcgctgcaaagatagcatgaaaaggcaatcgtagtaattttgatccacataattcttatt

SEQ ID NO: 2748 - DNA, 2270 bp, Glycine max
ggttagaaggagcccctcttgcaagagtttgccatctcactgcttaccatctcacagtccaaaggctagggataaagatgtaggatatggtagctacacaaggttggggaaattcggggatttagactctggattaaatgaaattccaatgtcggtgccatccagtgaagtggatttctgtcaagatgaagatgtgttaccttggttggattatccatcaatagatggttctttgcaacaagagtatggttctgatttccttcccgcctcaaacagttttactctattggataaaaaaagtaatggcaatatggcgtttagggattctcagaaaacttctgaagaacaagggaatgttttcaagggttcttcagctggacaggttgagactgccagacctaaagctagtagcaccagtcagttattccccccatcattgcatcagtgtcaaacatcttttgtttcgtctagatccagagcatcagatataactgaaaataacaatacgagtaatgcaaaccaggatgcgtcttatggcaaaattactcatattctatcttcctcaagtgatttttctaacgcaaaggtgcagaagtgtgatccacctatgaatagcaatggttccagttccaccataatgaatttctcccattttgcaaggcctgctgctatggtaagagctaatcttcatagcattggcctgaagtctggtttgtcttcatcaagatcagacagtatggaaatgaagaataaaggtgctgctgcaactagcagcaatcctcctgaatcaattcttgttgattcaagtgcgggtcggctacggggtccccccccccaatgccagcaggttgtggagcaatccaaggctgatgtgaactctttgctgccaaaatctgttgaacagaatgctgtgccttctaagcagtcagagcctgctggtaaagagagtgccgctaagattgatctaattcccaatcaagttcctggtgacaatggcactaaaggacagacagctgctgaaaaaagtaaggagccagcagtagcctcttcctctgtttgctctggcaatggtacagaccaaggttcagaagagccaaatcaaaatttgaagcgaaaaagaaaagacactgacgactctgagtgccatagtgaagatgttgaggaagaatcagctggtgctaaaaagacagctggtgggcgaggaggtgcaggttccaagagaagccgtgcagctgaagtgcataatctatctgaaaggaagcgaagagataggatcaatgagaagatgcgtgcattacaagaactcataccaaattgcaataaggtggataaagcttcaatgctggatgaggcaattgagtatcttaaaacacttcagctccaagttcaaattatgtcaatgggagctggtttatatatgcctccaatgatgttacctgcaggaatgcagcacatgcatgcaccacatatggctccattttcacctatgggtgttggcatgcatatgggatatggtatgggttatgggatgggaatgcctgacatgaatggtggatcttcaagattccctatgattcaggtgccccaaatgcaaggaactcatatccctgttgcacatatgtctggatctacagcttttcatgggatggccagagcaaatcctccagggtttgggcttcctggacaaggacatcccatgccaatgccgcgagctcctatgtttcctttttcaggaggacaaatgccaaatgttgacccacaagttaagcaaagcactggtggccgtgactcaactagtcagatgcctacccagtgtgaagcagcagctgttggatttgagcaatctactttggctcataataacggtcatgcaaccaaggctaatgacaatggatctgttaatcctggaactggcagataacattttgtgattggttacgatcgataaaaccgtgcctaatggaagttttaaaaaatgagtccaaagtctcttgcattgcagattacctgccacacaggatatatttcagagttattgaggttaaccccatcacagtaactactgaatcctaatttccgggatctggacattgcacggattttggtatcttgagcggtgcaactcatttgtacatccacttagttaactgttcaatctattggcgtagaaattttatatatccctacaaatatgtattcaaatgtttgatcagatttttcatagtgattctttggatgaatgaaataatagtctttttctcttaaaaaaa

SEQ ID NO: 2749 - DNA, 1853 bp, Glycine max
ggtattgaccaacagtatttgcattaatttatttgactcggatttcttgttttctcatagactgctttttaaatttggtattgaccaataatatttatatccttattacacatacccgtagcttacaaggtcacgtatctctcgtggatcaactaagccgaataaccttcagcatgtgctgagaagaatgactgaaggatcctgaacattgatgattccacactcacgcacttttaatatcattagaaattgaccttaaaacaacattacttatatgaatagatcttgtttctccccggtcggtgacgctataatccaaattacggtgtcgttttcggttcgtttaagcatcacctatcccaattttattcataatcatattaacaacaacactactaccacttcccagtatcttaatctagtccacaaccaccctcagcataatgggcaactgtttggggaagtcggagaagaaattaacggcggagattgttccacgcgacggggccaaagtgtatcccaccgtccgtttacacggctcgcccaagagcattctcgccgcttatatccgtttcgcgcttctccacaagtccgtttcgttggacttggtcgaaacggaaacggagcgcgtgggagatggtggtggtggtgcggttacgctccaggtggggtcggaggttgtttcgggctcacgcgagacgctgctgcggttcatcgacgcgcgcttccctgggccctcgcttgggagcgggagggaggacgaaacgacgccgttgctggcgagcttgacgcgggcgcaccacacgagcatgctgtggcacgtggagaggatggttaagtgggcggaggatctcacgacacgtggcggaaagaagatcgtcgatccttccgtggggactcccaggatggagattagaaaattcgccaagagctactctgagctgcttgagctcatgatggaacacgctcagatggaagaaaccatcctcttccctctttttgataaggccgatcgaggacttgctaaagttgccaaagaggaacatgctagggacctacctctcatgaatggtatcaaagaagtcataaaatctgttggagttttggactctggcagccctgattaccatgaggctttgtgcagcctttctactcgcctcaagtcattgcaggggcaatgcaaacaacattttgcagaagaggaggtggaattacttccactaatgaaggcattggagttgagcaaagagcaagaagtgagtgcacttgagcagtgttttgaagtgatgcaaggaacacacaatcggttgttgaagttttttcttgaaggtctccctcctcatgatgctatgaagtacttggacttgatcagcaagtgtagggacaaagaaaaaatggaatctattctccaaaagatagttaagtgagagagatctagttaatgggttcaatcattgtgcacacatggatgaactgtcaggcttgctttgtcaatagatgcaaaattgttttttttttttttgtgtgtgtcagttcttctaaaggaagttaagtacccagcatatgtgtagtgtttcttcatatttctgcttttgtcatctgggacattcttcttgaacatgtgtcagcctgaccttttgattacggaagcagaaaacttggataggatttggaaaagcagggcgttctctttttctttttcttttttccttttccctttttccctttttctcatgatagtttggataaggttgtcttgaacatgttcataaataatgtacatccaaaatatatgcacccaaatacattcaaaagtaagttaagtatgccagtttacctgttttgatttgtaa

SEQ ID NO: 2750 - DNA, 919 bp, Glycine max
acggctgcgagatccgctacgtaggccccccccctaaggcaaaaatctaaagagctacgatgacgcgagcaagcggcgaagattcctgagaagagtgggatttgcttgagtcattctcttcccttctagctacgtaacgactaacgacgcactctactctttcttagggtttcctctcccgccaattttccctttccccaattcaattccaaccctaacctcactccactctcgccggaaccgcaccttcgattcgacctagggtttcacgaacttcacgatgccgtcgctactctccccgggcaaaatccactgcctcgaggtggagaatttcaagtcctacaagggcttccaagtgatcggtcccttctacgacttcaccgccatcatcggccccaacggcgccggcaagtccaatctcatggacgccatcagcttcgtcctcggcgtccgcactggccagctccgcggcgcgcagctcaaggacctcatctacgccttcgacgaccgcgagaaggagcagaaaggccgcagagccttcgtccgcctcgtctaccacctcgccaactccaccgagatcaagttcacccgcaccatcaccagcgccggcgccagcgagtaccgcatcgacgaatccctcgtcaattgggagacctacaacaacagactcaagtccctaggcattctcgtcaaagctcgcaatttcttggtctttcagggtgatgtggagtctattgcatcgaagaatcccaaagagctcactgcactggtggagcagatatccggctctgatgagtgcaagagggactatgagcagtttgaggaggagaaaggtgctgctgaggaaaaatcagcgcttgtttatcagaaaaagaagacagtggttatggagagaaaacagaaaaaaaaaaaaaaaaaa

SEQ ID NO: 2751 - DNA, 1502 bp, Glycine max
  misc_feature (1476)..(1476): n is a, c, g, or t
ggaaaaagttataattgaacgaaaatcacatgattgttacgtttaaagcctaattaagcattttaatgaatgattaactaaattaaattttaaattataattgaaagaccaaatatataattaagtctataatcataacaataagtcaattatatgttttatttttttggttgagtgagtatacggctgcgagaagacgacagaagggggctttaagtcattctttctctactggctacgtaacgactaacgacgcactctactctctcttagggtttcttctcccgccaatttcccctctcccccattcaattccaaaccctaacctcactccacccttgccggaaccgcaccttcgattcgacctagggtttcacagtttcactccgagcacgcacgcacgaacttcacgatgccgtcgctactctccccgggcaaaatccactgcctcgaggtggagaatttcaagtcctacaagggcttccaagtgatcggtcccttctacgacttcaccgccatccttggccccaacggcgccggcaagtccaacctcatggacgccatcagcttcgtcctcggcgtccgcaccggccagctccgtggcgcgcagctcaaggacctcatctacgccttcgacgaccgcgagaaggagcagaaaggccgcagagctttcgtccgcctcgtctaccacctcgccaactccaccgagatcaagttcactcgcaccatcaccagcgccggcgccagcgagtaccgcatcgacgaatcccttgtcaattgggacacctacaacaacagacttaagtccctcggcattctcgtcaaagctcgcaatttcttggtctttcagggtggatgtggagtctattgcgtcgtagaatcccaaagagctcactgcactggtggaacagatatccggctctgacgagtgcaagagggactatgagcagtttgaggaggaaaaaggtgctgctgaggaaaaatcagcacttgtttatcagaaaaagaagactgtggttatggagagaaagcagaagaaagtccagaaggaagaagcagagaagcatctctgtctgcaacaagaactgaaatctatgaagggagaacatttcttgtggaagttgtttaatatacacaacgattatgctgaaacaattaaggatcttgaagatgaggaaaaaagtcgtgaaggtgttgttaaagaactagaatacttcgaaagtgaagctagtaaaaagaaaaaagagcaggccaaatatctgaaagagattgcactacgtgaaaagagaattgctgagaaaggcaacaagcttgacaagagtcaacctgagcttctgaagttaaaggaggaaatgactcgtatcccttcaaaaattaaaaaagggaagaaagagcttgatttgtagaaggttgaacggaagaagcatgatgctgatatagcattactacagaatgacatccaggatcttacaacanaaatggcagaccttcaggaaaaggga

SEQ ID NO: 2752 - DNA, 1921 bp, Glycine max
ttttttaatttttttttttttttttttttgttttttttttttccaatcctcccttcaacagatccgtaagggcagatctggtagcaagagatcaattatcagattaagtaaagggattgcctagctagcgcatatcgaagagtttgagcagtggcctttgttcacatcctgattgggtttcatcgaggtatcttcttctcctcttgttgcgacaaatcgagttgcagcacatgacgagtgcccatctttcccgaagctccactttcataaacacccatcggtacaacaattgatcacaacggaaagtaattaagcttgatcccgttttccatcgaatcctattctcaacctcgagtcaggagttgttgccctaacttcgttagcctagaaaggctttgtttgaaagctgtcttttcaagaagaaagtaacaccgctactactattataatataatagctacctattctcatccgaggagaacggaactacctttagagtagacctaactgctgcggttacgcctccaacagatgaaatcgcaccgtcgtcttcccagcgtagagcaaagcaaacaagtcagccggagttccagaagtctctttagtagcaaaaaggctaatcggtaataagccttcagtcgaccatcgggagatacgcctccaggccaaacagataagggaagcgagaacatgatcttcttcctttgccttttatatgattacctcttcagcgagcgagtactcatattatgccttcctttcagtcctccgatcttaccttagaccctccatgctatgcggggaagcgaggctgtctacgaagcttccctccccctgtagtcgaagtactcggcgctactttgattcaaaaggttcccgactttatccggtttccgcaaccgtaatcatttgtcattccgattacttcatccatcaacctttttttcaatagcggtacgctctaaaaaaagtaaaggataagcttgcattctagaagcggtagcttcccgcctccttcatttctactgcctccttcggtgataaaagttcccttcccttttctaaaatgcccgattggtctgcctcagcaaatgtacaaagtggaccgctgtttggctgaccctcttcttcccattcgggttgggttgacccagaagtaaagtaagaaggaatggaaccactggagagtcgtccgcagttcacacttgggcaaagacgactgagtttggaagcggaacacgaaccgatttccgctattccgggttcttattgagcgtagcgaaatcaaggtttattagaaagtcagcgaagtttctatggtgttctacctttgcgtagtctcggtccacagtggaaggctccgtaccgacgcctcactactactgaatttaattaatggctaagcgatttcataacctgagctttccttaaccagctgaccttacttcgtaaccttaacgtactttctttcttactatatcaatcataggccttcgccacttcaaacgggcgcttcgccctttctttttttttattagaaaaaaacggggccttacttattctgttcagggaggatgaaagacaaagaaagggatcagggggcttattgatcggagaaagggaagggacttcttggacctaactgagaaggagacataaagggatcacctgaccttatcttgagtgagagaggcaagtcgcaaggcaaaaagcttagtcgttttcaactccgagagtgacttcacttacgggatttctatttcattcagagcctgttccgggcattgagagcagacgaagaccggtcggtcggtcggcccgcgcgtgagatcaactacttagaatacgctaccatctgtcttcgattatgctcgttctactttgagggagagatcgctcctttaaggagaccggacgcggg

SEQ ID NO: 2753 - DNA, 2816 bp, Glycine max
  misc_feature (2797)..(2797): n is a, c, g, or t
  misc_feature (2816)..(2816): n is a, c, g, or t
ctttggttcagggggaaaagatcccagttttcagtgacccttctaatctttttactcttctcttctctgtccctcactccttcctttttcctctctcacacatataaatatatagcttctggatcttcttccacctcttaacggatctcagattccaaaatctatctcctttaggctctccaaattttcgcgttcagctacgtaggccccccccccccccctttttttgtgtgtatgtgtgtgtgttcgaacttcaaaaaaaaaaaacatgagtgaaagcatgcaactttgtagtcaaagagtgaacggcacatagcagcaagttttcagctttggaaagttcacttagctaattgttttttccccctttagctgctttatatttttccttttagtctttgacaattggcttttctctgcaagctcttttccttgcacctatttatttaattttttttctgcaccctaagttcaatttgttagagtattcctttttccttggtcactttaccatgatttaacatggtggtgattgctttgaattctcatagttgatccataagggagcttgaaagttagtctcttttttattttatttttttggtctttctatttttgagctgaggatggagtgtaggagaaagaaggagaatcaaaaatcaaactccactttccctgatgaggtgttggagcgaattcttgggatgttaaagtcccgcaaggacaaaagcacggtttctttggtttgcaaagagtggttcaacgcagagagatggtcaaggaggagtgtgttcataggtaactgctactctgtgtctcctgaaatcttaactcgcaggtttccaaacattagaagtgttacactgaaagggaagcctcgtttctctgacttcaacttggttcctgccaattggggtgctgatattcattcttggcttgtggtgtttgctgagaagtacccttggcttgaggagttgaggctcaagagaatgactgttactgatgagagcttggagtttctggctctcaaattccccaatttcaaagccctttcccttctcagttgtgatggattcagcactgatgggctggcttcaattgccactaattgcaagaatttgactgaacttgacatacaagagaatggtattgaggataagagtggcaattggttgagttgtttccctgacagcttcacatcattggaagtattgaactttgccaatctgcacaacgatgtaaattttgatgcactcgagaaacttgtcagtaggtgcaaatcattaaagactttgaaggttaacaaaagtgtgacactagaacagttacaaaggcttattgttcatgttcctcagttaggtgaacttggtactggctccttttcacaagagttgacatcacagcagtgctcagatcttgaaagtgcattaaaaaattgtaaaaatcttcacaccctttcagggttatgggtagctacagcacaatatctcccagttctgtactctgcatgcacgaatctaactttcttgaattttagttatgcacctcttgacagtgatggccttactaagcttcttgttcactgtcctaagcttcagcgcctctgggttgtggacactgttgaagacaagggactggaagctgttggatcacactgtccattacttgaggagctgcgtgtttttcctgcagatccctttgatgagggcattgttcatggggttactgaatcagggtttattgcagtctctcaaggatgcccgagacttcactatgttctctacttttgccgtcaaatgaccaatgctgctgttgctactgttgtccaaaactgtcctgactttactcatttccgactctgcatcatgcaccctggtcagctagattacttgacccaagaatcaatggatgaggcctttggagctgttgttaagacttgcactaaactccagaggcttgcagtatcaggttatctgactgacctaacttttgagtatataggcaagtatgcaaaaaacttggaaactctttccgtggcttttgctggaagcagtgattggggcatgcgctgtgtgctggacggctgtccaaagctgagaaaactagaggtaagggactgtccatttggcaacggagctcttctgtcaggcttggggaagtatgagtcaatgagatcactgtggatgtcagactgcaatttgacaatgaatggtgttagattgttggcccaagaaatgcctaggttgaatgttgaagtcataaaggaagaaagctatgagactcatcaggctaaaaaagtttatgtttatcgatctgttgctgggccaagaagggatgcccctccttttgttctcactctctgaaatgctatctctactcctactttgaagttcaaaatgtccttgtctttggttgtctccacagatggcaaaaatccatactgatattcaagactcaataatatggcaggtgggaggaagaaagggggattctgcataaactatccaggaagtcactgcaaatgtgagctaaattaatggattcctgagcaattattgtgaacaatatccatatgcatgaaaaatattgcattgattacagacagaaagttctataattcaagaggataatgtattcatggcagaagcctgtacttatctgtggctttttgttctgattgaaatatctattcaacaaaatgcaacattcccttctgaaaatggcgaaaatcatgtcaatggatgagattaaataaaagtgattcatgcttgattggaaaaaaaaaaaaaaaaaaaangaaaaaaaaaaaaaaaaan

SEQ ID NO: 2754 - DNA, 2845 bp, Glycine max
ccacgcgtccggtgggctacttctttactttactttagtttaaggctcgcgggcaggggcaagaggctggtttggtgtttgtttcatttcactttacatgaatacatatacatagaagtttgaagggttttagggatttgcatgatgctaggttcattacctatattgcccctccctgctcctccttctgatggaaatctaggtcctctgcctgagtctcaagtgattgatgataatgaggaggagcagaacaaatcaaattctgcttctgttccggcgccggcaacagttgccacccacaccagaacgattggaattatacatccgcctccggacattaggaccattgttgataaaacctcccagttcgtggccaagaatggtccagaattcgaaaagaggattattgcaaataacacaggaaatgttaagttcaatttcttgaactcgtcagatccataccacgcatattatcaacacaggttgtctgaatttcgtgctcaaaatcagtcttcagggcagcagcaacctgcagactcggcggctgttcctgaatccgtcccgtctgatagcaacggcgtagtagcagcagcagcagcagctgcagaaaagccagatttttctgcccagtttaaacctgtaaggaaagtgcttgaaccccctgaagctgaacagtatacagttcgccttcctgaaggaattacaggtgaagagctggatattataaagctaacagcgccgtgcctgcctcgtagggcccccccctttttgacagggttgaccagtagggaagttaataatccacagttccattttctgaaaccgacccacagcatgtttacgttttttacttccctcgcggatgcctattcgaaggttttgatgccaccaaagggtttgatggagaagctaaagaatagcgtgtctgatatgactactgtccttgaaaggtgtgtgaataggctggagtgggatcgttctcaagagcaagctaggcaaaaggctgaggatgagatagagcaggaaagaatacaaatggctatgattgattggcatgattttgtggtggttgaaacaatagattttgctgatgatgaggaccaagagttacctcctccaatgactattgaggaggttataaggagaagcaaggtgacagccatggaagaagaagatattgttgagcctggaaaggaggtcgaaatggaaatggatgaggaagaggcccaacttgttgaggagggcatgagagctgctagtttggaagaccgtgatgacaggaagcagaatgaagtcagggttactgaagaccctgaaccaccaatgagaattgttaagaactggaagagaccagaggagaggatttctgcagaaagagattccaccaagtttgttgtttctcctatcactggtgagttaattcctattagcgagatgtcagaacatatgcggatttctctcattgatcctaagtacaaagaacaaaaagaaagaatgtttgccaaaattcgagagacaactttggctgcggatgatgaaatttcaagaaacattgttggacttgctcggacccgtcctgatatatttggtactacggaagaagaggtctccaatgctgttaaggcagaaattgagaagataaatgatgagcaaccaaagcaggttatatgggatggtcacactggtagcattgggcgtacggcaaaccaagccatgtcccaaaatattggaaacgaggatcaaaatgatgcttctaataatgaagccaggaactttctgggtcctgctgcacctcctccaagacctggtatgccttcagttcgtcctcttccaccaccacctggactggcattgaatcttccccgtgttcctgtccaatattctgctccccatagtggtgcccttccaatgcctccaccaagacccatgatgccatctattcggcctgctcctcctcctccaatgccgatgaatactggacagcagtcagttatggctggccaaccacccccaatgcatccatcaattcctatgaataaccaaggaattcccatacccccacctccgggatctcacttcactcatgttccagttccacgaccttttgttcctctttctgttccgcaatcagtcatgcctatgatgcatccaccacctttgcctcaaggagtgccaccaccactgccaccagaggaggctcctcccccactcccagaagaaccagaaccaaagaggcagaaacttgatgattctgctctgatccctgaagatcaatttctggctcaacatcctgggcctgttcgcatcagtgtatctgttcctaatgttgatgaaggaaatctcaagggacaagttctggaaattacagtgcaatctttgtctgaaactgttggtagtctgaaggaaaaaattgctggggagatccagctccctgctaataagcagaaattgagtggaaagcctggctttctcaaggataatatgtcactcgcccattacaatgttggtggaggtgaaacacttaccctctctttaagagagcgtggtggtagaaagagatgagcatattgctttcatttccgttcaagaaggttgttgtaatctttgccttattacaaggcatatagtattgatagctacatgatgttatttcctgaattttatgtgagtacattagatttattgtattgtgagacatcttgaggtatttactgctgtcatgaagactgatgttaattctggaatacagattttggcaccttggcgcttctctcttgaggggaatgggaagcactagtagtggttcctttatctaaactgatcaattcaaattatttgcatcact

SEQ ID NO: 2755 - DNA, 1329 bp, Glycine max
  misc_feature (1064)..(1064): n is a, c, g, or t
  misc_feature (1241)..(1241): n is a, c, g, or t
  misc_feature (1274)..(1276): n is a, c, g, or t
ccggaattcccggctcgacccagcgtccgggcatagcagcagcagcagcagaaaagccagatgtttctgcccagtttagacctgtaaggaaagtgctcgaaccccctgaagccgaactgtatgaaggaattacgggggaagagctggatattataaagcttacagcacaatttgtggctcgaaatgggaaatcttttttgacagggttgacaaggagggaagttaataatccccagttccattttctgaaaccgacccacgcctccgcccccgcgtccgcttcccttgccgatgcatattcaaaggttttgatgccaccgaagggtttgacggagaagctaaagaagagcgtgtctgatatgactactgtccttgaaaggtgtgtgaataggctggagtgggagcgttcgcaagagcaagctaggcaaaaggctgaggatgagatagaacaggaaagaatacaaatggctatgattgattggcatgatttcgtggtggttgaaacaatagattttgctgatgatgaggatcaagagttacctcctccaatgactattgaggaggttataaggagaagcaaggtgactgccatggaagaagacattgttgagcctggaaaggaggtcgaaatggaaatggatgtggaagaggcccagcttgttgaggagggcatgagagctgctagtttggaagaccatgatgacaggaaacagaatgaagtcagggttactgaagaccctgaaccaccgatgagaattgttaagaactggaagagaccagaggaaaggatttctgtggaaagagattcaaccaagtttgttgtttctcctatcactggcgagttaattcctattagcgagatgtcagaacatatgcggatttctctcattgatcccaagtacaaagaacaaaaggaaagaatgtttgccaaaattcgagagacaactttggctgcggatgatgaaatttcaagaaacattgttggacttgctcggacccgtcctgatatattcggtactacagaagaagaggtctccaatgctgtcaaggcagagattgagaangataaatgatgagcaacccaagcaggttatatgggatggtcacactggtagcattgggcgcactgcaaaccagccatgtcacaaaatattggaaaacgagatcaaaacgatgcttctaataatgaagccaggaaccttctgggtcctgctgcacctcctcaagaccaggatgccttncagtcgtcctcttcaccaccactggactggcannngatcttctccgtgtctatccaatatctgctccccatagggtgccctcccatgc

SEQ ID NO: 2756 - DNA, 1716 bp, Glycine max
  misc_feature (75)..(75): n is a, c, g, or t
attaaaaaaatgtggggcttctaaataaataggcaggtaacttttccccttattagaaggtttttgtctgctgtntcatgcatgtcatccaatctcactttcataatcataagtcaatcaccaatatataaaattgattgacgtcaattcaaattgctcaaccaaatagagaaaaaaaaagaaattttttttttttttttttcttgttgtttctcttttttttttttttcttttgcacaatgatgatgtattactatttgtaataataatatatcgtacatacataaataagacagaacgatatatcatcaatcagcttgttatcaatatgattccatgccatttcatttgacaccttctcccattccaccagcccaactcaataaaaaaatttcccatattggtggtgcttacaaacaactttgaaacctttttctcattcctatgatgatcgtttatacaatgcagcatgcattaggattttcatcactgaagagttgtggaggtggtattctttcaatgacagagagtggagggtactgataatagtacatcatcctctttaagccttcatcatcaatgttattgtaaggcaccaccaccacattattctcttcttttttggcttcttctttgctttcttcaccacccttttcttctttgttctcaccaccctcttctttctttgcttcctctggtggcttctcctcttcaggtttagtctcttcttctgcaggtttctcttctttcttttctggttctggttctggctgaggaactatcttagcttgctttttggtgcgtctatatacataatctactagtttgtttgcatccatgattcctgtcacaagaaccttccctgtgctaaactctgtcattgctgtttgaactcctctcatttgtagtatcttcctcttgagttgctcagcacaggcctcacagtgcatgtttacattcagttccacagtaactggtccactaacctgagaattgacaacttctggtataggttctccttctgcttcaggcaatggagatataacacttgctcttctctttgttttctttgtgattgtgttgcagattgcttgaggctccactataccctttatggtcacttcatttttagccatgtcaattaccactccttcaactcctctcattttcataatgtatctctcaattttcttggcacatccctcacaatgcaagtccacaaacagcacacatggtgaaggtggtttaggctcttccttcttctcatcttctgtcttttcttctggtttttcttccttcttttcctctgctggcttttcctctgccttctcttctttcttctcctcaggcttggcttcagccactggttgtacttgctcctgttttgcttcctcacccatttgtcctatgaatcgagactgatgaaatgtcaaattgttattctgaatttggaaaaaaagttcttagacatgcaaaagatggagagggtttaacaagtgttgagaaatcagtgatgttataaggagggaaggagaaggggtatatgataggtgactgaggagtgatatgcatatataaagttaaactgagtgattccttaccacatgcagtgccactaactgcgaaagggaacctcttagtttaattttttttttcagaattcttttcaatcttcaaggttgtgaaggtagaaggggggggggcctacgtagctga

SEQ ID NO: 2757 - DNA, 1696 bp, Glycine max
ctctcctccttctctctccacacctccaaccactctttcaaacttccaaatttcaactcttacaacatatcaaacaaaaattccatcaaataatacacacactttagctgttgttgtgcacttcaaattaattaaacatgctagttcctcatccttcaatgctaattgcacctcaaaacaccgtagaaaatcatgacaacatcatggaaggacagaaactacactttgatggatctttgatgccaaaccaatccaacataccctcccagttcatatggcctgatcatgaaaaaccatgcctaacaccaccagaactccaaattccacccattgacttgaagtgctttctctcagcagatccacaagctttgtcaacagtttgtgctgaattgagtgaggcatgcaagaagcatggcttcttccttgttgtcaaccatggagttgatagcaagctcatagctcaagctcataagctcatagatgatttcttctgcatgcaactctcacagaagcagaaggctcagagaaagattggagaacattgtggctatgctaatagcttcattggaagattctcctccaaacttccttggaaggaaacactttctttccattattctgcagataaatccagaaaaactgtggaggattatttccttaatgtcatgggggaagatttcaagcaatttgggagtgtgttccaagaatactgtgaagccatgagcaaactctctcttgggataatggagcttctggggatgagcctaggagttggcagggaatgtttcagagatttcttcgaaggaaatgagtcggttatgaggttgaattactacccaccatgccaaaaacctgagttagctttaggaactggacctcattgtgaccctacatccctaaccattctccaccaagatcaagtcgagggcctccaagtctttgttgatggaagatggtactctgtcgctcctaaagaagatgctttcgttgtcaatattggcgacacatttatggctctatcgaatgggatgttcaagagttgcttgcatagagcagttgtaaacaacaaaattgtgagaaaatcacttgctttcttcctatgtccaaatagagacaaagtggtcacccctccaaaagatctaatcagctacgaaaattcaagaacatacccagatttcacatggccaagccttcttgaatttacacagaaacactacagatctgacacaaaaacacttgatgctttctcgagatggctactagaaaaaaacaatccgaacaggggtgcccccacaaatgttccatggccaacaaaatctataaactgagctttaacttgcatctgcttgaatgaggaagatatgacatcatataaagtgaaaaagagggtgcttttggtgggtcgacttgtgaagaaaaagataacagaaacatcaaaaagggaagggctaatcatcagtaattagttgtggtgttagtgttgggagaatcctatatggtgcaaatggaagaagaactgaggccatattctttggaataaagagagttgatttgtgtagtgaagttattcgatgttgtcactacttatgcattattagttgtcttgaactatgttgtagttatgtgatatgcatgtatgtagaacttttaattaattaataataaactgcattgcattttctgtcatcagaaaaaa

SEQ ID NO: 2758 - DNA, 1989 bp, Glycine max
cacgcgtccgctgttccaatgcaacaacaaagaaccctccatcatgcgggaccaactacgtcaactccctttgtccgttgcacgttttgaatttcaaatctcgtaacgccaacgccaacgccaacgccaacttatgttacattacatcccttcacgaccctctctctccccaacatcctaggctggctgtaactgagtcagttacattttaacaaaactttggctcttatttgagctcatttgacagacacttcattcaaggaagtaagaagtagaagcagcacctgcttcatgatgggtgcctcaggaaaatgggtaaaggcattaatcggacttaagaaaccagacaaagaggagcatgtgaaagagggtggtggtaagagcaagaagtggaggctatggaggagttcttctggggacacgggggtttcttggaagggtttcaaaggaggaaaccacagcgcagtagcttcttctgaagtggggtctgattcttctccacatgttgtagcagcagcagcagcaacaggcgcggctttcacagcagcagtagccactgtggttcgagctccacctaaagatttcagactcgtcaagcaagaatgggccgctataagaatccaaactgctttccgcgccctcttggcaagaagggctttgagggcattgaagggagtggtgaggattcaagctcttgttcgggggagacaggtgaggaagcaggctgcggtgacattgaggtgcatgcaggccttggttcgtgttcaggcccgagttagagcccgtcgtgtcaggatgtccatagagggccaaactgtgcagaacttgctcaatgaaagacgcagtaagcttgatcttttgaagcaagctgaggaaggatggtgtgacagcagaggaacgttggaagatgtttagacaaagatacaaatgaggcaagaaggagctttcaaaagggaaagagcaatggcttactctcttgctcacaaacaatgcagatcaataccaagccctaatccacgaacacgtgcctcatttacctctcttaagagtcatgagatgaacaaagctaactgtgggtggagttggttggagcgttggatggcagcaaagccttgggagagtagattgatggaacaatcacaatctcaggctgaagccttagataaaaccccacctccaaagaagtttgtggaatcctttgtgagctctaattccaaacaaagcatggtcaaagtcaagaagaaccacgtcacaacaaggatttcagctaggccaccccttgttgggcaagctactcgcttatcctcaagtccaagttctgagtttcgatacgatgagagttctgcatcatcttccatttgtacatccacaacaccaatgtctggggacacttgggacaggactgaggatagtaatggtaatgctgttgttgctaggcctaattacatgaacctgactcagtccacaaaggcaaagcaaaagacaagtggcaatcatgtatataatagagctcagaggcagcaatccatggatgggtttcaattcctcaagagggcagcggttttctccactgcggattctgacccttcaatcaacttttttaggccacttcacttggacaagagttcagtgatggcacggtgaaagggatagaatctggtggaagctcgacatctttgtgtatttattgttattatttttttttccaagaagttcaacatcttgttgttccatgcaatttaaattgagttagttagctggctagaagtagcttttgtgtttgggaatacttgtgaggggtctccattttgtataattgtttatttgtgggttttgatattactcagtgctgagaggcttatccagataaatcaacttaagcataactatatggggaaacactcctttggttaacacatttagacggatttttttgtcccctcagttttttttaccacaaatgataatgccatttcataatcttgtagg

SEQ ID NO: 2759 - DNA, 1787 bp, Glycine max
tcgagttcacctacgtaggccccccccccccgactagaagcaattaaagcctcttttacagttcagtctcttgttaaagcaaaatggtcttagaagagtgtgtagtgcatgatgtgaggctatcctcagttgggccaggccgggccaccaggtcggaggtgttccacagcccgggtggcttggacttggccatgaagcttcactatctcagggtggtgtacttctttgctagtgaggctgcacaagacctaaccatcatgaaaattaaggaggccatgttcactttgctcaaccattacttcatcacatgtggccgcttccggcgatcggattccggtaggcccttaatcaagtgcaatgattgtggagtaaggttcattgaggccaagtgcagcaaaaccctagatgagtggctagccatgaaggattggcccttgtacaagttgctcgtctctcaccaagtcattggcccagaactatctttttctcctcctgttttgttgcaggtaactaaatttaagtgcggtggaatttcattgggtcttagttgggcccatgtattgggggacccgctttcagcttcagaattcattaactcttggggcctaatattgaaaaatatgggcctacaacagctttttaacatcccaagatccatcccaacacccagacaacccggaccagaaaaggatccagtttcagcaaaacgggtcgacccggtgggggatcattggatcccagccaacaacaaaaaaatggacacattctccttccacctaactagctcccagttgaactacttgcaagcacaaatttggggtccaagtcttgaccaaacccctctttttgaatccctatgtgccatgatttggcgttgcatggcccgggttcgatcaggatccgaacccaaaaccgtgaccgtgtgtagaaccgacccgtataagaggtcaaatgatatcattggtaataaccaagtgatatgcaaggttgaggttgaaagtgaatgctcaattgtagacactgatttgacaatcttagctagcatgcttgtggatcaaggagtggatgagaggaagcaaattgaggaagccattgagaaagaccaaggtgtgagtgatttctttgtgtatggtgtcaatttgacatttctagacttggaagacaccaatgtgtatgacttgcaattgaagggacacacaccaaagtttgtttactacacccttcaaggggttggagatgaagggattgttttggtgtatccgtggccaaaaggttctatcgagaatggtgttgatgggaagtttgtgaccatgattataccggaggatgaaatggtgaagcttaaatctgagctcaagataattggtcttctgcttgaggataattaagttttaatgagattaagtgtttatcaacgaataaatttcttttttattaagtatatttgtgagcaagggaaacttttagtttgtagtacatagtgtattactttaaagtcatgtgtgtctcacgttaaacgtaaatgtgacatggtgtgattcttcttcctgcgttgttattaaataaattatttccttttaaaaaaaagaaaaaaatgctttaattttggtgatgctatgtgatttgtatcgcgggtgaggtctctcctcatagggataaggtctttggggttcttacttattatgctaggaatgcctacttgaagggatttgttggggtattcggtattccatgtaacttcctgtagttgtttttctggttgattcaatttcacagcttgtgatttg

SEQ ID NO: 2760 - DNA, 1730 bp, Glycine max
tcgagtcagctacgtaggccccccccccccaacacacaaccaaaccctcttgaccttgtgatatctctctcttttaatttctaggatcaaaccaaaaaatggtcttagaagagagtgtagtgcatgatgtgaggctatcctcagttgggccgggccgggccaccgggtcggacgtattccacaacccgggtggcttggacttggccatgaagcttcactaccttagagtggtgtacttctttgatagtgaggctgcacaagacctaaccatcatgaaaattaaggatggcatgttcactttgttcaaccattacttcatcacctgtggccggttccggcgatcggattccggtcgacccttaatcaagtgcaatgattgtggagcaaggttcattgaggccaagtgcaacaaaaccctagatgagtggctagccatgaaggattggcccttgtacaagttgctcgtctctcaccaagtcattggcccagaactatctttttctcctcctgttttgttccaggtgactaaatttaagtgcggcggaatttcattgggtcttagttgggcccacgtattgggggatcctctttcggcttcagaattcattaactcttggggtctaatattgaaaaatatgggcctaaaaatgctttttaacatcccaagatccatcccaacacccggacagcccggacctgaaaaggatccagtttcagcaaaacggatcgaccccggtgggaagaatcattggattccagccaacaacaaaaaaatggagacattctccttccacctaaccagctcccagttgaactacttgcaagcacaaatttggggtacaagtcttgaccaaacccctccttttgaatcactatgtgccatgatttggcgttgcatggcccgaattcgaccaggatccgaacccaaaaccgtaactgtgtgtagaagcaacccctataagaggggcaatcatatcattggtaacaaccaagtgatatgcaaggttgatgctgcaagtgaatcctcaattcttgacactgatttgacagttttagctagcatgcttgtggatcaaggtgtggatgagaggaagcaaattgaggaagcagttgagagagaccaaggtgtgagtgatttcttcgtctatggtgtcaacttgacatttctagacttacaagaaaccaatgtgtatgacttgcaattgaagggacacacaccaaagtttgtttactacacccttcaaggtgttggagatgaaggggttgttttggtgtatccattgcccaaaggttctatggagaatggtgttgatgggaagtttctgaccatgatttttccggaggatgaaatggtgaagcttaaatctgagctcaagataattggtcttttgcttgagaataattaagttttaatgagattaaaagcatgtttgactttccgttcatcttgttagcacgaatttcaattttaaattcaatggtcaaccgtatattaacgcaaaaggaatgatggagatgcttttgcaaacttcatttttcaccaatgttggttcgtcgaatacccaaacacgcattaaatatttgttaatgaataaatttcttttttatttgatgtatctgtgagcaaggaaaactttcagtttgtaatacataatttattgttttaaaaaaaaaaaaaaaaaaaaaaaaaatgaagaaaaaagaagaagaaaaaaaaaaaaaaaacttgg

SEQ ID NO: 2761 - DNA, 1698 bp, Glycine max
gtggattggaaggctcataggatccacactgtggagaggcgcacccttgtagaacaagaacttgaaaaggcacaggaggatatcccagagtacaaaaaacaagcagaggctgctgagcaggaaaaaggtcaagtactaaaggagttagacagcacaaagagactaatagaagaattaaaacttaacctagagagagcacaaacagaagagcgtcaagcaagacaggactcagaacttgcaaagctcagagtggaagagatggagcagggtattgcagacgaatcaagtgttgcagccaaggcccaacttgaggttgccaaagccagatatacagccgctgtttcagatttaatagctgtgaaagaggagctagcagcattgcacaaagaatacgcttccttagtgactgatagagatgtagctattaagaaagctgaagaggctgttgctgcatcaaaggaagtagagaagtctgtggaagatttaactgttgaactaattgctgcaaaagagtcattggagactacacacgctgcacatttggaagcagaggaacaaagaataggaacagtcatggcaagagatcaagattctctcaattgggagaaggaacttaaacaggcagaagaagagctccagagactcaaccagcaaatttcatctgcgaaggaactcaaatctaaactggaaacagcctctgctttgctgattgatttgaaagctgaattaactgcttatatggaatcaaagttaaagcaagaaggaggcccagaagaaccagagataaagacacacactgacatacgagaagcagtggcatcagccggaaaggaacttgaggaagtaaatcttaacatagagaaagcaactgctgagattagtatcttgaaggtagctgctacatcattgaaatcggaacttgaacaagaaaaagcaactcttgcctccattaggcaaagagaaggaatggcctccgttgcagtggcatctctggaagctgaattggaaaagaccagatcagaaatagctttggttcagatgaaggagaaagaagctaaagagaaaatgaccgagcttcccaagaaactacaactaacagctgaagagactaatcaagccaacttgcttgctcaagcagctcggtaagagctacagaaagtaaaggcggaagcagagcaagccaaggctggagtaagtaccttgggaaagtagattacttgcagctcaaaaggagatagaggctgcaaaggcttctgaaaatttggcaatagccgcaattaaagcattgcaagagagggaaccacctaaaagcaaaaatggaggggacccatctaaagggggtatacacggtctttggaaagaagacgtatgagctttatcgagcgaggacactgaggccaaaagcaccgaggccaaaattgagggttggcaacctgccaaattcctggaaattgattaagggcaaagggactccggaattcgaaaagcccttctaaaaagtgtgggacacaaggggaacaaagagaggataacctggttaaaaaagggaaacccctctgaatatggggcaattgggctaaaagcgctcaaacaggcaaagagagaggtaaaattttaggctgggcacaacacccatatttaaccaatatgtgacacactctgaaaaatgacaacactccgataaaaaggctcgccgaa

SEQ ID NO: 2762 - DNA, 1561 bp, Glycine max
agaaaatatgattaggaaagaataagtcatcatattttcttgtattgatagccccgctgtcccttttaaactcccgagagagtataaaactgcatcgaatattacaagatgcactcttgtcaaatgaagggggggaaatgatactacaagccactaggcatgggtctagcaaaggaaacaataatgggaggtggaggccgtgtggccaaagttgaaattcagcagaagaagcctctctcaagggttccaaacacaaagccaccattcactgttggccaactcaagaaagccattccaccgcactgctttcagcgttccctcctcacttcattgtcctatgttgtttatgacctttcattggctttcattttctacattgccaccacctacttccacctcctccctcaccccttttccctcattgcatggccaatctattgggttctccaaggttgcattcttactggcgtgtgggtgattgctcacgagtgtggtcaccatgccttcagcaagtacccatgggttgatgatgttatgggtttgaccgttcactcagcacttttagtcccttatttctcatggaaaataagccatcgccgccaccactccaacacgggttcccttgaccgtgatgaagtgtttgtcccaaaaccaaaatccaaagttgcatggtacaccaagtacctgaacaaccctctaggaagggctgcttctcttctcatcacactcacaatagggtggcctttgtatttagccttcaatgtctctggcagaccctatgatggttttgctagccactaccacccttatgctcccatatattcaaatcgtgagaggcttttgatctatgtctctgatgttgctttgttttctgtgacttacttgctctaccgtgttgcaactatgaaagggttggtttggctgctatgtgtttatggggtgccattgctcattgtgaacggttttcttgtgaccatcacatatctgcagcacacacactatgccttgcctcactatgattcatcagaatgggattggctgaggggtgctttggcaactatggacagagattatggaattctgaacaaggtgtttcaccacataactgatactcatgtggctcaccatcttttctctacaatgccacattaccatgcaacggaggcaaccaatgcaatgaagccaatattgggtgagtactaccgatttgatgacacaccattttacaaggcactgtggagagaagcaagagagtgcctctatgtggagccagatgaaggaacatccgagaagggcgtgtattggtacaggaacaagtattgatgaaccaagcaatgggccatagtgggagttatggaagttttgtcacttatcacttaattagtagaatgttataaataagtggatttgccgcgtaatgacttgtgtgcattgtgaaacagcttgtagcgatccatggctataatgtaaaaatatgtggaaagtgttctgcttataactttcttccttaaaagcacactccatagaacaatattattggtactaaaaaaaaaaaaaaaaa

SEQ ID NO: 2763 - DNA, 1470 bp, Glycine max
atctcctagtttcctaaccatatactaatatttgcttgtattgatagcccctccgttcccaagagtataaaactgcatcgaataatacaagccactaggcatgggtctagcaaaggaaacaacaatgggaggtagaggtcgtgtggccaaagtggaagttcaagggaagaagcctctctcaagggttccaaacacaaagccaccattcactgttggccaactcaagaaagcaattccaccacactgctttcagcgctccctcctcacttcattctcctatgttgtttatgacctttcatttgccttcattttctacattgccaccacctacttccacctccttcctcaacccttttccctcattgcatggccaatctattgggttctccaaggttgccttctcactggtgtgtgggtgattgctcacgagtgtggtcaccatgccttcagcaagtaccaatgggttgatgatgttgtgggtttgacccttcactcaacacttttagtcccttatttctcatggaaaataagccatcgccgccatcactccaacacaggttcccttgaccgtgatgaagtgtttgtcccaaaaccaaaatccaaagttgcatggttttccaagtacttaaacaaccctctaggaagggctgtttctcttctcgtcacactcacaatagggtggcctatgtatttagccttcaatgtctctggtagaccctatgatagttttgcaagccactaccacccttatgctcccatatattctaaccgtgagaggcttctgatctatgtctctgatgttgctttgttttctgtgacttactctctctaccgtgttgcaaccctgaaagggttggtttggctgctatgtgtttatggggtgcctttgctcattgtgaacggttttcttgtgactatcacatatttgcagcacacacactttgccttgcctcattacgattcatcagaatgggactggctgaagggagctttggcaactatggacagagattatgggattctgaacaaggtgtttcatcacataactgatactcatgtggctcaccatctcttctctacaatgccacattaccatgcaatggaggcaaccaatgcaatcaagccaatattgggtgagtactaccaatttgatgacacaccattttacaaggcactgtggagagaagcgagagagtgcctctatgtggagccagatgaaggaacatccgagaagggcgtgtattggtacaggaacaagtattgatggagcaaccaatgggccatagtgggagttatggaagttttgtcatgtattagtacataattagtagaatgttataaataagtggatttgccgcgtaatgactttgtgtgtattgtgaaacagcttgttgcgatcatggttataatgtaaaaataattctggtattaattacatgtggaaagtgttctgcttatagctttctgcct

SEQ ID NO: 2764 - DNA, 1193 bp, Glycine max
cggctgcgagaagacgacagaaggggctacatatatatattatagagattttatacattctaaattttgtgagtgtggacatactctgagcgtgagaaagagaaggggaagaaagagagagagtgatgggaaggggaagagtggagttgaagagaattgagaacaagatcaacaggcaagtgacctttgcaaaacgaaggaacgggcttttgaagaaagcttatgagctttccgttctttgtgatgccgaggttgctctcatcatcttctccaatagaggaaagcagtacgagttttgcagcggttcaagcatgctcaaaacgctggagaggtaccagaaatgcaactatggagcgcctgaggacaatgtggcaacaaaggaagccttggtattggagttaagcagtcaacaagaatacttgaggctgaaagcacgttatgaagctctacaacgttctcaaaggaaccttatgggagaagatcttggccctctaagcagcaaagagcttgaatcacttgaaaggcagctagattcgtctttgaagcaaatcagatcaataaggacccaattcatgctggatcagctttctgatctacaacgtaaggaacactttctaggtgagtcaaacagagatctcagacaaaggttggaagagtttcaaataaatccactccaactgaatcccagtgctgaagatatggggtatggacgccatccaggtcagccccaaggccatgctctctttcaaccattggagtgtgagccaaccttgcaaattggatatcatcctgatccagtatcagtggtgacagaaggcccaagcatgaataattacatggcaggatggttaccatgaaagagtgtcaaatgtggagcataattaaagatcctgccgtttaatttcaaatttatttgaagttaaggaaaacggaaatttgtaatagcacgtaatggacttacactagactctaccttctaattaagctaggaacaatataagcagtgattttgtgtgtgagctttcataaacagtacctagctagcctcttccttgtttcaataatcacttcttccttttcctaattaataaaactatcgtatgcaccctttgcctttacattaccttgtattacctaccaatgacctcacatgtttgcttttgtcactctataaaattagtgtttaattttct

SEQ ID NO: 2765 - DNA, 1112 bp, Glycine max
cgagaagacgacagaaggggacgcagcgagcgagccacgaaaatattcatcacacagggttttggtttattattccaatttttggttttcccttttgttggatattagagtgtgtaagaaagagaagagagagaaatgggaaggggaagagtggagttgaagagaattgagaacaagatcaacaggcaagtgacctttgcaaaacgaaggaacgggcttttgaagaaagcttacgagctttccgttctttgtgatgccgaggttgctctcatcatcttctccaatagaggaaaactgtacgagttctgcagcagttcaagcatgctcaaaacgctagagaggtaccagaaatgtaactatggtgcgcctgaggctaatgtgtctacacgggaagccttggagttaagcagtcaacaggagtacttgaagctgaaggcacgttatgaggccctacaacggtcccagaggaaccttatgggagaagatcttggtcctttaagcagcaaagagctcgagtctcttgaaaggcagctagattcgtccttgaagcaaataagatcaaccaggacccagttcatgttggatcagctctctgatcttcaacgtaaggaacacttgctaagtgaggctaacaggtctctcagacaaaggttggaagggtatcaaataaatccactccaactgaatcccggagttgaagagatgggatatggcaggcatccagctcaaactcatggtgaagccctctttcaacaaatggagtgtgagccaacgttacaaattgggtatcagcctgatccagtatcagtggtgacagcaggcccaagcatgagcaattacatggcaggatggttaccatagtttgcgtttcctgcataagatccactgcaccagcacatttgccgttccaattttatttgaaaccgaaaaaaaaaccaacaaaaaagaaggaagaaaatggctttggatgtaatgaagctgtaagtgtctagtctaccgtgtatgaagtaggaacaaagttaagcagtgttgtttgtgtgtgctctttcataaaactgcacttctttgcttcggttactgtttcttcccttttaataagggtattgataggc

SEQ ID NO: 2766 - DNA, 1633 bp, Glycine max
gggaggtgtggtttgtttttattaagtatcccacgcgtccgggaataattataataatggtttttgcttctgcctttcatgattgatttcccatctgctatggttttgttggggtgtggtgaggattccttgtcatgacaaagaaattacgtttgggttgttcttttcagggggaggaggatggaaagaaagtgaataactttctggaaatggataggggggaaggagtgaatgatggtttttctggacctggaccaaatgattcacttattcctggtcttattgatgatgtagccttgaattgtcttgcttgggttagtggatctgattatgccgtgctatcgtgtattaataaaaggttcaataaactgatcaatagtgggtatctatatgggttgaggaaacaattgggggctgtggagcatttggtgtatatggtttgtgatccaagaggatgggtggcctttgaccccaagataaacaggtggatttctttacctaagataccttgtgatgagtgctttaatcatgcagacaaggagtccttggccgtgggctgcgaactgttggtcttcggtcgagaattgatggagtttgccatttggaagtatagcatgatttgtcgtggttgggtgaagtgccaggagatgaaccaaccccgttgtttgtttggatctagtagtcttggttcgattgctattgttgctgggggaagtgataagtatggaaatgttctaaaatcagctgagttgtatgactcttcaacaggtatgtgggaacttttaccaaacatgcacgcaccgcgtagattgtgttctggtttttttatggatggcaaattctacgtgattggtggaatgtcgagtacaactgtttcattaagttgtggagaggagtatgatctcaagacaaggagttggcggaaaatagaggggatgtatccatatgttaacgtgggtgttcaggcacctccacttgtggctgttgtggataatcagctatatgcagttgagcatctaactaacatggtgaagaaatatgacaaggaaaggaacacctggaatgaattggggaggcttccagtccgagcagattcttctaatggttgggggttggctttcaaggcttgtggagagcaacttttggttgtgggtggacaaaggggtccagaaggtgaagctattgtgctgagttcatggtgtcctaagtcagggatcagcaatggcaccatagattggcaggtacttggcgtgaaggagcatgtcggggtgttcgtgtataattgtgctgttatgggttgttgagatgattttagattgactcaacagagaatgttgatatccacaatctgacttagccttgaagggtgcctccatgttcaatcacctcatttactgagagttaattgttgctgggatagctttccctagctcagaatttggtttctttcttttttaacatggtttatttggatgtatttctcactttcctggtccataattctaaattgcatttgagattactgagtaggcttacacagagatatgttctattatcttctttagccaaatatgtaaaccaataaatgaaggattttcattgtttaatgtttaatgttcattgctgcttcttc

SEQ ID NO: 2767 - DNA, 1048 bp, Glycine max
gcgggaaatgatggattttgccatttggaagtacagcttgatttctcgtggttgggttaagtgtaaggagatgaaccatcctcgctgcttgttcggatctggcagtcttggttcaattgctattgttgctggtggaagtgataaatatggaaatgttcttgaatcagcagagttgtatgactcaaattcaggtacatggaaactattgccaaacatgcatacaccacgaagattgtgctctggcttttttatggatggaaaattctatgtgattggtggcatgtcaagtcctactgtttcattgacttgtggggaggagtatgaccttaagactagaaactggcggaaaatagagcgtatgtatccatatgttaatggggctgctcaggcacctccacttgtggcagttgtggataaccagttgtatgccgttgagcatctaaccaacatggtgaataaatatgacaaggaaaggaacacctggagtgaattgggaagacttccagtacgggctgattcttctaatggatggggcctggctttcaaggcttgtggggagaaacttctggttgtgagtggacaaaggggtccagaaggtgaagctgttgtgctgaattcatggcgtcctaggacagggttcaggaatggaaccatagattggaaagtacttggtgtgaaggagcatgttggggtgtttgtgtacaattgtgctgttatgggatggtccggtgagatgcttttagattgactcagcagaagatttgctggtatctacaatctgacttagctttcaggggtgcttccctgttgattcatctcatttaccaagttaattgtccatctcccttgataagaatttgggtttctacttttgacatcttatttggatgtgtttctctctttcatgatccatattttttatttgcttttcagattacctagtaggcttacacagatatgttctgttatccttttcttatccaactatgtaaaccaataaatcatagaattttatttttttaatacttcaatgcttattctttgcttt

SEQ ID NO: 2768 - DNA, 1276 bp, Glycine max
gtagtaacttcccatcatcatgtagtctctatgtagtacgaagcatccaccaccgtgtgttaccttgttctctcttctcttctccatgccactgaaagcttgaaacccacatagctagccatcaatggaatacagcaattgggctgaatctcttcaaaccgaaacccctctcccttctttcccacaaccctcatcatcatatcctcctacctattacccctcttaccctcaaaaccctaaccctaacccttcttcttctcttccccttaaccctcccggggttgatccccaaaccccattgaaccctattagctatgcggctcatgaacccgttcctggtttggtctacgctcagagccatgttggggatgattcatcttctgggtattgcttggaccataattgggttgccagagaggctgttaggcaatttggtactgaccctactctttatgcacctggcatctctttgccacccaatggctcagaacagttggctatggcaaatcctagctctttgtggtggacaaataccacaactcaacctcatgtcaatggaacacctaagaaaaaccaaaagaaaactaaggttgtgcaacctgcattttgcgaagtttgcaagatagaatgcaccggcaaggaagtgctggaccagcataaattaggaaagaagcacaagaagaacgtggagaaactaagggaatcattgacacctacccaagttcaaccatctgggtcatctaagcctttaataggaccccaattaccggatgataagggcaaatccatcagtgggaataagagtaagagaaaaaaagttgaaactgcagaggatttggagaaaaagaaaatgaaagttcttatgggtggggcagcagcttcagcagttaagatatgtgctatatgtaacgtggtgtgtaatagtgagacggtttataactatcatcttgcaggacaaaagcatgctgctatgcagaagaaagcatcgggtcatacacaatccaatgccggttgaattttcccttttttttaggaacatcacttgttttagcacctccattctgcatttgaatagaatatcatccattgcttaatttttagtttgaatatgaaatgtgcagagtatatatacatttgtgcattgtattagaagttgagatgcctcacacctttgtctctgcaagtacaaaatcttgcagtgccaactgattttttctttttcttatagactattagtgataactatcaaatgatcaagaaaaaaaaaaaaaaaaaa

SEQ ID NO: 2769 - DNA, 756 bp, Glycine max
  misc_feature (709)..(709): n is a, c, g, or t
attgtaaaaatccacgaaatcctataaacgctaggggctattagtcaacctggtagtggtactggtactgttgtcggatcgaaaaccctaaattgaattcgaatacacaacatgcagcaggggggaggatctgagacggaagtaacatgggaagaccagcagaacatcaacaaattcggaaggttgaataatcgctttcacgagcttgaggatgagatcaaaatcgcaaaggaaacaaatgataatttggaggatgcaagcaacgagttgattctcacagatgaagaggtcattcggtttcaaataggagaggtttttgctcatgtgccaaaggatgaagttgagaacaggatagaacagataaaagaggtgacaagccagaaattagcaaaacttgaagaggagaaagaatctattcttgctcagatggctgaactcaagaaaattttgtatgcgaagttcaatgactcgatcaatcttgaggaggattagtaactttcttcttgttgatagatttctagttgttgttttcttgttaatatgacctaatggacatttggcatttttgagtcatattgtctcttatcatttgattttaggatgtatgttatcttgcttgaacctctttcactccttggcctctgtttccgctttctttggcttcttgtgtgaatttcattttccctttattgtgtcctgaaaggggggnaaaaaaaaaaaaaaaaaaaaaaaaaaaaaaaaaaaaaaaaaggggcg

SEQ ID NO: 2770 - DNA, 700 bp, Glycine max
aaacctaaaaattaaaaagctttgatattttcaataaattatgtatttttaatttttttgagaggtctataatacttcgcgcgacgagaagggatcagataaggttgttgagaaagaagaaatggaggaagcaaagggagttgtgaagcacgttttccttgcaaagttcaaggacgacgtcactccagagcggattgaggagctcatcaaggactatgccaatcttgtcaatctcatcccacccatgaagtcattccattggggcaaggatgtaagtgctgaaaacatgcatcaaggcttcactcatgtgtttgaatcaacctttgagagtacagaaggcattgcagagtatacagctcatcctgcccatgttgaatatgcaactttgttcctttcctacctggacaaagtcattgtgattgactataagcctaccattgttaagctttgatgggagaagttatgcctcgttcactgctagtgttcttataaaaataaatttggtttcctatctaagcaattcctgtgtacactacgacgctcctcccgagtcatatattgagtgtcattctctgttgtctggatattgacaattctaaaaaccttactgatataggaatgtactattaaatcactccaatgtttaaaatcaataatcagttacctataattttacctatataaaaaaaaaattaaaaaa

SEQ ID NO: 2771 - DNA, 668 bp, Glycine max
atattttcaataaattttgtatttttaattttgttctcagaggtctataatacaatacacgatgagaccgcggggaaggtggttgtggaagaagagatggaggaagcaaagggagtagtgaagcacgtgctcctagctaagttcaaggacgacgtcactccagagcggattgaagagctcatcaaggactatgccaatctggtcaatctcatcccacccatgaagtcattccattggggcaaggatgtaagtgctgaaaacctgcatcaaggcttcactcatgtctttgaatcaacctttgagagtccagaaggcgttgcagagtatgtagctcatcctgcccatgttgaatatgcaaatttgttcctttcctgcttggagaaagtcattgtgattgactataagcctaccgttgttaagctttgattggagaagtaaagcctcgttcactgctagtgttcttataaaaataaactttgttttctgtctaagcaatttctgtatacactacgatgctcctcccccgtcatatattgagggttattctctcttgtcttgattttgacaattctaaaaaccttattgatataggactatgtactattgaatcactccaatgtttaaaaatcaagagtcagttacttatagttttacctaaaaaaaaaaaa

SEQ ID NO: 2772 - DNA, 3550 bp, Glycine max
aattcggctcgagtgctgttgaattgtcaaaatgaaataaggactataccatttcaagaggaggaactcaaggcccttttattgtgctgttggtattttcttctttttttgctttaggacaatatgcagctgcacatatctccaagtttgaggcatgttactgtgtttccaagtaaagggttcaaggagtttatcaaagtgaaggttgcatcgaagcgtgtctcgtatcggatgctcttctactcactcttggtcttcacttttcttctccggtttgtgtttgtcttaacagcagtggatggcattgatggagaaaacaaatgtactaccataggttgcctaggaaaaaaactaggacctatgattttgggaagacggcctgagtcatctgtcccagaagtgatataccaaacattagatgaaaatcttggccaaaatgaacctcaaggaagatctgatattccacagaccttagaagagttcatgactgacatgaagaaaggtggatatgatgccaagacatttgcagttaaacttcgagaaatggtaacccttacccacccgtgcgccaggatggccaaaatccaagaatatctatatcgacatgtagcatcaagcagcataccaaaacaacttcactgcctttccttgactttggccaatgaacacaccaacaacgcagcggcacgccttcagctcccctctgcagaactagtccctgctctggttgacaattcctacttccactttgtccttgcctcagacaatgtgttggctgcatcagtggttgcagcatcgcttgttcgcaactttttgagacctcagaaggttgttctgcatataattacagacaagaagacttattatcccatgcaggcttggttctcattgcattctttgtcacctgctataattgaggtcaaggcattgcaccattttgattggtttacaaagggaaaggtacctgttttggaagctatggagaaagatcaaaaggtgaggtcacaatttagaggggggtcatcagctatagttgcaaataccactgagaagccaaaagtaattgcagcaaaactgcaagcacttagtcccaagtataattcagtgatgaaccacatccggatacatctcccagagttgttcccaagtcttaacaagttggtcttcctcgatgatgacattgtggtacaaactgatctttcacctctgtgggacattgaaatgaatggaaaagtaaatggcgctgtagaaacatgcagtggagaagataagtttgtgatgtcaaagaggctgaagagctatttgaacttctcccaccctctaatatccaaaatttttaatcccaacgaatgtgcctgggcctatggcatgaacatttttgatttggaggcttggaggaagaccaatataagcaatgtttaccattattgggttgaacagaatatcaaatcagacctgagtttgtggcagctagggacattacctcctggattgatagcatttcatggtcatgtccacgttattgatcctttctggcatatgctgggaccgcgcgtccgggaaaatacaagttttgctgatgctgagagtgctggtgtcatccatttcaatggcagggcaaagccatggttagaaatagcttttccacaactaaggaaattgtggacaaagtatgttgacttctcagataagttcatcaagagttgtcacattagggcatcatagcttatatcttaagataacacgacctcattgatgagttgaagaaatgacatttgcatccgagggaaaaggaaaatgagagttctttcaagcatcaggccttccaagacaacaatgatgagcatgatgctcctttcttgctttgaaaatttcttttttaactctttcgtcaattgaaattctcacattctttttctcttcaatccatgttgtaagtatgagtatttgtagatcatataccaatactatatattaaaacaacacttttttttttcttttttggagaaaacaaacctgcgagctcaaggttttaacaataaacttttgtaagatagcgagagaccaaaggaccattttatccaatttcatttaaaccaacatataatacatcaagctaacagaaaagcttcttatcatgtaattcataatcgacagtggtatattgcaattttatgacattaaatgtttcataagtgtgctgtaggcagactatcaataacttaaggcgtagtcctcaaaagtaatctgaactctcattcaaaattggtgagtggtactatatgtttgcttcacacaatggtcatagtattgcacctataatcactaagacatgctcacaatcacaaacatgttctacgtacaattcatgtgaatagagatcttaaagaccaatgcttcagctccacttactttttccctgtcacattggataccaatcccttgatgaactttgcagacttggttatgggagaattgatagccatcagattgtacaatacattctcaacttcaacaatagttggcctggccttgaatgacgaaaccaccttcaattcttctccttcttctacaaaaacattccatctttctccactcacaaccccatctctcacacacttaaaaatcaccccttttcttttgctcaagatccctctcacctccaatcccataaaagaataaaccacttcaaaagaatccacaaagccactcagatcaccaaagttgctctcttcctcaaatgcccattttgggttgaacaaaaccaatggctttggataaaaggcatcactcactcttcttatcagtgccaattgggaactctctggcgccaaaaatatcgccacatccgcagaattcaagattctggggtctgttttggtcactgaaggaatgtcaatgtgttcaaaagttgaatgagactgaaagccaatagtggcagattctttcaagctagcatcaggccacaggattaagatcttgatgggagaaccttttcttttgatgggcatgtccccaaaaaaatcaagggcaagttgagacagtgaatccggtgagtcatcaatgactggaatttcaacccggaacttgggttgccttagtttcttgaatttgcctattagtttggtattgtttaggggcttctctaaggttgctgaaagggatgttttggcctgaagtatggcatcctcctttgtgataggtggcttaggggaagaaagtgaggaatggatggaagtggataatgctttgaggggaacagtgaaacttaaagggatgatgaagctgttgcagtggttgtacagataatgagtagtaggaaatggaattgatgtgatctgagcatttgagtgtggaggtagacatgatgttagcttgcaaatttggatagattggaaatgagttgcgtggagataggaagattccatttaaggttttacagagtagcaaggttatagttctgatatgaaacagtagtttcgggggggctctacctggctgagatagatattaacatccaccgtttcggacgcgtgggcgaacgcgtaag

SEQ ID NO: 2773 - DNA, 1562 bp, Glycine max
ttttgtacgcctgcgagaagacgacagaaggggaaaaaaaaagagaattagcagggtgttattggtgggtgtagaaagtagcagaaaatggctgtgatcccgtgtcactgttaccgtaccgtcggatcagacaaaccctacctctccggtcagagtctccgccgtcgcgctcctttccccgccgtctctgtttcatttcgacgccgaatatcatgcgtcgcctcttctgccatcgctcacaaagttgggctgaaagattttcttcacttagatgattttgataaggacactattctgaagatgctggaccgggcacttgaggtcaaggccttgctgaagtcaggggacaggtcgtttcgaccttttgaggggaagacaatggcaatgatatttacaaagccgtccatgagaacgcgtgtttcgttcgagactggctttacattgttaggtggccatgctatttatttaggacctgatgatatccaaatgggcaagcgagaggagactcgtgacattgctcgtgttttgtctcgctataatgacatcattatggctcgtgtttttgctcataaggacatacttgatcttgcaaaatatgcaactgtgccagtcatcaatgggttgacagactacaaccatccctgccagataatggctgatgcccttaccatggttgagcacattggtcggtttgaaggtacaaaggttgtctatgttggagatggaaataatattgttcactcatggttgttgatggcatctgtaattccgtttcactttgtctgtgcgtgtcctaaaggatttgaacctgatgcaaaaacagttgagaaggcaaggaaagctggaatcagcaagattgagataactaatgatcccaaagaggctgttaaaggagctgatgttgtgtattcagatgtctgggccagcatgggccaaaaggaagaagctgaataccggcgccaagtttttaaaggatttcaggtgaaccaaaatcttatggatttggctggttcaaaggcatttttcatgcattgcttaccggcggaaagaggggtggaggtgactgacgaagttattgaagctccaaattcaatagtcttcccgcaagctgagaaccgaatgcatgcacagaatgccgtaatgcttcatgtacttgccaagtagatagctgaatgaatgatcatctgaggtttttgagcaatattagcgtgcactcgcaatagttggttttaggccttcagctagtgaatacactttgcaacagttagtttttggcattcagcagtatgtatgttcggtctagtaagttggatttttgagttgcttcggtattattactagcaattgaaaaacaggtaaatcgtataaagatgctagtattgggttttctttttcaaaaaaaaaaaaaaaattttatttgagatttaattcctttaaagtaaaaagtgaggtaggtctaggataaaggaaatattaaattattgattaaaaagttaacattgaaaatgtattcttatatcataaatttacccatttagagtctcaaaaaaaaaaaaaaaaaa

SEQ ID NO: 2774 - DNA, 753 bp, Glycine max
tcgagtcagctacgtaggcccccccccatcctcatcttaaaactatcttgctagtgtcggtttagttagcacacaaccccacatccaaaggttcatttcaatatggcaatcttgtcaagttttgcaccgttgaccattcttagtatagtcttgttagtagtcggagtcattgtcactggggcgaaagctaggccaagagcattctttgtgtttggagattcacttgttgatagtggaaataacaattacttggctaccacggcacgtgccgatgcccctccttatgggattgattaccctccaagtcatagaccaaccggtcgtttttccaatggctacaacattcctgatcttatcagtcagagacttggtgctgagtctacattgccatacttgagtccagaattaagaggagataagctcttagttggtgccaattttgcttcagctggaattggaatccttaatgacactggaattcagtttgtaaatgtaatcagaatgtatagacagctagaatattttaaggagtatcaaaaccgagtgagtgctctaattggagcttcagaggctacgaatttggtgaaacaagcactagtgctcatcactgtagggggcaatgattttgtaaacaactacttcttggtgcccaattcagcaaggtcccgccagtacccactacctcaatacgttaagtatcttatctctgagtaccaaaaaattttgcagaggctatatgatcttggagctcga

SEQ ID NO: 2775 - DNA, 1416 bp, Glycine max
ttatcctatttgggtggatggtgtgtcacatgcacctgcgtgtgcttagaacctgtgtccttttaagagcgtgtttccaatttttgatattcaatacaatatcttcccattcctctgtgtgtgatctttggaaggagatgggtcgtcttgctacattatcagaagaacccatcaacgaccaagacaacaagagaagcacctcttcaagctcaaaaaaaatggcgaaactggaactggatcaagacccacttcttccacaagaagcccgacctcaagatcctcctcagcgttctcgcctgccctctcttccctgtccctccaaacaccccatcggacccacccctcaaccagctctcttcttcagctcagtatattatccagcacttcaccgccgccaccggctgccggaagctggaagggacggtcaagaacgtctttgccaccggaaaggtggaaatgtgggccgtggatgaggtcggaaacaccggagtctccgagagaggctgctttgtcatatggcagatgctccccgacaagtggcagattgagcttgctgtcgctggtcacaaggttgtcgccggtagtgatggcaccgtcgcctggcgccacactccttggctcggggcccatgccgcaaaaggcggcatccgccctcttcgacgggctgttcagggactggaccctttggcagtgtctgctgtattctctgcagcacaatacatgggagagaaacaaatctcaggcatcgattgtttcgttctaaagctgtcacctgatcagaaggacctcgttgaccgaagtgacaacactgctgagatgatcaagcacgttgcatttggctacttcagccagagaaatggtctattggtgcaccttgaggactcttaccttactagaatccaatcccctgggacacaccccacgtactgggagaccacaatgtcaacgaaaattgaggattacaaaatggtggatggtgtgatgattgcacatgctggccattcaaccgtgatcatcacaaggtttggggacaatcttaaaacaggacctgccatcacacggttggaagaatcatggaccattgatgatgttgcattcaacgttcaaggcctttccatggactgcttcataccccctaaggaactccacaaggactacccacaagaagatctagattggagatcacccttgcatagatgatgatgatcatgaattcgtgatcccaaacaaaccttggttggaggagtttttgtattttttttctaaataactgttgttattgatattgctaactgttactactattacttaacatatatatgtagattgctttgtaatagtgtattactgattttgggcatatatataacagatctcatctattaattgttgtgtcaaaaaaaaaaaaaagaaaag

SEQ ID NO: 2776 - DNA, 1507 bp, Glycine max
tcgagtagctacgtaggccccccccccgtcctcagcagcatgcagaagagatcggcgcgtttcatttgatcagatcataacaatggtgtccgaaggcactctcctgggcatgggtaaccctctcctcgacatctccgccgtcgtcgatgaagacttcttaaaaaaatatgatatcacctcgaacaatgcgattcttgcggaggacaagcacaagcctatgtatcaagaattggctgagaaatataatgtggagtacattgctggaggtgccactcagaattcaatcaaggttgctcaatggatgctccaagttcctggtgcaacaagttacatgggtggcataggaaaggataagtttggggaagagatgaagaagaactcaaagcttgctggtgtaaatgttcactattatgaagatgaaactacacctactggaacttgtgctgtttgtatagttggtggtgaaaggtctcttgtggcgaacttagcagctgccaattgctacaagtctgatcatttgaagagaccagaaaattgggcactagttgaaaaggccaagtatatttatattgccggctttttcctcactgtatcaccagattccatccagttagttgctgagcattctgctgcaaataacaagatcttctcaatgaacctttctgctccttttatctgtgagtttttcagggatgtacaggagaaagctctaccgtatacggactttgttttcggaaatgagactgaagcaagaacattttctaaagttcatggctgggagactgataatgtcgaggagatagctgtaaagatttcccaatggccaaaggcatcaggaacacacaaaaggataacagttatcacacagggtgtggatcctgtttgtgttgctgaggatgggaaggtgaaaaagttccctgtgcaacttttgcctaaagagaaactagttgatgcaaatggaacaggagatgcatttgtcggaggatttctttctcaattggttcaggagaagcccattgaagagtgcgtgagagctggctgttatgcagcaaacgttatcatccaaaggtctggctgtacgtacccagagaagcctgattttcattgagtgtttctctcggttctgtttccattatgaagttttgattgttaggaaatcttttgttgtattttgatagttgcagcataacagctgcatttggatttttcaatcccgactggggaaaacgaggaaagagtttcagtgaaaggaaacaaataattgatctgttatattctagtactattattagaggcttagagcatcgtttcatatttttgctgagtttgttattgagtcttttttattcgatattaaaccttgttattgtgcttagactgatgtctaacttgccacttcgagtatcgtttaccgacctattggttaagcaagcttaaaagcattatgattttttccgaagatattactagtttatgagaaaaataataaaaactgtttcttatggcg

SEQ ID NO: 2777 - DNA, 878 bp, Glycine max
  misc_feature (654)..(654): n is a, c, g, or t
  misc_feature (839)..(839): n is a, c, g, or t
ccacgcgtccgaaccaaagccccctctggctttggtccttcgctagggttcggggattcaccatttcccatttcgtcgcttcttatttacccccagaaatcccatgatcctcttctctcgtttcgacacttctcaacttctgagggaaattcaatgcagctgtttctgaggggtctcatgtgatttctgtggttctggttcggtttatcgcggatcttgaggaggcttttgctgaggtctgtgactctgtgacaatgccttctacagaaaatcagggctcttcgtcgtcgttttcctcgtttggccgttccatatttggtgccaggcaggagcaggttcattctgtggaagcaagtaatgaatctgattcctgtaatttagagcttggattgttccagaagcatgttacagatcggtttcaagacctttctgcggctagtgatgaggaatttctctcaattgattggattcagaagctccttggagcatttatcagctgccaagaggaattcagagccattctgttgaataacaaagagcaggtcacgaaacccccctttgatcgcatgatttctgaattctttgagaggtcggtgaaggcacttgacatttgtaatgctagccgagatgggattgagaagattcgcacatggncaaaagcatctggaaattgtgtgttgtgccttgggttcgagtaagagagcattaactgaaggccatttccggagggcaagaaaggcactgatggatttagcattggcaacgcttgatgagaaagaatctggatcagttttttctcagcgtaataggtcttttgggcgacataactcaagcaaggnatcatcactcctcatcaggggcattcaagatcgcattcg

SEQ ID NO: 2778 - DNA, 1590 bp, Glycine max
ctcagctacgtcggcccccccccctgaactggcgtaaaccaaagccctctggctttggtccttcgctagggttcggggattcaccatttccaatgatcttcttctctcggttctacacttctcaacttcagagggaaattcaatgcagctgtttctgaggagtttcaagtgatttctgtggttctggttcggtttattgaggatcttgagggggcttttgcagaaggctgtgactctgtgacaatgccttctacagaaaatcagggcttttcgttgtccttttcctcgtttggccgttccatatttggtgtcgggcaggagcaggttcattctgtggaagcaagtaatgaatctgattcctgtaatttagagctcgggtcattccaaaagcgtgttaccgatcgatttcaagacctttctgtagctagtgatgagcaatttctctcaattgattggattcagaagctcctcggagcatttatctgctgccaagaggaattcagagccatcctgttgaataacaaagagcaggtcacaaaacccccccttgatcgcatgatttctgaattctttgagaggtcagtgaaggcgcttgacatttgtaatgctagccgagatgggattgagaagattcgcacatggcaaaagcatctggaaattgtgttttgtgccttgggttcgagtaagagagcgttaactgaaggccatttccggagggcaagaaaggcactgatggatttagcattggcaatgcttgatgaaaaagagtctggatcagttttttctcagcgtaataggtcttttgggcgacataactctggcaaggatcatcactcctcatcagggcattcaagatcgcattcgtggagtgtctctcgttcctggtctgcagccaagcaactacaatccattgcgaataaccttgttccaccccgtgctactgaggttgctgcaacaagtgggcttgcgactcctgtttatacaatgaactgtattctcctgatagttttgtggacccttgttgcagccattccttgtcaggataggggtctaaacattcatttttcagtcccacggcaattatcctggagcactccggttacctcacttcatgaacgaatcacggaagagtcaaagaagcgagagcgccgaaactcaaatggtttgttgaaggagatatatcaagttgagataagcagccgccgcttgaccgacctgatagattcagctcagtttccgttggcagatgaccagaaaacagaagttgagcgcaatgtgatggagctgatgcgtgtttgtgaagctttcagaaatggatcggatccgttggagcgccaagtgagggaggtcttccagaagataatggcatgtcgaactgaggggctcgattatcttggcacgccaagccatacagagcaatgaaaatggtgggttgttgatgagctatcagatgtacaaatttgcggaactgtgtacattttacatcttaccatctttttctgaggagtgactcggcaagataagcagacaaatcttttaggactcttgtgatgcgttgtattaaattattaatctcagtacttgtgtaaa

SEQ ID NO: 2779 - DNA, 1644 bp, Glycine max
gcaattgcatttgatttcgacagttccaaagtgctcaactactctaacctacgtcacataaaaccaaaaaaacattgttttcatcgacctagttccaaggcttctacttccactgcccccattatctacccacaatctaacacagaaggccaagttttgccgtttgcatttcctcttcaaactctgtctctccagatctaggtgctctgccttcattttacatttggacaagatggcaacaacaacagtttccaacttgccaattgctatgtcaagacccaagattccttcatcacaaaggattgcaaatgtatgtcctgcaattcttggaggtagatctaaggttggttcatgttataaactggcaagtgtttgtcatgttgcatcagcacaacctttccatcagggcttggcaatgacatcaggtgctgcaaaatatggcaaaatcctaacaaaggcaatgtccgagtctagttcaaacaaggaagttgcaggactgccaattgatttgaaaggtaaaagggctttcattgctggtgtggctgatgacaatggatatggctgggcaatagcaaaatctctcgcagcagcaggagctgaaattcttgtcggcacatgggtacctgctttaaatatatttgagtccagtttacgacgtggaaaatttgacgagtcacgcaaattacaagatggttcgttaatggagattgctaaagtgtatcctttggatgcagtatatgacaatcctgaagatgtcccggaagatgtgaaagctaacaaacgctatgctggagccacaaattggactgtacaggaagttgctgaatctgtcaagaaagattttggcactatcgacatacttgtgcactcgcttgctaatggaccagaggtcagcaaactattgtccgagacatctcggaaaggatatcttgctgccctgtctgcatcaagttactcttatatttctttactcaaacactttcttccaatcatgaacccagatggatctgcaatttctcttacatacattgcttcagaaaggatcattcctggatatggtggtggtatgagttctgcaaaagctgctttagaaagtgatacaagagtgcttgcttttgaagctggtagaaagaaaagaatcagagtcaatactatatctgcaggtccattgggaagccgtgcagcaaaagcaattggcttcattgacatgatgattgactattcgtttaccaatgcaccactgcagaaagaactacatgctgaggaggttggcaacactgctgctttcttgtcatcacccttggcatcagctatcacaggtgctgttatatatgttgacaatggtctaaacgccatgggggttggagttgacagtccaatatttaaagaacttgacattccaaaagagcatcattgaagtgcatagtatatctctacaccaactaaagatttatacggcctagtatgatgaaaaaaagctgaggaagttagtttttgcaatttcataaattagtaaacggttgtttgaactttgctaccattgattttcattaattactatccacttttcattatcctccaaaaaatgtatcttaaccatttgaagagttatttataccttgaggttaaattattttagttctt

SEQ ID NO: 2780 - DNA, 2136 bp, Glycine max
ccacgcgtccggacacgacctccgttggtagtcgcaattcggaacacagcctaaacacaaattcactgttcacagtgttcatctctctcctgcgcccttcctttgacttaacgagggaaccgaacaaacacaacttttatttatggctgtggcctaatttccttccttttccccaatcaaaattcaaaaccctaactatatccttcgattgattttttgttcattaatttgctgctagctattaaattgtgagagtcagagatgtcggaaaaattctcggcagcacttcggattggagatctcaacgatttcatcgctccttcgcaggcatgcatagtctccctcaaaggattgaaaaagaatgataactccggtttatcattctttttcaatcaggtcaagtttgaacctgttaaaatttcgcttaaggattgtttggcatgcagtggatgcgtcacatcagcagagacagttatgctggagaagcaaagtttggatgagtttctgaacaatattaattcaggaaaggccgtgattgtgtctctttctccccagtcaagggcttctattgcttttcattttggcatttctccaattcaggctttcaaaaagctgacaagattttttaaatccttgggagtgaaggcaatttttgatacaagttgtagtagagatttgacccttgtcgaatcttgtgtggagttcatcacaaggtatagacaaaatcaagtggttgaagatgagaggagtaaatcaagtctacctatgattgcatcagcttgcccaggttggatatgctatgctgaaaagcaacttggatcctttgttctaccttatatttcatcagtaaagagtccacagcaaacaattggagttatcataaagaactatgtgtgccaagaattaggactcaggccagaagaagtttaccatgtcaccgtgatgccttgttatgacaaaaagcttgaggctgctagggatgactttgttttccaatttgagtcccatgctgaagggcgtgagagtgaaattaacatgatttcagaggtagattcagtattgacaactggagaagttttggaattgattcagtcaaaagaagttgattttaaaagcctagatgagactactctggacaaaatactaacaaatattaatgaagatggatacctttatggggtcagtggaagctcaggtggttatgcggaaacaattttccgatatgctgctaaaacactttttggaagacagattgatggccctttgaccttcaaaaacatcaggaattcagattttcaggaagttactctggaggtggagggaaaaacagtgttgaaatttgctctctgttatggtttccggaacctgcagaacattgtacgaaaacttaaaactgggaaatgtgattatcatttcctagaaatcatggcatgcccttcaggttgcttaaatgggggaggtcaaattaaaccaagttcagggcaatctcctaaagaactaagtcagttgttagaatcagtttacatggaaaatgttttggtagcatcaccgtttgacaatcccatcgttaaaggcttatatgacaagtggcttgagcagcctggttctgtgaaagctgggagatacatgcacacacaatatcatcctgttgaaaaaagcattacttctcagttgcataattggtgaggtgttgaaactgaacttttcatattgtttcttctcaaggtcattttgtggtattaggcggaagagtactttaatccttttgctatggctccttgtggatatgtttgcatattggagtcgtccaattttggcgttgaacagatttttttgatgtatatagatccttgatctgcacccatatagatagaaagaatcacattttgtaatttaccatctggacctcggttttgttgttcctgcgggtcctctattatttttaggatctaggttctcaataaaatattccttcattacacgtgttggtgtgagtgaccgagtaggtgagaggacgagagtgacagtgacaattgttggagcacaattgtccgctttacatttatgcactcttaaatttgaatgaagcaacaaatatttctctgaaaaaaaaaaaaaaaaaaaaaaaaaaaaatt

SEQ ID NO: 2781 - DNA, 1500 bp, Glycine max
tcagctacgtaggcccccccccccatgtgagctaggcccaatagtcgtttcggttggtggttgagctgagcgcgagtgtctgagacttagccacgcatccccgaaaggccaccaaacaccgcttcaatttcaatttatacgtcaacgaagcaatttcagaagcagaagcataagcataagcgttcagttattaagtgtcggtgttgaacgttaaaacctaaaatggccggtaaagggacccattcagattcaaaagcagcaacaattgtgattaaggatctgagattcacataccccggcatcgacggccaccctccgccgggttccactcccctcattcaggatttcaatctcactctttcttccggccatcgctgcctcctcgtcggttccaacggcgccggaaagaccactctcctcaagatattaggagggaaacacttggtggagcctgacatggttcgcgtgctcggaagatcagcttttcacgacaccactctaatatcttctggtgatctctgttaccttggtggcgagtggaggcgagatgttgcttttgcgggttttgaggttccaatacaaatggacatatctgctcaaaaaatgatatttggtgtgcctgggattgatcctcaaagaagagccgagctaatcaaggtattagatatcgatctttcctggagattgcataaagtatctgatggtcaaagaagaagggtgcagatttgtatgggtctcctcaaaccattcaaggttcttcttctcgatgagataacagttgaccttgatgttctagcaagagctgaccttctgagatttctaagaaaggaatgtgacgagaggggtgccactattatctatgcaacacatatatttgacggcctcgaggattggccaacaaatattgtttatgtagcccatgggaagctgcaactagcaatgcctatggacaaagtcaaagaaattagcaaattatcactaatgagaacagtagaaagttggctgcggaaagaacgagatgaagatagaaagaaaaggaaagagagaaaagcagctggtcttcctgaatttggaaagcgagttgaggaaagccgtgtaacaggggatccagcgcgtgctgcagttcgagtaattaataatggttgggctgcaggacgattaacttccaccgttgctggtgaggaaaactttctcctgagctcaaaccgagtattgaggcagtagataaatttcaaatgctattgcctatgagcattttttctgtgtatttttataaacttcaaaacaaatttttttctccaatgctttctggcatatgtaattcgttgtgatatagaaatgatcacaacaggttatacacaaaatgtgagctaatgtatctgagtatctctactattgaaagtatcgtgtcacatgtggccttagtactgcaaatttgtgaccaatatatgagaataaagaaaagcactaacaaccttaaattctcttaaaaaaaaaaaa

SEQ ID NO: 2782 - DNA, 1448 bp, Glycine max
aaatcagaaacgaacgcactattttcaatttcaaagtccatcattctgaaaccaattccaccttcttcttttcgcgtcacaccatgaaacctcttctcggcttcgcaatcgcgttcctcctcctcctacattcctctcttgcttccgacatcccctaccccaaagcaatttccgatttgaaggatacaattgtgaagggatttgggtttacggcggaagatgatgttaagattacggggttcgatccgagagacgccgaggtagggcattccgtggagtaccaattcgacctccaaatcgatcacaaggttattcccttcaagcttctcgaagatgtgaaacgctgggattacgtggatcttcccattttccgggccgaggccccaactggcttggttcagaaacgggcttcggctgacgggcttcccgttttggctccgttcgttctcgctgggcccatggaactctggattcacgacgccaacgacatgagactctcccttccccatgacgtggatgctggcgtgttgaagaaagtggtgttggctgagggagcagcggttaccgtgaaaggtgcaagatccgttagtcttcgtcaacctcttgatttccctcttccgttaaaccgaacggagaatggttttgctaacggtcttttaacttgggctgagcatcttcgccatgcttctagaacccagagttctccgattctctcgctgcgaatcgttggtcccacatcgctcgcagccgcgccttcttccgacacgactacctcaacctcgttgaagctcaagcgtcttgcacctggtcttgtggaattgtcatcacccatgaagagcaaagagattgaaccattctctagtgttgatcttgagggtgaagcccccacggttcttactccgacccagtttgcgacattgtggcctcttgcttcgcttaatgggtcgaatgcaaacttgttggggtttgagaaactgttgcattctgtgttgggtgataaggctgagaagaaaggttcattcaggttgttgaaggctgatgtttctgctcagacttacgtgaaaattggttttaaggcggagaagaaggtgaaggaaggggaattggagggttactaccctgcgtggaggactaagcctgagactgttaccacgcactttgaggttctggctaaggttgatggggataaagttgtgccggagaaagttatgccggtgaaacctgttattgcggtggatagtgtggcggagaatttgctcactcggaatgcgtccatgtccaagacacaagttcatcctccacccgaccccttttacttgtaatttgtggaaaggaaaagggattattaaagagaagaggcaacattcttatttcacttttgattttggaatactgtatatacacaacaagatacatgtaaaattgtaagtcgaaaaaaaaaaaaaaaa

SEQ ID NO: 2783 - DNA, 2593 bp, Glycine max
  misc_feature (1468)..(1469): n is a, c, g, or t
ccacgcgtccgcttttgtgctgcgttccctcgtccctaagaatcttcatcaaaatcaaaggcaaaaacggaagaaaaaaaggacaaaaacaaacagagatcgcgtttttttgctccagagctggaagcaactgaaccccgtttgcttcgattgattaaagcctttcccattgctgaaagagatggttgcctttgggaagaagttgaaagacagacaaattcaagaatggcaaggatattacataaactacaaactcatgaagaaacgagtgaagcagtatgcccaacaaattcaacttggaacactagatcggcgacatgtactcaaggatttctcacgaatgctggataatcagattgagaagattgtccttttcctgctggagcaacaagggctcttggcgtgccagataacaaagcttggagaacagcgcgatgctcttcaggaggagcctgaaataagcaaaataattgaattacgagaagcttatagagcattgggacaagatctattaaagcttctcttttttgtggagatcaatgctattggtttgcgcaagatattgaagaagtttgataaacgctttggctatagattcacagattactatgtcaaaactcgtgcaaatcatccttactcccagctgcaacaagtgttcaagcatgtgggattgggagctgttgtgggagccttatctcgcaatcttcatgatcttcaagaccgtcaagggagctacttatcaatttatgatcagcctacgcttccccttcaggatccagtcgttgattcaataaatgcagctgttgataggttaaccaactcgacaaacttccttaactttttggggcagcatgcactcattatgcatgaagagctgcctagcccttctgaggaacatgttgatgatcaacgataccattttatgtctcttctcctgaacctggcaaacacatttttatatatggtcaatacatatattattgtcccaacagcagatgactattctatgagccttggggccgcgccaacagtttgtgggattgtgattggggcaatggctgttgcacaagtgttttcatcagtgtattttagtgcatggtcaaacaagtcatactttaggcctcttgtattcagtagcatagttctttttcttggaaatatcttgtatgcattggcatatgatgttagttcaatatggattctcttaattggtcggctgttatgtggattttggttctgccagagctgttaaccggcgttatatcagtgattgtgtgccattaaaaattcgcatgcaagcatcagcaggttttgttagtgctagtgctcttggaatggcttgtggtcctgcattagctggcatactgcaaattaattttaaaatttccaagcttacatttaatcagaacaccttgcctggggtgggtatatgggctggtgcttggctgatatatcttgatggggttgnnggatcacttttaaggaacccgctcgtgaagctgaagaggatcacacaccacatcaatcaaatgatgaagtaaacaatgcacttgaaaaaggcttaaaacaaccattgctgattagttcagagaataaggtagatgaagatgccgaccaagattgtgatgatagcgaagaagccccagaggagtctcgccagccagtgaattcaattgtaatggcatacagactccttacaccttctgtaaaggttcaattattgatatatttcatgctcaaatatgtaatggagattttgctatcggaatctagtgtcgttacaacatactacttcaactggtcaacaagcacagttgcagtttttcttgcttgccttggcctgacagttcttcctgtaaacattgttgttggaagctatataagcaacatgttccaggacaggcaaattctgttggcatcagaaattatggttctcataggtgttctactgagttttcaagtaatcattccatattctgagccacaatacatctgttcgggtctccttttatttgtttctgccgaagtacttgaaggtgtcaacttgtcactgctttcgcgagtaatgtcatcgaggctttctcgtggaacctacaacggtggacttttgtctacggaggctgggactcttgctagggtggttgctgatgcaactattacccttgccgggtacgttcgtcagagtatgctccttaatgtgaccctccttccttcactcttcatctgtgtaacttccatccttgcaacatgttttacgtacaattctttatattgatttgtctgaggctgagattgagatgaaaagaggagaatgctcttcagcaaaacctcagtctcttcaccacttggctctgtattctttcctacattcaatattttttatcattgaagttttcaatggctccatatagttggaaaagtagctaggctcaacatgtaggtaggccaaatgtgtatttctttatggtatggattcctcttttgtcattatcattttgctgtagagatgggttactttgttgtcttttgttaatagatccagaatgtatgaacgaaatgaaatgcttattattagaaaaaagcgtgccaaaaa

SEQ ID NO: 2784 - DNA, 1432 bp, Glycine max
cccggctgcgaggtggcgccccccgcccgaaattgaattcacacaagagatggcttctcctcttcttactccttacaagatgggcaaattcaatctgtcccatagagttgttttggcaccgctgaccagacagaggtcttacgacaacgtcccacaaccccatgccatcctctactactcccagagaacttccaacggaggccttctcattactgaagccactggcgtctctgacacggctcaaggctatccgcaaacccctggcatatggactaaagaccatgttcaagcttggaaacccattgtcgatgccgtccacgccaaaggcggtgttttcttctgtcagatttggcacgttggaagagtttcagattcagtttatcagccaaatggacaagcacccatatcttctacggacaagccactcacaccccaaattcgaagtaatggcattgatcaagtacaatttacccctccaaggagattaaggactgatgaaattccgcatattgtaaatgacttcagacttgctgcaaggaatgccatcgaagctggttttgatggggttgagatccatggggctcatggctacctgcttgagcaatttatgaaagataaagtgaatgaccgaacagacgaatatggtggatcccttgagaaccgctgccgatttgctttggaagttgttgaagctgttgttaatgagataggggcggacagagttggaattaggctatcgccattcgcagaatattcagagtctggagactctaatccaaaagaattggggctttacatgatgaatgccctcaataagtatggtattctttactgtcacatggtggaaccaagaatgaagactgttggagaaaaaactgaatgccctcatagcctggtgcctatgagaaaggccttcaatggcacttttatagccgcaggaggttatgaccgccaagatgggatcaacgctgtagctgaaaacagggctgatcttgttgcttatggccgttggttcttggctaatccagatttgccaaaaagatttgctctcaatgcccctctcaacaagtatcaccgggagacattctacacttctgatccggttcttggttatactgactacccctttcttgatgatgaagaatccaatgccgtagcatcctagggtagaacctccatttttaataaccttatcttcccctgcaaattcatatttgcaatttggttggtcggattttcattcgcgtgttctttacatgcttctcctgctatggttttggatcccccttacacattttctaaattgtaagggagtgtaatatgtagaactattattgttgtattaatatcactggatcctaataagtgttgggctaaaggcctaaagctatatatgcaccttatatttcaatttgcaataccaaaaaaaaaa

SEQ ID NO: 2785 - DNA, 1300 bp, Glycine max
  misc_feature (1164)..(1164): n is a, c, g, or t
  misc_feature (1167)..(1167): n is a, c, g, or t
  misc_feature (1176)..(1176): n is a, c, g, or t
  misc_feature (1183)..(1183): n is a, c, g, or t
  misc_feature (1199)..(1199): n is a, c, g, or t
  misc_feature (1220)..(1220): n is a, c, g, or t
  misc_feature (1222)..(1222): n is a, c, g, or t
  misc_feature (1227)..(1227): n is a, c, g, or t
  misc_feature (1243)..(1243): n is a, c, g, or t
  misc_feature (1270)..(1270): n is a, c, g, or t
  misc_feature (1275)..(1276): n is a, c, g, or t
  misc_feature (1290)..(1290): n is a, c, g, or t
  misc_feature (1299)..(1299): n is a, c, g, or t
ttttcccttaatgaattcttccttagtctaaaaaggtaaaaaatccaaggagagagatgacttgggtatccaagcaatgatatgaaaatataattatgacagttgtctgcttatccataggtccaacatcatttgcccctgtaattgacgcagcagttggcattgtggaaagaagtaatggtcaatatcatgttcttgtcattattgctgatggacaggtcactagaaattcagatacaccacatggaaagtttagtccacaagaacaagcaactattaattctatcattgctgcaagccactatcccctctcaattattttggttggagttggagatggaccatgggatgaaatgcagcactttgatgataacattactcaacgcttatttgataactttcagttcggcacgagcacaaagattacgtctgagaacaaagatgcatcaaagaaggaagcagcatttgcacttgctgcccttatggaaattccaattcagtaccggataacccaaaatctacaaatcgccaatgaaaatccaacaagtcatcaacgtaaaaggcctcttcctccgcctaaggaagtaatagatcgtgacaatgcagtcctagctgttccacacgtgccaaattttgaatcagttgagccatcagctccagctgcagtagaatcagtatgccctatttgcttaacaaatccgaaggacatggcttttggatgtggtcatacaacttgcaaggagtgtggtgtgacattatcttcatgccctatgtgccggcagggaaattacaactcgcctgagactttacacttgagttgggttggggatttctcgtctgctaacttaagatttatagtttatattgctgttattgcctgttgagaaggaatgtaatgactacctgttaaatttcccaattcttcagattaaaaataagatgttacattgtcatagaatattattgaaagtagagatatttcttatgatgttattagatatattttaagatatgaaaataaaataaaatctctaatttttgttattaaaaaaaaaaaaaaaaaaaaaaacccaaggggggcccggtaccaattcccccataatgaatcgtattacaatccactggccgtcttttacaactcgtgactgggaaaacctggcgttnccnacttaatcncctgcancactcccctttcccanctggcttataacaaaaagccncnccatnccctccacattgcccncctgaatgggaaatggcaattgtaacnttaanntttgttaaatcccnttaattttnt

SEQ ID NO: 2786 - DNA, 1400 bp, Glycine max
tcaaaatgtggaatgtgacaggttagtggactgagactttttttttttttttttctttttttgggtgaatctagtttgatcaagtcagattcagacaagaaaagagaaaaacagtacaattacctttcaaagaacatagtctcacgaggcaccaataagatttgagttgaacaaacgaaaaattatacatttgatacacaaatgaatagcatgtaaaattccgttatactttttgtgacttaaaattacaatacacagcatgactaagatttgacaaagactccctcaactatcatgtgaagattaactatgtagcaatgccttgtcatctcgtgttggcggtagaggcataactccgttctgattctcagcttctgaactagtagacggttttgcaccattagtaacaatatttttcaaccaagatgcttgaagtctaggggaccctcctctgtttgaattgtcaggggactctggaccatttttaacattattagtaacattattggtaactcctaagaggaaccggtatgctactttgcttgctgatacaatctcagttttagcttgccggaaccgtaatgctgtatttccagccacttccatggcagtatcaccagcattggcaaacctattcacccagcctggaagttttggtacaccaagcctttcacagaattcatcacaaaagtgattgcagtttttggacagcagatcatatgaactccctggccactctctactgagttctcttagtatttgatttaccttgaaaatggaacagtttgttttccctaaaacaatggattcacgatatgtatacattggattctttccagaagggcaactaaaaaccccagtaccttgctcacagaacccaaatgaccattcatcatctccaaaaacctgcacggcgctgtggaaaatgccaccaagaccaatcccatccttgaagatcttgttgatctgaacaatggtgttgttggttttctcggatccactattcgtcacatcgtatatatgcagtaccacatccgtcatctttccctttcacccaccaagacccaaactttaaacaacctcacttcacctttctctctctaaacgctattttcctatccgggtctctctctttctctctctatatgatttgattcagcttgaagattcaacaacgggtgttgttgttcctctctcttctcttttcgtaaattgaaccaagattcggccttgggatcccggaaaaccttccaatttcaccgtccaagtttttttctcgccggaatcgaaagattttcgtgtttctctcgtgaatttatattctaggaggagggaacaaaacgaggagagagagagtgttgtgtcatgtgcggggggcgcgcgtagctgatcgcagccgt

SEQ ID NO: 2787 - DNA, 1005 bp, Glycine max
cggttcggaatacctaagtgttatcagtgtcctacgagtgtagggctcagctcagccatattctatctccacgccgctaactctctctcacactcagtctctgtgtctctctctctttcacacccttcactttactctctctctctgacagctaaaatgcaaggaggaatgagatcatttttgtcacatgggaatgtcattagaaatgctgttctacaacgcgtgcgcatggtgaaccccctgctacagacaattgcctcttcgcggtttgaatctgttacgcctgctcgcattgaggagcatggttttgagagcaccacaatttcagacatcttgaatgataaaggcaagggtgctgatggctcctggctttggtgcaccacagatgatactgtttacgatgctgttaaatcaatgacccaaaacaatgttggagctttggttgttgtgaaatctgacgcgaataaggcaattgcaggaattattactgaaagagattacttaagaaagatcatcgtgcagggaagatcatccaagtctactaaggttggagatattatgactgaagagaacaaacttatcacagtcacccctgataccaaagttctgcaggctatgcaactgatgactgacaatagaatcaggcacatccccgtgattgatgaaaaagggatgattggcatggtgtccattggagatgtggttcgtgctgtggtgcgtgagcaccgacaagaggtcgagcgcttgaatgctttcatacaaggtggttattagataatgatgatgaaaaattctcaagggcactcaagctaatttgaattatgtaataagcttgagtgcttgtaaatatgttatggccacagagccttcttgtttgctttcctgtaatttcagttttatgggcattaacccgatggagtagcagcatgttaataataacaactggatgcagtttgaatttgttttgaatcatttttcactagtgagtgcatggacacagtttgc

SEQ ID NO: 2788 - DNA, 1064 bp, Glycine max
tcagctacgtaggccccccccccccattgtgagattttgaggaacaagtcaagtgttgtcagtgtcttacgagggtagggctcagctcagccatattctatctctacgccgctaactctctctcactctcgcgctctctctttcacaaccttcactttactctctctgacagctaaaatgcaaggaggatttcaatcatttttgtcacacgggaatgtcattagaaatgctgttctacaacgggtgcgcatggtgaaccccctgttacagccaattgtctcttcgcggtttgaatctgttacacctgctcgcattgaggagcatggttttgagagcaccacaatttcagacatcttgaatgataaaggcaagggtgctgatggctcctggctttggtgcaccacagatgataccgtttatgatgctgttaaatcgatgacccaaaacaatgttggagctttggttgttgtgaaatctgatgcgaataaggcaattgcagggattattactgaaagagattacttaagaaagatcatcgtgcagggaagatcatccaagtctaccaaggttggagatattatgactgaagagaacaaacttatcacagtcacccctgataccaaagttctacaggctatgcaactgatgactgataaaagaatcagacacatccctgtcatagatgaaaagggaatggttggcatggtgtccattggagatgtggttcgtgctgtggtgcgcgagcaccgacaagaggtggagcgcttgaatgctttcatacaagggggttattagatatgatgatgaaaatttctcaagggcactcaagctaatttggattatgtaataagcttgagtgcttgtaaatatgttatggccacagagccttcttgtttgctttcatgtaatttcagttttatggacattaacccagtggagtagcagcatgttaataataacaactggatgcagtttgaatttgttttgaatcatgtttcactagtgagtgcatggaatggacacagtttgcagaaaaaaaaaaaaaaaaaaaaaaagggcggccg

SEQ ID NO: 2789 - DNA, 1747 bp, Glycine max
cttccccaacgacactaggagcagctcccctggccccccccccaagaagaaattccgacaaaaagaacgatgccaaggcatgggtcaacactgtcaccgaatccttatccgaacgcatccacaacaaacactggcttcaggccctccaggtatttgatatgcttagagagcaaaccttttaccaacccaaagaagggacttacatgaaactcattgtgttgcttggaaaatctggtcaaccccaccgtgcccatcagctttttaccacaatgattgaagaaggtttagaacctactcctgaactgtacacagcgttgctcgctgcgtattgcaggagcaacatgattgatgaggcgttttcagttcttaatgagatgaagaagcttcctcgttgccagcctgatgttttcacttacagtaccttgatcaaagtttgtgtcgatgctttcaaatttgatttggttgagttgctgtatgaagaaatggctgaaaggtctatcatgccaaacacagtcactcagaacattgttttgggtggttatggcaaggcgggcatgtttgatcagatggagaaagtactgtccagcatgctgctgagcactacatgcaagcctgatgtttggacaatgaacacaatcatcagtgtttttggtaacatgggtcagattgatatgacggaaaaatggtatgaaaaattccgttattttgggatagaaccagagacgcgcacttttaatattttgataggtgcctatgggaagaaaagaatgtatgacaaaatgtcatctgttatggagtatatgcgtaagttgcaatttccgtggacgacctctacttacaacaatgtgattgaggcatttgctgatgcaggtgatgcgaagcacatggaatgtacatttgatcagatgcgtgctgagggtatgaaagcagataccaaaactttatgctgccttatcaatggttatgcaaatgctggtctcttccataaagtaattagcagtgttcgcttggcgggaaagcttgagatacctgagaatatcaccttttataatgcggtcttatctgcgtgtgcaaaggcagaggatttgatggaaatggagagagttttcaagcgtatgaaagatagccagtgtcagccagatgacacaacatacacgatcatgatcgaggcatatagaaaagagggtatgaatgacaagatatactatttggagcaggaaaagcagacgatgatgactgatgataaaaaagttagccagtttgagaatgaaatcttgatttgatttttgatttatagttcagactgctaatgcatctgtattctatacctccattttccgggagcggctgttaatttttgttttgacatggagtgaccagttgctgagttgtgctatcaaacttcatttttcacgatgaatgacagctagtcctgcctaacttctgtatgttgttcaagttaaatttatgttttagcatccatttgattcgcagaaaagaacttaacatctgcagcttttggtgtacagatttaatgaactgatagtagagtttattagtttatttttgtcaatttagagctcatgttatattgaagtgctgcctttcattcctgctgcttaccagccttgtctgaaggaggctatgtttgatgacaggattagaaagtgttgctagtgctccaaactatacatgggttcatgcttttgtaatgtacttaattataagatatctagatttcagtatt

SEQ ID NO: 2790 - DNA, 1101 bp, Glycine max
cgtcgtttgttcattcgtagcagtagatcagctacgtaggcccccccacatcatatcacttccctttggttttgttttgtgttttctattttaacacaacacaagcaccaactttctttttctctttcttttagggtccttcctcactctgaatccgccattgggctgcgatggcgaagaagcgaaagtcggtggcaacgcgccttgacgaagtggatcgaacgatgtactccactttctgcagcaccgccaactccctctctcatctctacacccacgccatgaaccaacaaaaactctcatttcaggccggtgaacgacacgctcttgagaaattgtatcaatggattctcaggcaacagcaagaaggatctagggtggccaccattgatattgttacccatttgcagaatgagcttgaatatggaggagaggaggcaccagtgtccccaaggcagccaatgcatcaacagaattcccagactgcaatgcacaacactaactttggtgcgtccataccctctaatgcatttggagcaactgtggcaggacaggggatacgtgctggacaacctgatcaacaaccaaagaactcagtgttctcaaatgcactctctagtcctattcgacgcagccttcagccatatcatttggcacaggggagctttccttcatgtaatatcatgtcttcaggaaatggaacccggaatagtgacatgacttatcctaatggccagaacagggacacaaattcttccaactccagtgattgcatggatatgcattcagatagtcctggtcatgatttttcatactgatgctgtcatagttagaacaaggaacaaaaaagaggtcatttatgaaatctgtggtcataaatgcgtggtgaaaaatgtcaaatttattgtggataaacttcaatttatttgtgtagcattgtcgtccagtttgaaagcttgaacatcagcttacatgttaaacagatagttcttgaaaaatgttggccatttcccaagcgatatatagtcatactagtgtgtgatgtttgcatgaaaaaaaaaaaaaaaaaaaactagataattttttcttgttaataaatca

SEQ ID NO: 2791 - DNA, 1243 bp, Glycine max
  misc_feature (9)..(9): n is a, c, g, or t
ggtgccggnaattcccggcgtcgacccacgcgtccgcgccacaattttattgaggtgttgtgattcgaaatcaaacggaaggcaacgccactgcaatctgttctaattagaaatagaaggttcatcatctcaaaaaggcttttgtgattctcgatttgatttggatcgcacagaacgaaggcatgggtcaagcttttcggaagctcttcgacaccttcttcggcaacaccgagatgcgggttgtgatgcttggtctagatgctgctggcaaaacaactatactgtacaagctccacattggagaagttttatctactgttcctacaataggttttaatgtggagaaggttcagtataagaatgttgttttcacggtttgggatgttggagggcaagagaaattaagggcactttggaggcactattttaacaacactgatggtttgatatatgttgttgatagtctggaccgcgaaaggatagggaaagcaaagcaggaatttcagacagtcataaatgatccgtttatgctccacagtatcatcttggtgtttgccaacaaacaggacctgaaaggagcaatgtcaccaagggaaatatgtgaaggattaggtctctttgatctcaagaatagaaagtggcacatacaaggcacttgtgctcttcggggagatggtctttatgagggtttggactggttgtccacaactttgaaggagagacgagctgctggatactcttcaataggactaggaacttcatccttctaattttcaagaggtattttggcaatggacgaatgtgttgagtgtgtggccagttctaagttgatgtgatcgataatcaaatattttttgggttacatctgaagctctcattagtagaaagttgcttcgcctttcagggtgctttagatatgtatgcgactttgctccaattatacaagtttgtgcatgacgaatgattaactaaattcttttgcgatattgatatcccttattaagtgcacttgtactggatagaagttaacggatactggatcacttgttcattctcccccgatttcccccatctcactctttgtagtatttctgcgtgtctttacctgtgatggtgactcataaaaataatgactctgacaaatgtgtcacgattctctcttcagaacgttttcttgtgatttaattcaattgggtgtttgcaattatttaaaacattaaaaacaaaaaaaaaaaaaaaaaaa

SEQ ID NO: 2792 - DNA, 975 bp, Glycine max
ggttaaatctttggattttggtcaaaaccgacccaaaacaccctactttcaattcaattcaaagtattgtttgtttttttgtttgtttggttcttacaccgagagaagatagttcttggaaggaaggaagaagccaaaaggcataatatacatcctgcatccggcattgggtcaagccttttcggaagctatttgacaccttctttggcaacaccgagatgagggttgtgatgcttggtctttgatgctgctggcaaaacaactatactttacaagcttcacattggagaagttttatccacttgttccttacaattggtttcaattgtggagaaagttcagtattaaaaatgttattttcacagtttgggatgttggaggacaagagaaactaaggccactttggaggcacttttttaacaacacagatggcctgatttatgttgttgatagcttggatcgtgagagaataggtaaagcaaagcaggaatttcagacaatcataaatgacccatttatgctcaatagtgtcatcttggtgtttgccaacaaacaagacctgagaggggcgatgacgccaatggaagtatgtgaaggactaggtctctttgatctaaagaatagaaaatggcacatacatggcacttgtgcactcaagggagatggtctttatgagggcctggactggttggcttcaacactgaaggaaagaaaagctgctggatactcttcaataggaacctcatccttctaatctaggtattttgtcattgaggaacgtgcagggtttggccagtttcattcaaggatgttgtaaaaaagtaatcaaattttttgagttacatttcgttacctctacagctgatgaattatatagatgctttgactttcaaggtgcttagatatgactttgcagtgtatagaagtttgggcatgatgaatgaaaatgaatttgagactcacgaattctattgg

SEQ ID NO: 2793 - DNA, 1893 bp, Glycine max
caatcacaactcaccacacaattcacaaccttcaaacatatttataagaataacaccaatggatactccaatgaccctcacgggcttgctccgcgacgtcgccgccaaattcccttcccgccgcgccatctccgtcgccggaaaattcgacctcacccactcccgcctccatcaactggttgaatccgccgccgcccgcttagtcgccgccggaatcaaacccggcgacgtcatcgctctcaccttccccaataccgtcgagtttgttgtcttgtttctagccgtcattcgagtgcgcgccacagccgcgccgttaaacgcggcttacacagccgaagagtttgagttttacttgtccgactccgagtccaagcttcttctaacatcagcagaaggaaacaactcagctcaagccgcagcttcaaaactcaacatccttcacagcacagcttcaataacccaagccgaagacaaagaagccgagctgagcctctcattaagccactccgagtcagagtcaattaactcggttgagtcactcggaaacgatccagatgacgtggcgcttttccttcacacctccggcaccacgagccgacccaagggagtgcctttgacgcaacacaacctgttctcttccgtgaacaacattaaatcggtgtaccgactcactgagtccgactcgacggtgatcgttcttcctttattccacgtgcacggtttgatcgcggggctcctgagttcgctcggcaccggggcggcggtggcgctgccggcggcggggagattctccgcctcgtcattctggaaggacatgattaaatacagcgccacgtggtacacagcggttcctacaatacaccagatcatactggaccgccactcgaacagccccgaaccggtttacccgcgcctccggttcattcgaagctgcagcgcgtcgctcgcaccggctattctgggtaaacttgaggaggccttcggtgcgccagtgctggaggcttacgcgatgacggaagcgtcgcatttgatggcttcgaaccctttgccgcaagatgggccccacaaggccgggtcggttgggaaacccgtgggtcaagaaatggttatattggacgaaacgggtcgggttcaagatgctgaagttagtggagaggtttgcattaggggtcctaatgttacgaagggatataaaaataacgtggatgccaatacggcggcgtttttgtttggttggtttcacaccggtgatgttgggtacttggattctgatgggtatttgcatctcgtgggtcggatcaaggagctcatcaaccgaggaggagaaaagatatcaccaatagaagtggatgctgtccttctttcacacccagacattgctcaggcagttgcttttggagtgcctgatccaaagtatggggaggagatatactgtgctgtaatcccaagagaaggatcagacattgatgatgcagagttgctaagatattgcaagaagaatcttgcatctttcaaagtccccaaaaaggtcttcattaccgattctttgcccaagactgccaccggaaagattttgcgtcgtcttgtggcagaacactttgtctctcaaatttgagcaactcaagtcctacatttgaagactctatacctggccatacatagttggagtccacacaccataaatttcaacagtagtttggcaacttggcatttaggaggaggatatttctgcaaatggtctttcatacaggatacagtatattgtagttttcaatgattcatgtgaaatgttcacagtgtaatgttttcaaggttttaaagatcttaaataatttctcaatcctttttttgtctaaaaaaaaaaaaaaaaaaaaaaaaaaaaaaaaaaggggg

SEQ ID NO: 2794 - DNA, 1409 bp, Glycine max
gaaagacttagtgtatttaactgatcccgtcttcagctacgtaggcccccccccccacaacttctctctctctctctatttacacttctcttctgtgtttcttagaagaattaagatggctaccttgactgtacctccagttcctccttcccccagagatgatgccatgcagctttaccgtgcttttaagggatttgggtgtgatacaagtgctgttatcaatatacttgctcatcgagatgctacacagcgtgcctacatccagcaagaatacaaagcaatgtattctgaggaactttccaagcgcttagcttcggagcttagtggaaagttagagactgcagttctgctctggttgcatgaccctgcaggacgtgatgcaacaatcattaggaagtctctaacagcagacaacaaaacccttgaaggtgctactgaagttatatgttcacgcactccatcgcagctacaatatttaaaacagatctatcattctatgtttggtgtttatcttgagcatgatattcaaacaaacaccagccccggcgatcatcaaaagctcttgcttgcatatataagcacacctcgtcatgagggccccgaggttaatagagaaattgctcagaaggatgcaaagggtctttacaaagcaggggagaagaaactgggaactgatgaaaagacttttatccacatattcagtgaacggagtgcggcgcatttggctgccgtcagttcttattaccatgacatgtatggtcattcactgaagaaggcagtaaagaatgaaacatctggggcctttgaacatgcacttttgacaataatccaatgtgctgttaatccaggaaagtattttgcaaaggtgttgcataaggcgatgaaaggcttggggactgatgattccacactcattagggtcgttgtgacaaggactgaggttgatatgcagtatatcaaagctgcatatttaaagaaacacaagaagactctgaacgatgaagtacactcagaaacatccagtcactacaggacttttcttctctcacttttgggccctaatcactagccaagatgttcaatgatgtaagtggaataaattcacccttgatgtgtaaatttgactgtttttagtgctttgtgatcaatgtagccgacaacttgtagaataaggcctttgttgttgttgttgttgttgtagtgctttgtgagtgttaatttatcagcctatagcacagatgaagatttgttgtgtattatttaagtatgcttaactattttcatttcttgtttcaacaaatcaaacattgacaatcaaatagaggttagagaagctactattttccattcaaccctaaaaaaaaaaaaaaaaaagcttttacttaataaaaaaaaaaaaaaaaaaaaag

SEQ ID NO: 2795 - DNA, 2322 bp, Glycine max
gaattccttctacgtactgccgtggtgctttcaccactgcttaccactaaccttcctctctctctctgccgctgcaagcttggtactctcaactcaattctccaccttattcttttcacttcttcagctcttgttttttcccaaatctactttcaaagtgcctgaattctgcaacagtaatattaacactcctctcttttgttcaggctttatttccccaatggccgcttgtggctatatatctgctgccaacttcaattatctcgttggcgccagaaacatatccaaattcgcttcttcagacgccacaatttcgttttcatttggcgggagcgactcaatgggtcttactttgcgacccgctccgattcgtgctcctaagaggaaccatttctctcccttgcgtgtcgtttgcgtcgattatcctcgaccggagctcgaaaacactgttaatttcgtcgaagctgcttacttgtcttccaccttccgtgcttctccgcgtccactaaaacccttgaacatcgttattgctggcgcaggattggctggtttatcaactgcaaaatatttggctgatgctgggcataaacctatattgctggaagcaagagacgttctaggtggaaaggttgctgcatggaaagacaaggatggagactggtatgagacaggtctacacatcttctttggggcttaccctaatgtacagaacttatttggagaacttggcattaatgatcggttacaatggaaggagcattctatgatttttgctatgccaaataagcctggagagtttagtcgatttgattttcccgatgtccttcccgccccattaaatggaatatgggcaatattgaggaacaatgagatgctgacctggccagagaaagtcaaatttgcaattgggcttctaccagctatgcttggtggacagccatatgttgaggctcaagatggtctttcagttcaagaatggatgaaaaagcagggcgtacctgagcgagtaactgatgaggtgttcatagcaatgtcgaaggcactaaacttcatcaatcctgatgaactttcaatgcaatgtatattgattgctttaaaccgatttcttcaggagaaacatggttctaagatggcctttttggatggcaatccccctgaaagactttgtatgccgatagttgatcatattcagtccttgggtggtgaagttcatctaaattcgcgcattcaaaaaattgagctaaatgatgatggaacggtgaagagcttcttactaaataatgggaaagtgatggaaggagatgcttatgtgtttgcaacacctgtggatattctgaagcttcttctaccagacaactggaaagggattccgtatttccagagactggataaattagttggagtcccagtcataaatgttcacatatggtttgacagaaaactgaagaacacatatgatcaccttctctttagcagaagtccccttctgagtgtatatgctgacatgtcagtaacttgcaaggagtattatagcccaaaccagtctatgttagagttggtttttgcaccagccgaagaatggatttcacgtagtgatgaagatattattcaagccacgatggctgagcttgccaaactcttccctaatgaaatttctgcagaccaaagcaaagcaaagattctcaagtaccatgttgttaaaacaccaaggtcggtttacaaaactgttccaaattgtgaaccttgtcgtcccttacaaagatctcctttagaaggtttctatttagctggagattacacaaaacaaaaatatttagcttcaatggaaggcgctgttctttctgggaagctttgtgcacaggctattgtacaggattctgagctactagctactcggggccagaaaagaatggctaaagcaagtgttgtgtaacaaaaacaagaattgaaagagtcatggtagagtacaggagcatcatttcaactttggcattctttgtctgtggtcaggactcaggagaccttcaactttattagttcatacgaataaagaaaggctcagcttctgaaatttagctcaccgtcgtcaactgtgtgcaataagctatacggaacaaacgacatgtgtcaacttaaagtcagcccattgttttgttatcctccaattttctggatcaatgtttgtattggaaagaaatatgtcattattcaaacttgtttatatccactttttttatttatcaacatttgtcacaacctttcgttgagtagcaaattattcccagaaaggcacattacatatatatatatgcattggatatt

SEQ ID NO: 2796 - DNA, 2555 bp, Glycine max
cccacgcgtccgtacggctgcgagaagacgacagaaggggaaagtaatgatgggtacatcgccattgcaatgctattgggtctgttgaaccaaccactttatttgaggagcatagcccaccttgagcagctgctagacttactggatgttatcattgacagtgctggaaacaagtcatctggcaaatccttgatacctactaacccatcatcagctccacaaatttctgctgcggaagccgatgcgaatgcagattctaacaatttaccttctgcggatgatgcatctaaagttgatggttcctccaaaccgacagtctctggcattaatgttgaatgtgagttacatggagtgttgagtaatcttccaaaagcagaactccggctcctgtgctcactgcttgctcaagaaggtttgtcagataatgcgtataatcttgtagcggaagtaatgaagaaattggtggccattgctccaacacattgtgagctttttgtcactgagctggcagaagcagttcaaaagttgacttcatctgcaatgaatgagttacgtgtctttagtgaagcaatgaaagctctgcttagtacctcttctactgatggagctgcaattttgagagtcttgcaagccttgagttcccttgtcaccttactgacggagaaagagaatgatagaggtactcctgctctttctgaggtttgggaaatcaattcagcattagaacccttgtggcatgagcttagttgttgcataagcaagatagaatcctactcagagtctgcatctgagttttcgacatcttctagtacctttgtgtctaaaccgtctggtgtaatgcctccacttccagctggctctcaaaatatcttaccatacattgaatctttctttgtggtttgtgagaaattgcatcctgctcagccaggtgctagtcacgactcaagtattcctgttatttcggatgttgagtatgccaccacatctgtaactccccagaaagcatctggaactgctgtgaaagtagatgagaaacatatgccctttgtccggttctcagagaagcacaggaagctactaaatgctttcataaggcaaaaccctggtttgcttgaaaaatctttctcactcatgctaaaggttccaagatttattgattttgataacaagcgtgcccacttccgatcaaaaattaagcatcagcatgaccatcaccatagtcccttgagaatatcagtaagaagggcatatgttctagaagattcttacaaccagcttcgcatgagatcaactcaagatttgaagggaaggttgactgtccacttccaaggggaggagggtattgatgcaggtgggcttacaagggaatggtggctcgtgctcgccccggttcggctcgagaaaggagcactgctttttactacagtgggcaatgaatcaacatttcagccaaaccctaactctgtttaccaaacagaacatttatcttatttcaaatttgttggtagagtggtcggtaaagcattatttgatggtcaactcttggatgttcattttactcggtcattctacaagcacattcttggagtcaaagttacatatcatgatattgaagccattgatcctgattatttcaaaaatttgaaatggatgcttgagaatgatatcagtgatgttctggatcttacttttagcattgacgcagatgaggaaaaattgatcttatatgaacgaacagaggtgactgattatgagttgattcccgggggacggaatatcaaagttactgaggagaacaagcatcaatatgttgatttggttgccgagcatcggttgacaactgctattcgacctcaaataaattatttcttagaagggttcattgaattgattcccagggagttgatatcgatattcaatgacaaagagctggaattgttgatcagtggacttcctgatattgatttggatgacttgagagcaaatacagaatattctggatatagtgctgcatcgccagttatccaatggttttgggaggttgttcaaggtttgagcaaagaagacaaagctcgactgttgcaatttgtgacaggcacatccaaggtgcctttggaaggctttagcgctcttcaaggaatttcaggctcccagaagtttcagatacacaaagcatatggaagtcctgatcacttgccttctgctcatacttgcttcaatcaattagatttgccggagtatccatctaaacaccatttggaagagaggttactgctggcaattcacgaagcaagtgagggttttggatttggttgagaagcttcagtgcggatgggacaaaatacaatgtattacatttttaggttaggacctattttaaaatggaattgagtggtacagggcagggggtcgaagtttttaagttcatatcatgttaatatgttgtacagtcgtatatttgcaatgggaaatgccattggcagtttttcaattcaacagttttacactgctaacaagccttgtttatttcagtaactcaggttagtggttttgcg

SEQ ID NO: 2797 - DNA, 1360 bp, Glycine max
  misc_feature (1309)..(1310): n is a, c, g, or t
  misc_feature (1357)..(1359): n is a, c, g, or t
tgaattcccggggcggcccaagccgtccgaccggttgcaaaaagagccagaagggttcctttcaaaaattaaccatcaccacgaccatcaccacagcccattaagaatatcagtaagaagagcgtatgttctagaagattcatataaccagcttcgcatgagatcaactcaagatttgaagggaaggttgactgttcatttccaaggggaagaaggtatcgatgctggtgggcttacaagggaatggtaccaactgttgtctagagttatttttgacaaaggagcactgctcttcactacagtaggcaatgaatcaacatttcagccaaaccctaactctgtttaccaaacagaacatctatcttatttcaaatttgttggtagagtggttggaaaagctttatttgatggtcagctcttggatgtccattttactcggtcattctacaagcacgtcctaggggccaaagttacgtatcatgatattgaagccattgatcctgactatttcagaaatttgaaatggatgcttgagaatgatatcagtgaaattttggatcttacttttagcattgatgctgatgaggaaaagttgattttgtatgagcggacagaggtgactgattatgagctgattcctggtggacggaatacgaaagttacggaggagaataagcaccaatatgttgatttggttgctgagcatcggttaaccactgccattcgacctcaaataaatgctttcttggaagggttcaatgaattaattcccagggagttaatatctatattcaatgacaaagagctggaattattgatcagtggacttcctgaaattgatttggatgacttgagagcaaatacagaatattctggatatagtggtgcgtcaccagttatccaatggttttgggaggttgttcaaggtttcagcaaagaagacaaagctagactgctgcagtttgtgactggcacatccaaggttcctttggagggttttagcgctcttcaaggaatttcaggtgcccagaggtttcagatacataaggcatatgggagttctgatcacttgccttctgctcatacttgtttcaatcaattagatttgccagagtatccatctaaacaacatttggaagagaggttactgcttgccattcatgaagcaaatgaaggattcggatttggttgacatgtttttttttcttttctttttgggggggccggggaggaaccaaactgtattacatttttacggtagaagctatttgcaagcttttcctggggttcacaagatttccgagtatgnnatgttaatgcgtcgacactataaatgtacaacggtagttccgccccnnnc

SEQ ID NO: 2798 - DNA, 690 bp, Glycine max
agttcatccattcagacaacagaaacaaagcttgctgatcttctagatagtacactctggaataggcggcttgcaccttcatctgaaagaattgtttatggcttggtacaacagatatttcatggcattagagaatatttcttggtttccacagaattaaagttcaattgtttccttttgatgcccattgtggacaaattgcctgctcttctccgggaagacctagaatctgcttttcaagatgacctggataatgtttttgacataaccaatctgcagcactcatttgggcagcaaaagagagagacagaaattgaactgaaaaggatcaagaggctcaaagagaaatttagaatgatacatgagcagctaattcaaaatcaaaccatgtgaatatgtgagctgctggaactgctgagtataattttcaaatgaaaaaggcatgaggtttatagatttatgatttttcattttcctatattcgtgcttacataatggcttattgtagaagaaggatgactagatgttcattatgaggactctttgctgtagttaactgaatattttttcctcaaagtctcaagtcagttcctgtgcttgtagaatagattgtgggttagaatttcttattattgaatgttacacatacaaatatctggttttcaagagtttcaagaataattttaagat

SEQ ID NO: 2799 - DNA, 1004 bp, Glycine max
caattgggtaccgggccccccctcgagtcgttacgtaggcccccccccccattgttgcttatacggacagttgttgcacctcctgataagtttggtgaaacactgcaagacgaacgaattaatccccctccatttattggtgctgatggtgttcagttccctcacaagctaatacctaatgcagggatgcgtctttatggtggtgcacaatatcatcgggcaatggctgaatttcgttttttggttggaggaatcaagtgtcccccaattactcgggaagaaattgtaaacgcatgtggagttgaagacattcatgatggaacaaactactctaggactgcttgtgtaattgctgttgcgaaggctcgtgacacatttgaaccttttcttcatcagttggggtccagactgttgtatatactcaagagattgcttccgatctctgtttttcttcttcagaaagatagtgaatatctaagtggccatgaggtgttcctcaggcgtgttgcctctgccttcaacaactttgcagaatctactgaaaaatcatgccgtgaaaaatgtatggaggacttggtaagcaccacaagatatgtttcatggtctctccacaataagagtcgggctgggttacgtcagttcttagattcatttggtggaacagaacattccaatgcttgtaataatcctacagcaactgttctatcacaaacaagtgcacatgagaaagaagacacaaagtcacaaccggatgtaaaactcagccatgtggcctctggcactgattctagttcatccattcagacaacagaaacaaagcttgctgatcttctagatagtacactctggaataggcggcttgcaccttcatctgaaagaattgtttatggcttggtacaacagatatttcatggcattagagaatatttcttggtttccacagagttaaaggtctctgatgtttcttttttgttcatttatgcttttttgtggttggtatgtga

SEQ ID NO: 2800 - DNA, 1913 bp, Glycine max
acattaaaaaaataaatttaatttcgataaacgctatcacacacagtgctacgtttcatcattcggcggtggttcgctatcggatccggattctggaagcaccgacacggtggcgctagttccgttcgttcgtttatttgttcgtttcggtgtttttttttctttttctttaacagtgattcgttcgatccagaaattggagtttgattgattggtacgatggcgtatcggcggagacagcagcaagggttttcgaagccttctttttcgactttcgaagaagaagcggcgactcggaaccctaacaatccctttccgcctccaaacgacgacgttgaaggttccgcttcgtcgtcgtcttcgtcttcgcttgctgccaaagctatcagagcttcttcggcgcgtcgcgactcttcgctttcctctctctacggtctctcctctgcttcttcttctccggtttctccttctcaacctactccaactcctcctccttcctccaaggattcaagaccctatgaatatacatctatgaagaacatgaatgagtccaagaatggattttggggtgttctggccagaaaagccaaatcaattattgaagatgataatataccccagcaatctgaaatgtctgggacggggaggtcccaatttcctggtgtagcatctaggagcaagttccaaaattcaaatcacttagaggagagcaatctcaaaagggacggtccagcatttataaagggattggatgctttcacatcttctcttactcatattggtggtaccatcggtaaatccttggaggaaggtttaacaattgttgagaatcggacttcagatatcattcaggaaactcgtaaacatattaggaagaagcctggaaactctgtaggacaaaatcaggagacaaaccattctactacagtgcatcaatcccaattgcggaaccagatgtcaccaaagcaaacagatcaagaacttcaactgaaggcatctcgcgacgttgcaatggcaatggctgccaaagccaaactactccttcgggagttgaagactgtcaaagctgatctggcttttgcaaaggatcgatgtgctcagctagaggaagaaaataaaatcctccgtgagaatcgtgaaaggggagatagccatgatgatgatgatttgatacgacttcaacttgaatctcttctggctgaaaaagctcgcctggcacacgagaactcagtttatgcccgcgagaatcgctttctaagggaggttgtcgagtatcaccaacttacaatgcaggatgttgtctactttgacgagagcaatgaggaagtcactgaagttaatcatcttaaccttcccccagtgcctaagatgtccctggattctattactccatcaacaacctccctttcactgtctccagaaccgaaccttggcatggcttcagaattaaccagaggcatctcatctaccatgcccggaaaggatgccaagatgaggtgactgtaaaggattcacggagttctgaagcgactagaagtatctcttctatcacaggacatgatgcaaaataacatgaaattcttctgttacaatttacaatggtgatgcaccgttttttgatacttcatttgttataatttatgtgctgctcgtttcatgtatcttgggtgacattaccttgatgtaattttataccgtatgttgtgtaactcgagttttatttatttatttattatttttcattaaaaaaaaaaaaaaaaaagataaccgctaccgtcggcatagcaatacttgtcaaaaaaaaagtttccgtatcattacagtcacttcttgttgactatttgtattcattttattctcactcttataccttcaatttttatttaataattgtattaataactttatttcag

SEQ ID NO: 2801 - DNA, 1578 bp, Glycine max
tcgagtcagctacgtagtgccccccccccccgaggaacaagttggttcagctacgtaggcccccccccccccccgaagaccaaccaacgaaaacggatgaggctgccatgccacgttttactaataattaatagtgaccaaagggtgtgcgtgatatggccatgtcataagattattgttcggatgagatatcggagcgagcaagtctaagatgaatcgtagcgaatcggagtgggcctttcagcagttcctacaggaagctgctgcttcttcttcctctaattctgatcatcatcatcttaaattcaaaaacgaattcaacatcaacatccctgttactactacttctattcaaaatattaatgttgattcccaagactaccatgctattcttaagaccaagcttaatctcgcatgcgctgctgttgctatgactcggggatctttggtcaaatctcaaaaccctgccactttctctgacagtggaccacaggcatctaattcttctgaagatggattgcaggctaccttaaaaggatctggcccttctggaaatgatccctctaaattacaaaataaagatgtcaaagcacaaattgggattccttcctcatcttccatgcaaaacaaacctgctgtcgcaatgaggccaacgataagtggatcatcaggagaacaatcagatgatgaggaagtggagggagagattaatatgactgaaaacatgactcctgttgatgcaaaacgagtaaggaggatgctttctaatagggagtcagccagacgctcaagaaggagaaagcaggctcatttaactgagctggagacacaggtctcccaattacgaagtgaaaattcttcgttgttaaagcgattcacggatgtgagccagaaatacaataatgctgcagttgacaacagagtactgaaagctgatgttgaaacattaagaacaaaggtgaagatggctgaagagacagtgaaaagaattactgggttgaacccaatgcttcatgccataactgagatgtcatcaatggcaatgccatcgtttgatgaaagtccttctgagacatcagctgatgctgctgtttctgtgcaagaagacccaaatcatcaccgttgtcaacccacttctaataatgggttgggaggcatttcttcaattgaaactgtgcagcagaatgttgcagcagtggtaggtggcaacaaaacggggagaacaacttccctgcatagagtggctagcttggaacatcttcagaagaggattcgtggtggtgcagattcacgtggacctccttctaatggagaacaataacatagtagttaaatttacattatgctttttatgaggaaactattctaaaactcttgtttctgctagttgtaagtaagagcaaattcttattgatgtatgtgaatcttattgagcatattctgctggataatcctatttttctttttttaaaaaaaaaaaaaaaactcctccaaatcttaattcatggctgatggggacaaaggagtgtaactagtgttggtagaggtcgccttatccaaattggatattgtttgctt

SEQ ID NO: 2802 - DNA, 1446 bp, Glycine max
gaggagatattgtatcaatactgggaggctgcatcatgatcttcataatcatcatcatcatggctcaagacaaagatgaaccggagcgaatccgaatgggcctttcatcagttactacagcaggaagctgcttcttcttcatctaattctgatcatgatgatgatcatcatcatgctacactcaagaaggaatccatcaccaacatacttgttactctacatgttgattcccacagactaccatgctattcttaagaccaagcttaatctcgcatgcgctgctgttgctatgactcggggatctttggtcaaatctcaaaaccctgacagtggaccacaggcatctaatttttctgaagttggatcgcatgctaccttaaaaggatctggcccttttggaaatgatgatccctctaaattacaaaataaagatatcaaagcacaaattgggattccttcctcaccttccatgcaaaacaaatccgctgtcgtcgcaatgaggccaacaataagtggatcatcaggagaacaatcagatgatgaggaagcggaaggagagattaatatgactggaaacatgactcctgttgatgcaaaacgagtaaggaggatgctttctaatagggagtcagccagacgctcaagaagaagaaagcaggctcatttaactgagctggagacacaggtctcccaattaagaagcgaaaattcttctttgttaaagcgcttcacggatgtgagccagaaatacagtaatgctgcagttgacaacagagtactgaaagctgatgttgaaacattaagagcaaaggtgaagatggctgaagagacagtgaaaagaattactgggttgagcccaatgctccatgccatgactgagatgtcatcactgggaatgccattgtttgatgaaagtccttctgagacatcagctgatgctgctgttccagtgcaagaagacccaaatcatcacctttgtcaacccacttctaataatgggttgggaggcatttcttcaattgaaactgtgcagcagaatgttgcagcagtggtaggtggcaacaaaatggggagaacaacttccctgcatagagtggctagcctggaacatcttcagaagcggattcgtggtggtgcagattcacgtggaactccttctaattgagaacaataacataatagctaaatttacattatgctttccatgagggaattattccaaaactcttgtttctgctagttgtaagtaagagcaaattcttgttgacttgttgtaaatcaatttgatgtatgtgaatcttattgagcatattctgctggataatcctatttttcaatttttttttaaaaaaaaaaaaaaacctcccatatcttaatacatggctgactgtgtaacctatattagttagatagatatgatggggacagtggagttcgccttatcta

SEQ ID NO: 2803 - DNA, 2064 bp, Glycine max
acaataattattacaaactcatgctacatgcttcgttcaagatggacaccgggtaccattaaatttaaacgggagttcctaatcatgatttttattcttccttttcagattcttaaacgctggaatatttggaaatggtactgaatcaagccataccctgccacacactgcaaccagagcagccatgttagtgagaatcaacactcttgttcaggggtactcaggcattagattcgaaatcttagaagccatcaccaagctcctgaacaacaacgttaccccatgtttgccacttcgtggtacaatcacagcttctggagatcttgttccactttcttacattgctggtttgctaactggcagacccaactccaaagctgttggaccttctggagaagtacttaacgcaaaagaagcttttgaattggctagcatcaactctgagttctttgaattgcaacccaaggaaggtcttgcccttgttaatggcactgctgttggttcgggattagctgctatgggactctttgaggctaatatactagctgtgttgtctgaagttctaccagctatttatgctgaagagatgcaggggaaacctgaattcactgaccatttgacacacaagctaaagcaccatcctggtcaaattgaggctgctgctattatggagcatatcttggatggaagttcctacatgaaagctgctaagaagttgcatgagattgatcccttgcaaaagccaaaacaagatagatatgcccttagaacttcaccacagtggcttggtcctcttattgaagtgattcgtttctcaaccaagtcaattgagagagagatcaactctgtgaatgacaaccctttgattgatgtttcaaggaacaaggcattgcatggtggcaatttccaaggaacccctattggagtctctatggacaacacacgtttggcacttgcatctattggcaaactcatgtttgctcaattctctgagcttgtcaatgacttttacaacaatggattgccttcaaatctcactgctagcagaaatccaagcttggactatggtttcaagggagctgaaattgccatggcttcttactgctctgaactccaatatcttgcaaatccagtaactacccatgtccaaagtgctgagcaacacaaccaggatgtcaactctttgggcttgatctcatctagaaagacaaatgaagccatcgagatccttaagctcatgtcttccacattcttgattgcactttgccaagcaattgacttgaggcatttagaggagaatttgaaaaactcggtcaagaacaccgtgagccaagtttccaaaaggattcttaccacaggtgtcaatggagaactccatccttcaagattttgtgagaaggatctgctaaaagtggttgatagggagtatatattttcctacattgatgacccctgcagtgctacatacccattgatgcaaaaacttaggcaagtgcttgtagatcatgcattggtaaatgcagagagtgagaaggatgtgaactcgtccatctttcaaaagatagcaatctttgaggaagagttgaagaatctcttgccaaaagaggttgaaagtgcaagggctgcttatgagagtggcaaagctgcaattccaaacaagatccaagaatgcagatcttacccactgtacaagtttgtgagagaggaattagggactgggttgctaactggagaaaaggtgaggtcaccaggtgaagagtttgacaaattattcacagcaatgtgccaagggaaaattattgatcctcttatggagtgccttggggagtggaatggagctcctcttccaatctcttaaatttattgtaactcttaacaaatattttatttgtacctatgcaagaaaaaccataatcatttggtttgtctatcatttaacaaatcagtttgaaaagcctaatttcaatgttccttcaatgtcaaataggaccttgtaattttaatattttaatggaatttcagttgtttgcagaagctttggttctattattattcacatgttct

SEQ ID NO: 2804 - DNA, 1441 bp, Glycine max
atagtgcatatcactttcttagtctaactccattatttgatgtgcatgctctcgcattcatacctgtttccgacacatacacctcaccaccaccactgcgttttaaagttgggcttctcctaccagaaggatagggcacaatgattcaaagaattgtgtactttcccagtttaaggaaattgcttcttcgggctggttctaattctgcttcgtccaagatcggaacgaacaattgctttgcttctcagccctcccctcttcggagtcacagtgatgacgagtatgctgatgtggactgggacagtcttggatttggactgatgaccactgattatatgtacattactaaatgttgtgagggccaaaattttggacaaggacaactcagtcgttatgggaacattgaactcagtccatcagctggggtcctaaattatggtcagggattattcgaaggcacgaaagcatacagaaaagaaaatgggggcttgctactcttccgtccagaagaaaatgccattcgcatgaagattggagccgaaagaatgtgcatggcatccccttccattgataattttgttgatgctttgaagcaaactgtattggctaataagcgttgggttcctccaccgggcaaaggatccttgtaccttaggcctctgctcctaggaactggtccagttttgggtttggctcctgcacctcaatacacattcctcatatttgcttcccctgttcgtaactatttcaaggagggctctgctccactcaacttgtacgtggaggagaactttgaccgtgcttctagccgcggcactggaaacgttaaaaccatttccaattatgcaccggtcttgatggcacaaattcaagccaagaaaagaggattttcggatgtgctataccttgattcagccacaaagaaaaatctggaggaggtctcttcttgtaacatttttattgccaagggcaaatgcatctcaacacctgctaccaatggaactattctttccggaattactcgaaaaagtgtcattgaaattgctcgtgatcatggctatcaggtagaagagcgtgttgttaacgtggatgaattaattgaggctgatgaagttttctgcacaggaactgcggtcggtgttgctccagtagggagtatcacataccaggataaaaggatggaatatataacaggttctggaaccatttgtcaagagttgaacaatacgatttcaggaattcaaacgggtactattgaagataagaagggatggattgttgaagttgattaacaacgcgtgtttataattgtttattccaatgttattaaacaaattttaaactataatgattgtctatacctaaagtgaatgaaatactgtgttgttcgttatctaaatgcatgttatatatgtaaaatgttatgcacattatataaagc

SEQ ID NO: 2805 - DNA, 1797 bp, Glycine max
tcagctacgtaggcccccccccccgtttttgagccaatgagtgtcggctcttggttttctcagaccaaactgaaaaaaacgtttgtacttaatctccctcagtttcacaaaactgacaccataattcgtttactttagtaactgaaaaattaagagccaattcagtattctccctccacagatacaaccattttttttcctccaaacactgtctcagaaacagacttgttaaccattggtagttacattctgtttctacacccttttttataagccatcatcacccttccactggctttcattaacaaaccttcttcaaagtcccaccacttggttttcataacccattctccatctcagaatggagaatgcgagaataagccagtggttgatccttctggtgtgtgcgctgctgttgctgatatcagaagcttcttatgtgccaatcactattgttcagaacgcggtagcaaaaggagctgtttgtttggatgggagtccaccagcttatcattttgataggggatttggatcagggattaacaattggttggttgcatttgagggaggaggatggtgcaacaatgtcactacttgccttgctcgcaagaccaatcgtttaggttcatctaagcaaatggccaagctaattgccttttcaggaattttgaataacagggaaatgtttaatccagatttctacaactggaacagaatcaaggttaggtattgtgatggttcatcatttactggtgatgtggaagcagtgaatccagtgactaagttgcacttcagaggaggtaggattttcaatgctgtcatggaggatttactagcaaaaggaatgaaaaatgctcgaaatgctattatctcgggatgttcagctggaggattaacatcagtactgcattgtgatcgatttcgagctctattacctaggggagctagagtgaaatgcctctcagatgctggttactttatcaatgcaaaggatgttttgggagaacaacacattgagcagtatttcagtcaagttgttgtcacacatggctctgccaggagtttgcctcaatcatgcacttcaagacttagcgcaaaactctgctttttcccacaatatttggtgtcacgcattactacaccaatcttctttgtaaacgcggcatacgactcatggcagattaagaacattttggcaccgggtgttgctgatcctgaaggccattggcatagctgcaagcttgatataaacaactgctcacctgatcaactcgatctaatgcaaggcttcaggacagaatttttaagggctataactgtgcttggcaactcttcatctaaaggaatgttcatagactcttgctatgcccactgccaaactgaaatgcaggagacatggttgagaagtgactctccagagctgaaaaagacaacaattgcaaaggctgtagcagattggttttatgaaagaagacctttccatcagatagattgcccttacccttgcaaccccacttgtcacaaccgcgttttcgatccacaagaagaccacccaggagtatagatattcatttcatcaaaatttagcacacatttaatatttccatcattcttataaaaccacaatttattggttaacatgtgatagaataagaaaaaattatcatttctatttttattagaccatcaaaattataaggaaatgccgccactgcactgaacttgtgtgctgggaccatcaccaccattgtttaatgtcacttattcttaataaaaaagaaaaaaaaaaaaaaaaaa

SEQ ID NO: 2806 - DNA, 1235 bp, Glycine max
gtcttgacggtcccattttcaccccattgtgcaaattgaaagtagtagggaacccctactatagctactacatcatcacaatgacgtcaccttaacgtctctcgtgttgacacgtagctcagtgaggctatttcgctgcatcctccaagaaggtgtttggaaggatccttcccaccccatgccaaaagcaagcatattaattaaaaaaaatagaaaaaaataaaacacaattttattttattataggatatttattagttatttattggatataagtggcagcatgctttagtcctaggcgtgataaaaggccaaagactcttaggtttttggctctttgcagaatctttgagtgacacatacctagctatcacctcaatggattactattttggaaaccttaatcctaacccttattaccatcactctgccgtagtgaacatggcatctccctcctccgagttcatgttatctgattatctcgtgttggaagatgctcttgttgttgatcatcatcaagagtcttggtcacaaagcactgaaactgaatcatcggagaaagcaacctccagcgatgcaagtcatgggttcggtgatgcaacctccaccaacaccaacatgcatataaagtgccaaaatagtgggattaagggaaagaatgcagaagtgagtcaaaggataacgtttagaaccagatcgcaacttgaggttatggatgatggatataaatggaggaaatacgggaagaaaacagtgaagagcagtcccaacccacggaactactacaagtgttcaggtgaaggatgcgatgtgaagaaaagggtggaaagggatagggatgactccaactatgtgttaacaacgtacgacggtgtccacaatcatcagaccccgtctactgcctactacagccaaatgcccttgctgcattctaatcatgattgggccctccacccttctgcaaactcataatatcctccttaatatagtaatatccagagataggagaatcaacttatacttttaggattactttttatctttattatttattttttataagagattttaaaaaataaataatgagaatagagaataattttaaaagaaatattgttgatgtaagttaatctctactctgtatatatatatagttattgactcatttagtatattgcctgtcaataaccattattacatgtatattgattattatgcaaatcccagtccacgct

SEQ ID NO: 2807 - DNA, 1579 bp, Glycine max
cgtcggaagctcccctctctaagtggcggcgacggcgggcgtgcacggcggtggttcaccttctacactcctctcatctcgaaactctccaggacatgtgaaacttgtcaaaatcaggatgagcaatgacatatttgatagacagttgttaccagagaagttgttgaaactcaacaattcacaacaaagcgttgaatcactttcccattggtgtatttctcaccggaagagagcaaaagaagtagttgaaacttgggataaattgttcaatgcttcccagaaagagcagcgtgtctcttttctatacttggctaatgacatattgcaaaatagtaggcgaaagggcagtgagtttgtcaatgaattctggaaagttcttccagcagctctcaggcatgtctatgaaagtggtgatgaagatggaaggaaagcagtgaccagactagttgacatatgggaagagaggaaggtttttggttcacgaggtcaaggtcttaaggatgatgtaatgggcaagaatccccttccatctgctagcaatggaaagagttcaaattctatcaagatagtgaagagggatgcccactcagtgagaataaaactggctgttgggggtttgccagagaaaatactaacagcatttcagcccattcttgatcaacacaatatgtccaatcaactggtttgatggctgggggaattccttatggatacagatcaaatagcctaccacctccacctccacctcctttgccgccacacatggcaataggtttatcaatgcctggcactcaaccagcacagcagcaacagcagtctccaccgggattttacaggccacctggcatagggttttatgggaaaagccacccatcaacaccaccaccagtacctaggcagtgagcattatttcaagatcatctgactactttgttgcaaaaccttcttgtagcatgttcctctgggaaattgctgtgaaagttgaggattttccagcaggggctgtgtaataatgtgaattgttagagaattagatgtgggcagaattcatctgtagccttgtacaaccctgcctttttatttttatttttattttgcctactgcctaaactcgaagtggtaggttttgacatcatactgatacttgagatctacttcagcagtgtcaactgttaaaagaaagcacctccttggcccttaactaattattctgaaacatcacgaagcccttgttatggtgcatgtggacatcttgtttctatgaagctgtctgtggagataaacattagcagatcgtgttattccccctcttgatgaattttcagagcttcaccttgctcacaatctcggaggttgggtgttaatgtagattaataccaactgacaaaatgttgatatttttgacgttgcctgctagtgtctgggtggtgtgttaggatctttattcatgcaagagaaatgcactgtaatacactcttttaatattctctgtatgataccctctgccttattaggtgaaattcatgtgaatctgcctgaatatgttagtcaattttccatttcgtggatcccctttttt

SEQ ID NO: 2808 - DNA, 1265 bp, Glycine max
gtaccagtcaccccctcgagtcagctacgtagcccccggccgccggtcaactagcacacttccctattcttaaaggggttcaggatctcaaggtacctgccaaggaacaaaagtctgtcaagttcaacttgccagaggaggatgaatttgatgccagtgatgatggttatgatgaggatggattaggccatggacatccaatgcagaacaagatcatgcccatgatgattaatcacaaccataaagacaattctggtgggagtaggaatattaatggaagtgttaagaaagctgacgtcattgatcaggcaatgctgttcaagggcaaaggtggaaatttcgatgaggcagaagctgacaatgatggaggaaagaaaggtagtagtagccaaaaagatgaaatcaagaagggggatttggataagcctaaggcagtcggtgaggtagattttcataagaaaaagaatgggaaaagtgagaatggattacttggtcggtttctaggctttgggaaaaagagcaagaaaggagaattagaagaaacaacttataccaataagagcaagaaccaaaacagtggtgctgaaaataagaaaggcaaggaagggaaattggaggatcatggtaacaatgactttgattttcatgattacgatgatacccctcctcatcccaaaaatggcaaaagtggtaagggtagtaacaatgtcaaagaaggccagatgggcccgggcccaataatgggtaataatcttccaatgcgtcatcagatggagaatattcaagcagtacaaggacttccggcgatgaatggtgatggtggctattatcaaggggtgcaaatgcaacatgctccatacaataaccttcagcagcactacatgggtatgatgatgaaccagcatcaacatcagcaagcaaatatgaacaacaacatgtacccaacacccatgatgtatggtaggccgcatccatctatgaactacatgccaccacctcctatgccatctcacccaattgccgatcctattactcataccttcagtgatgagaatgttgagagctgcagtatcatgtaattaattaattaattactagtgacaacttgcttttctgctctatgattcggtctttagggagttcattaaattttgtgtaggacggaaaatgtgggatgtttaggattatattattatattatatataaataaatagtatattgtttgctcaaaaaaaaaaaaaaaaagaaaaaaaaaaaaaaaaaa

SEQ ID NO: 2809 - DNA, 917 bp, Glycine max
gaaaaatctaagactatttgaagccacgcgcgcttctctctcgagcgtgatcgtgatccgttcccttccaattttaccaaaatattaaagaaaaaacaaaatatactatttcatttccgtcccctttcattctaatacattccaatgtttcccagtgccggcgttcccaagaagcggcaacgcaccaccgccgccaaccgttcctcctccacagttggcaccatctcctccctctccgacgtaaccctaatcgaaatctcccaaaaccctcgaccttcctctcccatgaccgacgaccgcccctctcccgcggcggaagacgctctccattataacgacgcttccaccgccgacgtcgtcctccgcctcttcatcgacgctccctctccgctcgattccgtttccaactccgaccaccacgtctacctccactccgacgtcctccgccgctccaaatacttctccgcgctcctctccgaccggtggatcggccacgtcgcgccggagctctcgtcctcctcctcctgcaaccgcgaccgcgacctcgacctcttccgcctcaacctcggtgtggctcccaccggcggctcgatccaatcgcatctcaccgtcctggagcttctctacacgaacgacttcgccgcggcggtggactgcgcgtcgacggcgctggatctgttaccggtggcgctggagctccttttcgaagattgcgtgcgctggtgcgtggatttcctcgaggcggtgccgtggacggaggaccaagagaagcgagtggtgagattaatccctttccttagagaggaagagtcgaaggaactcgtggctagggtttggccttcgggaagaggactcatgcgaagcgatgctgcaaggattgatttcctcggcgatgaacagttacggcaacacggcgt

SEQ ID NO: 2810 - DNA, 1125 bp, Glycine max
ttcccgggtcgacccacgcgtccgtacggctgcgagaagagacagaggggaaggaactcgtggctagggtttggccttcgggagaggactcatgcgaagcgatgctgcaaggattgatttcctcggcgatgaacagttacggcaacacggcgttcgtgaaggctttcgtagggaagattcttcggcacccgtccgcgagggagacggcgaagagagtgttagagaaggcgttcgcgatgagcttgaagacggtgaaggagtcgttggaggattactcgagtccggtgttcagaggggatcacaatgagacggaggctattcagaggctgaatctgcataaggcttccaccaatgggaagcatcttctgtggcttgtggagaggatgattgagcttagggttgccgatgtcgccgtcagggaatggagcgagcaagctggcttcactgctgatttgcagagggcgtttcgtgatgatgcgtggaggaacattgtgcctggccttcctgctgttattctcaggtgtacgtgtaggctcgccaacgctgtctctgctggcaccattctcgcttctagacaggtgagaaggaagcttgtagaagattggttgccggttttggttgtatgcaaagataatgtttcaccaatatcacccagcaacaaatcgttgtatctggaactggaagaaacattcttgcgaatcatctccacattgcctatgtcagatgctcaagaattgttgcagcagtgcctcagcttttcaacccgaaatgttgaagattgtcctcatttggttactgcattcaacacctggttccgccgagcagcccgacccctcaaaccagattctctctttgatcaatgagatgtctgttcgttctgttgcgcctttcttgggtcgcatattgtcaaatattgtgcatatgtaaatactatgttcagaaagtttaagtttaacattgtacatataaatcgaaactaagtcttgtcttctaggacaaaccagccaaaatacagtccttgtcttgaggcctataatgggttccttggaatgcaagattttcagttttaagttttaagccaaaaaaaaaaaaaaaaaaaaaaaaaaaagcggccgctttagagga

SEQ ID NO: 2811 - DNA, 2117 bp, Glycine max
cacctgatgtggatctgaaaatacggaaagaaaagtctagactagttgaagaaagaaacgcttgtctttccctccgtcctcagtctggagcatcatcatgatccgttcccttccaatttaccccaaaaattaaaatatactatttcattccaatgtttcccaagaagcggcaacgcaccaccgcagcctgccgttcctcctccacactcgccaccatctcttccctctccgacgtaaccctaaccgaaatctcccataaccctcgaccttcctctcccatgcccgacgaccgtccctcccccgcggcggaagacgctctccattataacgacgccgccactgccgacgtcgtcctccgcctcttcatcgacgcttcctctccgctctattccgccaccgccgactccgtttccaactccgacctccacgtctacctccattccgacgtcctccgccgctccaaatacttctccgccctcctctccgaccggtggatcggccacgtccactcgccggagcactcatcctcctccaaccgcgatctcttccgcctcaacctcggcgtggctcccgccgccggctcgatccagttgcatctcatcgtcctggagcttctctacacgaacgacttcgccgccgcggtggacagcgcgtcgacggcgctggatctgttaccggtggcactggaactcctcttcgaggagtgcgtgcgctggtgcgtggatttcctcgaggcggtgccgtggacggaggaggaagagaagcgagtagtgagattaatccccttccttagcgagaaagagtcgaaggagctggtggctagggtttggccttcgggagaggactcatgcgaagcgatgctgcaaggattgatttcctcggcgatgaacagttacggcaacactgcgttcgtgaaggctttcgtagggaagattcttcgggatctgtcgtcgagggagacggcgaagagagtgttggagaaggcgttcaggaagagcttgaagacggtgaaggagtcgttggaggattattcgagtccagtgttcagaggggatcagaacgagacggaggctattcagaggctgaatctgcataaggcatcaacaaatgggaagcatcttctgtggctggtggagaggatgatcgagcttagggttgccgatgtggccgtcagggaatggagcgagcaagctggcttcactgctgatttgcagagggcgtttggtgatgatgcatggaggaacattgtgcctggccttcctgctgttattctcaggtgtacatgtaggctcgccaatgctgtctctgctggcaccattctcgcctctagacaggtcagaaggaagctcgtacaagattggctcccggtactgcttgtatgcaaagataatgtttcacccagcaacaaatcattgcatctggaactggaacaaaccttcttgcgaatcatctccacattgcccatgtcagatgctcaagaattgctgcagcgctgcctcagcttttcaacccgaaatgttgaagattgtcctcatttggtcactgcattcaacacctggttccgccgtgcggcccgacccctcaaaccatattctctctttgatcaatgacatgtctgttctgtttggttcgcgtgttgtcaaatattgttcatatgtaaatactatgttcagaaagtttaactttgtacatataaatcgaaactaaatgtcttgtcttgtagggatcaaaccagccaaaatacgtagttcttgtcttgaggccaatggctaatgggttccttggaatgcaagattttcagttctaaagttttggttcgccgttgcatgatttgcgggtgaaacgctgcttaagaaattttggctcaaaataaagataccagccttgatttgacctgctgcaaaaaaaaaaaaaaaaaatcgtcacttgaagtacaattacaatgtttcaaatttacgaatttaatatggttttaatattttttattttaaatttgaactactttccaaaaaacttagctcaattactattattattatttgcctttgcgtatatgaaacttcagtcataacttaaactattgtttgaagaacttatttatgattcaggatattcat

SEQ ID NO: 2812 - DNA, 1707 bp, Glycine max
cattttccttaggaacattctaattgggaaaattcatctctgatccaaacgaagtaacgaaccaaccaatcaccctgtctttctgacccaaaaacatagtcccaaatcgaacaaaatcaatcaactaactcctccaacgttgttgttattatgcagacaacaagttccaacacctccggcgccacctcgatccgttccggcatggagctcttccaccgcgcgaaggcggtgcgcctccgcagccaccacgacaagtacctcctggccgacgaggacgaggagtccgtcacgcaagaccgcaacggatcctcccgcaacgccaagtggacggtggagctcatcccggagttcgacaacatcatcagactcaagagctgttacggaaaatacttgacggcgtccaaccagccgttactgctcggcgtgacggggcgcaaggtggtgcagagcttgccgcggcggctcgactcctccgtggagtgggagcccgtgcgcgacggcgcgcaggtcaagctcaagacccgttacgggaactttctgagagcgaacggtggggtcccaccttggaggaactccgtgacgcacgatatcccgcataggaccgccacacaggattggatcctgtgggatgtggatgttctcgagattcatgtggtgtcccctgctccgcctccgattccgcactccgattcgcttgatttcgaatcgaatactccttctgctgttaacatcaaatctactaccttctccagacaagagtcgacggattcgaatgtgggttcgccgccaaagaagatggaggggaggactatatactaccacgttgcagaagataatggggatgtggatgatgagaatgtgcagggttattctttgaatttcaaagggaatggggttgagcagttagctcgaaagtttgaggaagagactgggcttgagggagttattgtgtgcactcgaagtcctttgaatggaaaactctaccctcttcgcttgcagcttcctccaaacaatgtcaccatgcaggttgttttggttcttccctcatctaaagtggcaagagaatttgaggagcaaggtatactatgacaagctacattattgttggagtcttgaatctactgaaatgcaaggcctatgtacgttgtgatccaagcgtgtttcaaattttatgtgatagcatttaacaatatgttgcaaaactccacctatttcaagtgagtccattgcatttataaggcagagttcaccaaggtccaatggaggtaacttaaagtttccatggcaaggttcatatcagcaatatcctctattaagtggtgtggaagggttgtagatgattctgatggagatgaaagtctttgttaggcttcctatttattagtgctatagctttaatctttagcctattcttgtggattcagatatttgttgtttctttctctgttggtaattttctgtttttcatgtttttttaaggtgtatcatttgtatagacaacttttatcagaaaactagaggtatattttttattcatatataaatttaaggtattagaagcattttttaatcagataattttttgcctcatttgtttgtatctaatcaagtgatcacatcgaatgattttttttttgttaaaaaaaaaaaaaaaaaaaaaaaaaaaaaaaaaagaaaaaaaaaaaaaaaaaagcttatcgataccgt

SEQ ID NO: 2813 - DNA, 1476 bp, Glycine max
tcgcgtggctgcctacgtaggcccccccccaaaaaaaccaaataccacaatcaaacctcttctttcaggtccaattcactcgcttattcttttctttccatacacatgcagacaataagttcgaacaagttcaggactggcatggacttctttcaccgcgcgaaggcggtgcgcctccgcagccaccacgacaagtacctcctcgcggaggacgacgaggattcggtgacgcaggaccgcaaaggctcctcgaaaagcgcgcggtggacggtagaatacgtggctgaatacgataacataattcgcctgaagagctgttacggcaagtacctcaccgcctccaaccaccgcttcctcttgggcatgaccggccaccaggtcctccagacgcttccttcgaggctagactcttctgttgagtgggagcccgtcaaggaaggagggcgcgtgaagctcaagactcgttacgggaattttctcagagctaacggcgggttgccgccgtggagaaactccgttacgcatgatattccgcacaggaccgccacgcaggattggatcctatgggacgtggatgttgttgagatttatgtgaactctcccgcgagtcatgatagaccctccgctccgccgttgccggttgaggactctgttcccatactaacgagcgcacaggtgccgccgccgccaactgtttctgctagcttttcaaggcaacagtccaatgatttgtcacctaaggtggaagggagaactatatactaccatattgctgaagacaatggagaggtgttggatgaaggcgtgcaggggtattctttgattttcaaagggaatggagttgaagaattgactcgaaagtttgaggaagaaacagggctagagggaatcattgtgtgtaatcggagtccattgaatggaaagctttatcctcttcgcttgcagcttcctccaaacactgtcaccatgcgggttgttttggttcttcccttgtcaaatttggcaagagactttgaggaacaaggcttactgtgagaagccttagagttttccaacgaagacctatgtatatgtactgatcgaagccagttcagaatttaggaattaatgtgttctagtccattgcatttattaagcagagttcatcgtggtcctgtgtgggaagcttagcgttgtcatgggatgggtcataaatgaaatatcctttcatcaatgacatgtgctataggcgattctgatggtggattttgttggggcttctttttcattaactccagctttaatataagcacatgttgcatgtggattccgggaattttgttgtttgatggtttatgtaattttatgtgcttcatgattttttctctaggtgatgtacggcatgtaaatggtataagttttgtcagcaatataaattttcttttatcagatataaatataaacttttaacattcaaaaaaaaaaaaaactcgagac

SEQ ID NO: 2814 - DNA, 1498 bp, Glycine max
ctcgagccgctcgagccgctcccgcagagcctctgcttccgacacaaatcaatctttctgatcatatattattcttttgtttttttaatttattctccatacacatgcagacaataagttcgaacaagttcaggagcggcatggatttcttccaccgcgcgaaggcggtgcgcctccgcagccaccacgacaagtacctcctcgcggaggaggacgaggagtcggtgacgcaggaccgcaacggctcctccaaaagcgcacggtggacggtagaatacgtggccgaatacgacaacataattcgcctgaagagctgttacggcaagtacctcaccgcttccaaccacctcttcctcttgggcatgacgggccacaaggttctccagacgcttccctcgaggctggactcttctgtcgagtgggaacccgtcaaggacggagggcgcgtgaagctcaagtcccgttacgggaatttcctcagggcaaatggcgggttgccgccgtggagaaactccgttactcatgatattccgcacaggaccgccacgcaggattggatcctgtgggacgtggatgttgttgagatttacgtgaactctcccgcgaatcatgatagaccctccgctccgccgttgccggttgaggactctgttcccatactagcgagcgcgccgccgcccaactgtgtctgctagcttttcaaggcaacagcccaatgatttatcaccgaaggtggaagggagacctatatactaccatattgctgaagacaatggagaggtgctggatgaaggtgtgcaggggtattctttgattttcaaagggaatggagttgaagaattgactcgaaagttcgaggaagagacagggctagagggaatcattgtgtgtaatcggagtcctttgaatggaaagctttatcctcttcgcttgcagcttcctccaaacactgtcaccatgcgggttgttttggttcttcccatgtcaaatttggcaagagactttgaggcacaaggcttactgtgagaagcctttagagttttgcaacgaaagcctacgtatatgtagttatgtactgatcgaagccagttcagaatttaggaatatgttctagtccatttcatttattaagcagagttcatcatggtcctgtgagggaagcttagagttgtcattgcatggatcaaaacagcaatgtcctttcatcaatgacatgtgttataggcgattctgatggtggattttgttggggcttctttttcattaactccagcttcaatataagcatgtgttgcatgtggattccgggaattttgttgtttgatggtttatgtaattttttgttcatgattttttctctaggtggatataccgcatgtaaatagtataagttttgtcagcaatagaagattttcttttatcagatataaatataaatttctaatattcttcagaaatttagaaacatttttgtttaatcagagtttatttcttgctt

SEQ ID NO: 2815 - DNA, 2134 bp, Glycine max
ggacgtaatcatgggtgtttcttcatcatcgacacaaaaattagtctttatttttttgcttttacagaaggtgggattttgactagctgggtgtttggctgttgagtttatggagggccaagttccttgttgaacagtgtttgtgttgcctttatctgcagcttttaattgaaccaatcctaccctctttgtgaattcgctcagctggcggttttttgtgattcctccgctcattgttgttgaagggtctcgtgaaatcaatctagttttgagacctgtttactggcagaggtgacggagtttcagttttgtaagtgcatgatcataataataaggtttttatagaaaagaaaagttgagaataagatgggggaagatggtaattcttggattaggaggacaaatttttcacacacagtgtgccatcgtttggatcctgctagattaggctctattcctatcagtgttcagtcagagcagaaatcaaggccttcctcaaaggctcagagacaccctatgacatacaagcagagatctttgtcaccattgcctgagacttatctttctgaggccttcagggaagctagacatgaacagaagaggttctccacgccgaatccccggagggaaaagaggattatggggaagttgttgaacaaagattctagggagactaaggaatcaagttcaaagtcaccttcgcatagtccaaataggcaagtgaagtcaaagaaccgcaaggattcagcatggactaagcttttggacaatggtggaggaaagattactgctgtggaaacagctgaagagtggaatgttgacatgtctcagttgttttttggcctaaagtttgctcatggtgcacatagtcgactttaccatggtgtatataaggatgaggctgttgctgttaaaatcattatggtacccgaggatgatggaaatggagctttggcttctcgattagagaaacagttcattagagaagtcacccttttatctcgtcttcaccatcaaaatgttataaagttctcagcagcatgtagaaagccaccggtttattgtattatcacagaatatctggcggaaggatccttgagggcatatttgcataaattggaacaccaaactatttctctacaaaagctaatagcttttgctctggatattgctcgtggaatggaatatatacattctcaaggtgtcattcatcgagaccttaaaccagagaatatccttatcaacgaagacaatcaccttaaaattgccgattttggcattgcatgtgaggaagcatcttgtgacttattggctgatgaccctggcacctaccgttggatggcacctgagatgatcaaaaggaaatcctacgggaaaaaggttgatgtctacagttttgggcttatcttatgggagatgttgactggaacaataccatatgaggatatgaatccaatacaggctgcttttgcagtagtaaataagaattcaagaccgattattccatcaaactgccctcctgcaatgcgagctctaattgagcaatgttggagcttgcaaccagacaagaggcctgagttctggcaggttgttaagatattagagcaatttgaatcttcacttgccagtgatggaaccctgagcctggtgccaaatccttgttgggatcataagaaagggcttcttcattggattcaaaagcttggtcccttgcaccaaaatagtggccccgtgcctaaacccaaattcacatgaatctttcaagtgtcctggcttttattgtaacaccaggtccattgtaattaaaaatgaaaggtttgttttttcaggttctctggttgtagtcactttatgaaatttctatattgatttttaggcttgcaagtaaaggtgaaagcatcctttttttgcgcagtgtgcatacaaaacttatgaaactctggcttcatgtgtagttggttgtagttgacacttcatcccaaaatttaaacactcctcttccactttactccttacaaatgaaaatttataattccggtgagtgctgcttccaataggtaaaaacacaatgtaaaggttttgtacattgtcatttatataatattagatttaataatccttaaaatttaaagtt

SEQ ID NO: 2816 - DNA, 2180 bp, Glycine max
  misc_feature (4)..(4): n is a, c, g, or t
  misc_feature (22)..(22): n is a, c, g, or t
  misc_feature (31)..(31): n is a, c, g, or t
  misc_feature (49)..(49): n is a, c, g, or t
  misc_feature (2177)..(2177): n is a, c, g, or t
tgtntttctctttctttatggnaaaagatgncattaggtgcagcatttntcctatccttgcccacccgtccggcaggtattggcaaacagaaacaccctttctagcattgcgatttgatctctccaccttggtgaaagccttgtgaaacataaggcttttacagaaggtggaattttgactagaagggatgtttggctgttgagtttatggagggtcaagctctttgttgaatagtgtttgtgttgcctttatctgcaacttttaattgaaccaatcctaccctttttatgaacatatgaaaagatcggttttttgtggttcctccactcattgttgttgaagggtctcgcgaaatcaatcaagttttgagacctgttttctggtagaggtgtaagtacaagatcttaataataaggattttgtacaaaggaaaagttgagaataagatgggggaagatggttattcttggattaggaggacaaaattttcacacactgtctgccatcgtttggatcctgctaggttaggctctattcctatcagtgttcagtcagagcaaaaatcaaggcctgctgcctcaaaggctcagagacaccccataacaaacaagcagagatctttgtcaccattgcctgagacttatctttctgaggccttcagggaagctagacatgaacagaagaggttctccacgccgaatccccggagggaaaagaggattatggggaagttgttgaacaaagattctagggagactaaggaatcaagttcaaagtcaccttcgcatagtccaaataggcaagtgaagtcaaagaaccgcaaggattcagcatggactaagcttttggacaatggtggaggaaagattactgctgtggaaacagctgaagagtggaatgttgacatgtctcaattgttttttggcctaaagtttgctcatggtgcacatagtcgactttaccatggtgtatataaggaggaggctgttgctgttaaaatcattatggtacctgaggatgatgaaaatggagctttggcttctcgattagagaaacagttcattagagaagtcacccttttatctcgtcttcaccatcaaaatgtcataaagttctcagcagcatgcagaaagccaccggtttattgtattatcacagaatatctggcggaaggttccttgagggcatatttgcataaattggaacaccaaactgtttctctacaaaagctaatagcttttgctctggatattgctcgcggaatggaatatatacattctcaaggtgtcattcatcgggaccttaaaccagagaatgtcctaatcaacgaagacaatcaccttaaaattgccgattttggcattgcatgtgaggaagcatcttgtgacttattggctgatgaccctggcacctaccgttggatggcacctgagatgatcaaaaaggaaatcctatgggaaaaaggttgatgtctacagttttgggcttatgatatgggagatgttgactggaacgataccatatgaggatatgaatccaatacaggctgcttttgcagtagtaaataagaattcaaggccggttattccatcaaactgccctcctgcgatgcgagctttaattgagcaatgttggagcttgcaaccagacaagaggcctgagttctggcaggttgtgaagatattagagcaatttgaatcttcacttgccagtgatggaaccctgagcctggtgccaaatccttgttgggatcataagaaagggcttcttcattggattcaaaagcttggtcccttgcaccaaaatagtggccctgtgcctaaacccaaattcacatgaatcttccaagtgtcctcctggcctggcttttattgtacaccgggtccattgtaattaaaaatgaaaggtttgtttttcaggttctctggttgtgtagtcactttatgacattcatgtgatagtatattgatttttaggcttgcacataaaggtgaaagcatctttttttttgcgaagtgtgcatacaaaacttgtacgaaactcttgcttcatgtgtagttggttgtagttgacacttcaccccaaaagttaaacactcctcttccactttcctccccttacaaatgaaaatttataattccggtgtgataaaaaaaaaaaaaaaaaaaaaaaaaanaaa

SEQ ID NO: 2817 - DNA, 777 bp, Glycine max
gattgagtagctctggttatgtcttttctgcttctttgcccccatatcttgcaagtgctgcaattacagctattgatgtcctggaggaaaatcccaatctgataaaaaagctgaagaaaaatattgcttttttaagaaaaggattgtcaaaaataccaggcatcacaattacaagtaatccagagtcacctattgtttatttgagattagagaaatcaagaggttccatgaaagatgacctgcatctgcttgaaaatatcgcggaacgggttttgaaagaagaatctgtatttgtggttgtttccaaaagatcaacattggacaaatgccgtttgcctgtgggaattagattgtttgtttctgctgggcattcagagtctgatctgctcaaggcatctgaatcattgaaaaaggttgtagcatcagtcctgggtggtcagaattgaacgctctacatctttctttttcatctaatgtaccaaaacataagttcgattccatgtgtttaggtgagcaattttgaaatccaggcgatagagaaagtcccgtagttcttaatttgtgtagtattttatgttccagtttagggtaacagtattttgtgcgtgttgctcattggttgtctaaagtagtagaataaggatttaatgtttcttgtcatgagttggggaatatacctatgaattacattccgatatcaaaagtatcaatgttacatttttcattcattagccattcaacaataaagccggcgaaggtccttaccagtaaaaaaaa

SEQ ID NO: 2818 - DNA, 1356 bp, Glycine max
gtctgcccaattgacgttgttcctttgttttctttgtatttcagatatatgcagtatctattactatccgtatagtgtttggcttcatgttcatagcactgatatggaaatttgacttctctccttttatggttttgatcattgctattctgaatgatggaacaatcatgacaatttcaaaggacagggtgaagccatctcccttgcctgatagctggaaactgcaagaaatatttgctactgggattgtacttggaagttacttggcgctgatgactgtcatattcttctgggcaatgaaagaaaccgatttcttccctgacaaatttggagttagacacttgactcatgatgaaatgatgtctgctttgtatttacaagtcagtatagtcagccaggctttgatatttgtaacccgttctcgaagctggtcctttattgaacgccctggattgctgttagtttgcgctttcgttattgctcagctgattgctacaatcatagcagtatatgctgactggggctttgcaaaggtgaaaggaattggttggggttgggcaggagtcatctggctttacagtgttgtcttctatattccacttgatgtcatgaagtttgccacccgttacgtattgagtggcaaggcttgggtaaacatgctagaaaacaagactgccttcaccaccaagaaagactatggtaaggaggagagggaagctcaatgggctcatgctcagagaaccctgcatggacttcaaccaccagaaacttctggcattttcaatgagaagaacagttatagagaactctctgagattgctgagcaggccaagagaagagctgaagttgcaaggcttcgtgagcttcacacactgaagggacatgttgagtctgtggtgaagctgaagggtttggacattgatacaatccagcagcactacacggtgtgagaaaacactggaaaattgtagatagcaagagtgaccaaattcagttgcatgcctgaaacaacaagagactaggatgtctttgcctttcatatataggctttaccaatttgttctccatgtattttcggtgctggctaaatggatgtctatgccttccgtgatagagccaaagtagtgttagtttctttagtccttacttttcccctgccttcatatggctttgggtgcttcctcatttctgtgttctcagttgtgtatgccacatttaggtggcagtgatcatattgtgtcaatattgggattttttaaggtaggagaataagagtttctcgaagttcttttccagcatcatgcaaaatttaaaaccatgaatttggtttcagtctaatttataggagacactcat

SEQ ID NO: 2819 - DNA, 1363 bp, Glycine max
aactagcagagctattttccaaagaatgaagaactacaccatctatgcagtatctatcacaatccgtatagtgtttggcttcatgtttattgcactgatctggaaatttgacttctcacccttcatggttttgattattgccattctgaatgatggaacaatcatgacaatttcaaaggacagggttaagccatctcccttgcctgatagctggaaactgaatgaaatctttgctactggggttgtgcttggaggttacttggcactgatgactgttatattcttctgggcaatcaaagagacgacattcttccccgacaaatttggagttagaccaattcatgacaatccagatgaaatgactgctgctttgtatctacaagtcagtatagttagccaggctttgatatttgtcacccgttcgcgcagctggtccttcatcgaacgccctggattgctgttagtgactgctttcgttattgctcagctgattgctacagtaatagcagtgtatgccaactggggctttgcaaggatccaaggaattggttggggttgggcaggagtgatttggctctacagtattgtcttctatttcccacttgacatcatgaagttcgccatccgctacattttgagtggcaaagcatggaacaatctcctagaaaacaagactgccttcaccaccaagaaagactatggtaaagaggagagggaagctcaatgggctcttgctcagaggaccctgcatggacttcaaccaccagaaacttctaatatcttcaatgaaaagagcagttatagagaactcactgagattgctgagcaggccaagaggagagctgaagttgcaaggcttcgtgagcttcacacacttaagggacatgttgagtctgtggtgaagctgaagggtctggacattgacacaatccagcagcattacaccgtgtaatagttacacaagaacgatgtagataacaaaagggccaaaattcaatgattaaaatgaacggagagacaaggagaaggcctaactctatttatgcttactcggttgggagaggaagcctgtgatatatctctctctcagtctgtttatctttctttcatgtcttttcagatgttttggtctaaatttttgctttgatgcttggggaaaagtggtgttagcttcaatccttgattttcatatgcttttgggtccttccctcaaccagggtggtgttaattgatgtatgtcactttgaagtggcaagtgactagacaatgagcttattgggaattttgtggttggagaataagagtttatggaaaagctttaacggcatcttgcaaaaaaaaaaaaaaaaaaaattatcttagg

SEQ ID NO: 2820 - DNA, 1044 bp, Glycine max
attagaaaccttatcaaacccaacaaccactacaaagaaccaagaaaccaagcaaatcattgttctctctgtcctgtgttttgtgatttcccccttcaagccaccaccaatggccaacaacgagatgcaagttgagaggggtttggacttggaaaggtacatggggcgttggtatgagatagcctctttcccttcaaggaaccagcccaaggatggcgtgaacaccagagccacatacactcttaggaatgatggcactgtgcaagtgctcaacgagacttggagtaatggcaagagagggcacatagagggaactgcttttaagtctaaccgcacaagtgatgaggccaagttcaaggtcaagttttatgtccctccctttttgcctatcattcctgtaacaggggactactgggttttgttcattgatggtgattaccagtacgctttgattggccaaccaagcaggaattgcctttggatattaagcaggaaaccccatctggatgatgagatctacaacaagcttgttcagagagctaaggatgtaggatatgatgtgagcaaactccacaagaccccacagagcgatcctccaccagaggaagaaggcccccaagacacaaaaggcatttggtggctcaaatccattttggggaaataggcctccatgatgatatataatttattataatgaaaatgtatttcaatttcattacatgcaatgaatagacagataatgaatttttagttgggcaatttcaagttagaatgcctctaaggcatgtatacattggtttgctattttatctgtatatgaacttttgtgtggtgtcactggtgtggctgttgcttggttcactgatgtctccttacttttgttcttaacaattaaaggttgtctaattaatcaaagaaaaactttggcgtgtgaaaaaaaaaaaaaaaaaaaaaaaaaaaaaaaaaaaaaaaaaaaaaaaaaaaaaaaaaaaaaaaaaaaaaaaaaaaaaaaaaaaaaaaaaaaaaaaaaaaaaaaaaaaaaaa

SEQ ID NO: 2821 - DNA, 615 bp, Glycine max
ctgggcggcgctcaggcggctgtccggagctattcacttgctcgtctcctgcggcgtgttcaacaatcggcggcgaaaatgccttcccacaagacgttcagaatcaagaagaagctcgcgaagaagatgaggcagaacagacccatcccttattggatccgcatgagaaccgacaacactatcaggtacaatgctaagcgcaggcactggcgccgcaccaagctcggattttaaggtccatgtcaacctccgactcgagatttttatattgtttttgttattctagaatgttactagcaatgtgtaaactggaaaggttttagcttttggtcatgtggtcacacagagggatcattgttgagcgtttccatatctctattttgtttttgtactttttttggatattaatctgagactgagatggtagtttttatttactgccttagatttttatttttctttctttttccttcaagtttgcaaacccaatttcgtaggaatgttgaatggtgttgttctctactgcttgatgatagttagagtattacaatgcatagttgcttatatgaatgacttatcataattttatgggccttgctattctatacagattta

SEQ ID NO: 2822 - DNA, 1410 bp, Glycine max
ggtccggaattcccgtttctattccttcgtctgcaaccctagctttccgttgtttgcaaatctatggctggtgaatctgataaacccgaaaacaccctctcttgtgctaactgtggcaaacctgcgaatcttcagtgtccaaaatgtatggaattgaagcttcctcgagaaggtgctgccttctgctctcaggattgtttcaagtcttcatggagctcgcacaaatcagtgcatctgaaggcaaaactatccccacctggcacacaaaattcagactcacttgatgaaggttggttatattgtttgaagagagggcaggctcgaacgccaaagcttcctcactttgattggacaggaccactgcagccatatcccatttctagtaaacggattgtcccagatcaaattgataaacctgattgggctggtgatggaacacccaaaattgagcccaatagtagtctacagcataccattgaggtcaaaactccagatcaaatagagagaatgagggaaacttgtcggattgcaagggaggtgttggatgcagctgctcggattattcagcctggtgtgacgactgatgagattgacagagttgttcatgaggcaactattgctgcaggaggatatccatcacctctcaattaccttttcttccctaaatcttgctgcacgtcagttaatgaagtaatctgccatggaattcctgatgcaaggaagcttgaggatggtgacattgtaaatgttgatgtcactgtgtactataaaggtgttcatggtgatctcaatgaaacatactttgtgggaaatgttgatgaagagtctcgccaactagtaaaatgcacatatgagtgcctggagaaggcaatatccattgttaaacctggggtacgattccgtgaaattggtgaagttattaatcgtcatgcttcaatggctggcttttcagtggttcaatcatattgggggcatggaattggagagcccttcccttgggcaccttacattcctcattattcaagaaataaagcagttggtgggatgaaggcccgaccgacctttaccattgaacctattaacaatggcggtgtctggccggatccaatgtggcctgatggatggactgctgtttccgcagatgggaaaccaagtgctcaatttgagcagactcttttggtgacacagactggtgttgaagtattaacagggaggttgcagacctcacccaatgtttttccttgtgtcaattcataattgcgtgaaatctgcagacagaagctggttagtgctgtataccatacaattaattcacagacattcgttgatctacacctctggtttctcttctgggtatcatgtgtgtaagttatccacaaatcacagcgacatccgattgagtgttatgat

SEQ ID NO: 2823 - DNA, 1069 bp, Glycine max
aaagccctcatatgtgttgtgttgcgcgcgcgtacccggtctccgaagtgacccacaagacacgcctctcacatcgctcgtcaatcccgcatgtgccgtttgtcgacaacaacctaacgtgcctcttccccccccctcctctctctatatcactttctctcccactatttaacaccctccacactccccttccataacgcccaccactgttcttccggttaaaaaccttcgggtgggtggcacacttcttccctacaggcagcgtcagctaagaattaagccaaaataattaattaattcttggcaaaatcacatggccgccgccgcagatgggctcttccggccgatctacgagggctgcatctccgcctacgacaacgacgtcgagcgccgcccctaccacaagaactgcggctgcgctctgcacagcaagtcgaggaggaacagcagagcgtgcacgcacaagttgccgaaatgcaacaacgtgtcctaccccatgaggagggcttggagtgaagggagcttgtcaatggcttcggcaacaacttccgcgcattcctctccttcttcttctcccgccgctgggttcaggcctcaacacgacgaagagggaaatagtaacaaattaggagttttatttgagatgtgatcaggaaattgagaataattaataattaattaagtaattaagcaatactaccatgatctttttgataaaactcctattttgttttgtttcctctttctttcttttttcttttagttttgaataatttgagtccggttcggttgaggtcttggttaacttttttttttttatctgttgaaggtcgtcttgggattgtattgatcatcttaagccattttgatttaggggttcctgatcaattcggttggttctgaattggacgtcctcatttcttgtaacgaagctaattgaattttttttactatatataataatctttttagtgtatatatctctctatttcagttctttggatacttggggttcatgtatatattgaaagcttgatgttgcagtccaaaaaaaaaaaaaaaaaaaaaa

SEQ ID NO: 2824 - DNA, 849 bp, Glycine max
cggccgtgtctacccacgcccttagccggctccgcggccgcggcacgcgggggcccaccattgttcttccacagccttaacctctcgggttataaaaccttcgtggggggggggggcacacacatcttcgggcagcgtcagcttagaattattattagtgtgaaattattaattaattcttggctagacaacaacatggcctccgccgcagccgcagacggactcttccggccgatctacgagggctgcatctccgcctacgacaacgacgtggagcgccgcccctaccacaagaactgcggctgcgctctgcacagcaagtcgaggaggaacagcagcagagcgtgcaggcacaagttgccaaaatgcaacaacgtgtcctaccctatgaggagggcttggagtgaagggaatttgtcaatggtttcatcaacaacttccacgcattcctcgccttcttcttctcccgccgctgggttcaggcctcaacacgacgaagagggaaatactaaaaacaaattagtagttttatttgagatgaataattaaataattaattaatcaattaatgagtatttaatactaccagtaccaggatgatctttttgataaaactcctattttgttttgtttcctttttcttttctttttgtagttttgaataattcgactccggttcagttgaggtcttgttaactttttttttttaatttgacttggggctcctgatttagtttgttcggaattggacgacttcgtttattgtaatgaagctaattgatttttttttcttattaattatatattaattaatctttttagggtaaaaaaaattaaaaaaaaaaaaaa

SEQ ID NO: 2825 - DNA, 863 bp, Glycine max
  misc_feature (744)..(745): n is a, c, g, or t
  misc_feature (752)..(752): n is a, c, g, or t
  misc_feature (765)..(765): n is a, c, g, or t
tatcagctacggaggcccccccccccgaacggctcagttgtgtattctcgttctgcacgaaggaaaaaccctagcttccgttcgatcaacaatgacaggagagacagtgaaccccaaagcttaccctttggccgatgcccaactctcaataaccatactagatcttgttcaacaagctgccaactacaagcagctcaaaaaaggtgctaatgaagccactaaaaccctgaacagaggtatctctgaatttgttgtcatggctgctgatactgaaccccttgaaattcttctccatcttcctctactcgccgaggataagaatgtgccctacgtgtttgtcccttcaaaacaagcacttgggcgtgcatgtggggtcaccaggccagtgattgcttgttctgtgacaactaatgaagggagtcaattgaaatctcaaatccagcaactaaaggatgctattgagaagcttttgatctgaaaaaatcaaaatcggtatgatgggcttcttgagctgtgccaattgctccttctgaggctttgactggacgagctgttttggttacccaatagggtttatgtaaacctaagttgattttcttttataccattaaaggttatttgcgagtggtatttttgtgatgagtatgagtgatgtcttaaattgaaacagtgtattgttcaatgcaattttatgttggttgttatctgagaagtataatagagtacctgaaaaaaactaaaaannaaaaaanaaaactgaggggngccgtcccattcggcctatagtagcgatagcgcgtaactgggcgctttaacagcggactggaaaccctgctcccacttaatgctgcagaattcccttt

SEQ ID NO: 2826 - DNA, 740 bp, Glycine max
cggctgcgagaagacgacagaatctcacgttctgcacgaaggaaaaaccctagctagtccactcccccttcctccgttcgatcaacaatgacaggagaagcagtgaaccccaaagcttaccctttggcggatgcccaactctcaataaccatactagaccttgttcaacaagctgccaactacaagcagctcaaaaaaggtgctaatgaagccactaaaaccctgaacaggggtatctctgaatttgttgtgatggctgctgatactgagccccttgagattcttctacatcttcctctacttgctgaggataagaatgtgccctacgtgtttgtcccttcaaaacaagcacttggacgtgcatgtggggtcaccaggccagtgattgcttgttctgtgacaactaatgaagggagtcaattgaaatctcaaattcagcaactaaaggatgctattgagaagcttttaatctgaaaaattcataatcggtatgataaattcataatcgatatgatgggcttcttgagtcgtggcaattgctccttctgaggctttgactggacgagctgctatgtttacccaataggctttatgtgttaacctagatgattttctttataccatgaaaggttatttgcgagtggtatttttgtgatagttagtatgagtgatgtttttaattgaaacagtgtaatgttcaatgcaattttatgttagttgttatctgagaattttaaaag

SEQ ID NO: 2827 - DNA, 1896 bp, Glycine max
tccgggtcgacccaagccgtcccccacgcctcccgaccgctgccagaaggccaccgaagggggacacagtcaaattggaagaatgggttttcgggatgaccatgattttagtatgcatccggatttccgtcaaaggcaatttggtccacaaggagctgtgaggggtggacattatgcaggtagccgaggtgctgcatttgcgggaccatctagaccttatcatgatagagcatggtacggtatccctgatggaggccctagtgagcctattcctccaaggaggccctactccccaggtggacagtttgacatgccttttatgggaaggcattttgatgatccatatctatacgatgacaatatgcaaggaatgaaacggccattttatatgactgaccctgagcctgattacatggggcctactagactacgtcctcgattggattatgcagatccacctatatttcctggaactcatcaccatgattcttttggggctggcagcagacagtacccgccggactattacggttctgattatggtagaggttcatattcatcttattacgggggtgatggctcacatgggcatggatactattattaatgtgatgaatcttttggtggatctggaattgtgggatagacatcttcaaatataagcttgcggcttgagcatacaagtctgaagttgcatatttattttatacacttctctgttattcctcttccacctggtttgtttctatatatctatatctatttgggcataggtggtatagactaaattgtttaatgatagttgggtaggttgtctttcaggtcctggagtaaggtattaataagatttatatggaatgggctagattttctttaacaacttaggtatgatgagatcagggacttgtatttgaggatgctttgttgattgtacaatattaatctttgactcatcaaatataaatttggtgattggaaagcttaaaggactattggaagcaaaaaaactttcgagtgatggatttatctttttatgaagtgataggcaaggtttgatatttgaatatgaatattgaggctcttgtgattcttatggatgacttttggagagtttagctacagtttactttcattattaggagccaattttgatctgaactgaaagctttaccatattttggagttcttatgattggccgagatccttcaaatatttattgatatccatacagaagcagcctttatatagagaactttatgttcactgaatatactgggagatgagactagggactaaatacagtgaaaggctgactttcatttggcatgatgttcatggataatgttatggttatggagcaaatgatctgtatgattgatttgattccttatgatgctcttgagtaattactaagttgggtttccttgaggagatctccatattttttactttccaatgtagctttggtgtggactgagaataaaattgctgttgattttgagtgtgaatacctaatgccgagggcagctaaggatgtttctgactgttttaattgtctgaaatttatttcggacggttttgtgaaacattgtgaaccatgaatcaaatggaactgttgaaagatcttcgttttgctgtgacgattaccaggttacttctctttctgtagcttttttagaatttattttgcagtgaataggtggtgggtgcaacgtgatttgagtgcttcttttgatgtagcatggtcagtgcctgcctcttgaatattaaatgtttaagttatgtaatacctagaagttcgaggtgtaatataatttattctgagctctaccaatttgttcaaaaatcacaaaattcaccaaaatcagtctaagatgtaatgtgtaatgcatata

SEQ ID NO: 2828 - DNA, 1555 bp, Glycine max
tgagatagataaaataataacatccactcataatatgcttaatgtttagatattgatgtgtgctaagcatagttgaacaaaaacaattaaaatataacattgtcggtggattcatggatttttgatgtaaagccaagctaagctaaggttgacacttttttacaccaacttttctctctctctgtgtacagcctaagcttaagcttatccctccccacttgtggccgcggccgcgggcgcttgccaaaagggtgtgtgagagagagaaacataaacacaaccaaccatcaagggaagttagagagagagttgagttgtgttgagagagatagagagatagagagatagaggagaagatgaacggtggtgaatcttacggtgctattgagacacaatacataaggaggcatcacaaacatgaaccaagggaaaaccagtgcacctctgcacttgttaaacacataagagctcctgttcaccttgtgtggtcactggtgagaagatttgatcaacctcagaaatataaaccatttgttagcaggtgtatcatgcaaggggatcttggcatcggaagtgttcgagaagtgaatgttaaatctggccttcctgccacaacaagtactgagaggttggaacaactggatgatgaggaacacattctcggcatcaggattgttggaggtgaccataggctgaggaactattcttccataatcaccgtccatccagaggtcatcgatgggagacccggtacaatggtgatcgaatcatttgtggtggatgtgcctgatgggaacaccagggatgaaacttgttactttgtggaggctttgatcaggtgtaacctaagctctttagctgatgtctcagagaggatggccgtgcaaggtcgaaccaatcctatcaaccattaagcatgtctaggggagaatgaagttgggttcatacaaattatatgatccattgctctctgatcctagctcaagtgtggacattggttggagtattccttctatgttcccagaagttttggaacttttttcatctgtatcatggatacattccccctaccatccttcttgcatttttagctgtgtaatcactcttttgaactgctaagtgtctcttcttcaatatttgtaagatgagattcagtgcctcatgaaagcacaaggatgtgagggggaagtttttacctgctatattcttcctggattttgtggatggtggtgtgttactatagttatttgtaaatatttttgttggaccaaagacagtttcttcagttttcatgtttcatgtttagtagcaactttttgccagatttatgtgctggcacaaggaaactccaaatagtggatactgccttgttattttctttaataagtagtgtagcttttgtaagaagttatctattccatattctccttgtttaggactatgttcagaacacttaatcaaaatgattttgtttctggctcaaaaaaaaaaaaaaaaaaaaaaaaaaaaaaaaaaaaaaaaaaaaaaaaaaaaaaaaaaaaaaaaggggcgaaaa

SEQ ID NO: 2829 - DNA, 1153 bp, Glycine max
ctcttacagcctaagcttaagcttatccctccccacttgttccctctgccgaatgttatagccaaaagggtgcgagagagagagagagagaaacagaaacaacaaccaaccatcaagggaagttagtgagagagagagagagagagagagagcggaagatgaatggtggtgaatcttatggtgctattgagacacagtacataagaaggcatcacaaacatgaaccaagggaaaaccagtgcacctctgcacttgttaaacacataagagctcctgttcaccttgtgtggtcgctggttagaagatttgatcaacctcagaaatataaaccatttgttagcaggtgtatcatgcaaggggacctaggcattggaagcgttagagaagtgaatgttaaatctggccttccagccacaacaagtactgagaggttggaacaactggatgatgaggagcacattcttggaataaggatagttggaggtgaccacaggctgaggaactattcttccataatcaccgtccatccggaggtcattgatgggagacccagtacaatggtgattgaatcatttgtggtggatgtgcctgatgggaacaccagggatgaaacttgttactttgtggaggctttgatcaggtgtaacctaagctctttagctgatgtctcagagagaatggccgtgcaaggtcgaaccgatcctatcaaccattaagcatgtctagggaagaatgaagctgggttcatacaaattacatgatccattgctctctgatcgtagttcaagtgtggacattggttggagtataccttccatgttcccagaagttttggaacttttttcctctgtatcatggatacattccccttaccacccctcttgcactttttagctgtgtaatcactcttttgaacagctaagtttctcttcttcaatatttgtaagatgagattcagggcctcatgaaaacacagggatgtaggggtggaagtttttacctgctatattctttctggattttgtggatggtgtgttacctatagttatttgtaaatatttttgttgaaccaaagacagtttcttcagtttttcatgtttcatgtttcatgtttagtagcaactttttgccagatttatgtgctgacacaagg

SEQ ID NO: 2830 - DNA, 783 bp, Glycine max
tcgagggactgatctgtctggttaatgatatccgtcctaggtcccccccaaacagtgatgaagtgaagacttctgatgtttctaactctgctggaatccagatacttcaaaaaatgatttcacttgagcgaaatgaatctggtttgtctctagatggaagccttgttagtgaaattgaaggtgaaagcgcagtcgacaggctaaaaagacaagttgaccatgacaggaaacttatgaatgctttgtataaagagctggaggaagaaagaaatgcttctgcagttgctgcaaatcaagcattagccatgatcacaaggctgcaggaagaaaaggcaacattacatatggaagccttgcaatacttaagaatgatggatgaggagtctgagtacgaaacagaagctttgcaaaaagctaatggccttcttgttgagaaggagaaagagatagaagagttggaagctaagcttgagttctataggaagaagttccctgatgaatctgtgctggaaaacatggtggatacaaactctgaaatgaaggtgaaagatattggattggatcattgcattgaaaaggatgaaagtatccttggaaagtcagttcctgaaaatactaatatatctgacaaatctgaatttctacccacatctctggaaaaacagaatgttcaatctgtaaaaaattcaccattggagtttcaagatgaaaggttatatatttcccaacgttttgagaaagtggagaagcaagtttactttttcctgaatattcatcaatctc

SEQ ID NO: 2831 - DNA, 1292 bp, Glycine max
gagaaaagaggaaggcgaagaccgcaaagaaagaatagttttcagaagcagaaagaggttttccgtcgtttcgcgtttagcgttttgcgttttgagttccgaaacgatgtcctccatggccatcaccaccagggacagagatcgagagcttctcatccccgtcgccgacatccccgccggagatgccgccgtttccccttcccccaagccatcgtcgtcggcgtcgcccccgcatcattccggacgcgagactttttacaaagttattagaagctgggcatcaaaaaagtttatgactggatgtgtcattctctttccaattgcaatcaccttctatataacatggtggtttattcatttcgtggatggatttttctctcctatctatgctcaacttggaattgatatttttggtcttggattcataacttccataactttcatcttcttggtcggggttttcatgtcatcatggttgggtgcatctgtcctgggccttggggagtggtttatcaagcgaatgccacttgttcgtcatatttataatgcctccaagcagattagtgctgctatctctccagatcaaaatacacaagccttcaaagaagtagccatcattcggcatccacgtattggagaatatgcatttggattcatcacctcatctgttacccttcagaactattctggagacgaggagttatgctgtgtctatgttcctacaaatcatctttatattggtgatatatttcttgtcaacaccaaggatgtcattaggccaaacttatcaattcgtgaaggaattgagattgttgtttcgggaggtatgtcaatgccacagatcctatcaacgatcgattcacgcatcagactaggggaaataagtagaatcaacagaagctgagtgaagggcaatattagtttttcatgttatagttccttggtatcttgtgaagccatcagaatgacaatgcaatcattggtttggatgcaagtattgaatatacgtgattgattgttctgagaaagtcagactctgatggcttgtgtaacattcgtttgagtaagaatgtaggatttagcatttgtttgacaaccttacagaattttattctctgcttcgagtctcgaatttttacctgtgtataatgtactactactggttctcactcgttatagcaattcaattttgtagtgctgattgattgataaaaaaaaaacaaccctcgtgccgaatccggcacgagctaaaaagccaacactcatatataaagaccaaaaaggtggttgct

SEQ ID NO: 2832 - DNA, 1515 bp, Glycine max
tacggctgcgagaagacgacaggcggggataacaatcattattataacgcaaacttcaacttgtaatcaagggagagagaaaatttcaagcacaaaaaatggcggagaagaaagtggtgatcctaggaggtggtgttgccggtgccaaccttgcaaaaactatacaacgtcaagccaacgtcacccttattgatccgaaggaatattttgagattccatgggcaagtttgaggggattggttgagccaacttttgctgaaaggatagtgatcaaccatagagagtacttcaaaaagggtaaccttgttgtatccagtgctgtcaacataactgaaactgcagtggtgactgaagatggccagcagattgcctatgactatcttgttattgccactggacacacagaaccaatccccaaaaccaggagtgaaagacttgaccaatacaaaggagaaaatgcaaagatcaaatctgcaagttcagttttgattgttgggggaggtccaactggtgttgagcttgcagcagagattgctgttgattttcctgataagaaggtcaccatagtgcataaaggaacgaggttgcttgaatacattgggacaaaagcttcaagcaagactttaaagtggctcaaatcaaagaaaattgatgtgaaactagaacaatcggtcgatttgagctcctcttctgaagaaaataagacatatcaaacttcaaatggagagactataaaagcagatcttcattttctatgcacagggaaaccacttggttcaacatggattagagaaactcttctaaagaatgacttggatgctgatggaaggatcaaggtcgatgagcacttgagagtgaagggcaagagcaacatttttgcaattggagatattacagatgttcaagaaatcaaacaagggatgtatgcaagtgctcatgctcaagtggttgccaagaacctgaagctattgatagagggaggaggcaaagagcgtaagttgggaacatacaaggcacagccaccaatatctatagtttcacttggaaggaaaatagctgttgcacagttcccattcatgactgtgcttggaaggcttcctggcatgatcaagtcaggggatttgtttgttgggaaaaccagaaaggaattaggactcgaacctaatgttaaaaaatcttaaatttggtatattgagtgagtgttgtggtgtgtaattgtgtatatacacttcttcaactctttttcttccttgtcattgttgtgcatgtgtaagttgattgtatgtgtttactttcctattgtattcaacaaattactttgtatctgtaatgtttcttaatgattttgatgttgtcggtgttgtctcttgagatatgggattggagtcagaagcagaatgagttagagtgttattcattggacaatttactttcggttttatactgtgtatctttggttttgcattgactttttcagaatcccgttgaaatagaagttaacgtgattttaggtac

SEQ ID NO: 2833 - DNA, 1939 bp, Glycine max
gcctgctaggtacccggtccgggtccgcccgcccgcgtcccccccccgcccgggaaagaggaaggttgtggtaaataaataacctaacctaacccttgcgacttgcgacttgcgacttgcgagtgagactgaggttgggtttggaaggcaagggcttgtgttgtcacaatccaagagagaagtaatggcgaacatagacatcgaagggatcttgaagcagcagcagccttatgatgggcgcgttccgaagacgaagatagtgtgtactttgggccctgcttctcgatccgtagaaatgaccgagaagcttctgagggcagggatgaacgttgctcgtttcaatttctctcatggcacccacgactatcaccaggaaaccctcaacaatctcaagactgccatgcacaacactggcatactctgtgccgtcatgcttgacactaagggacctgagattcggactggttttctgaaagatggaaaacctattcaacttaaagaagggcaagaagtcaccataactactgattatgacattaagggggatccggagatgatatccatgagttacaagaagctgcctgtccacttgaagcctggaaataccatactgtgctctgacgggacgattactctcactgtcttgtcttgtgaccctgatgctggtactgttagatgtcgttgtgaaaacactgcaacgttgggtgagagaaaaaatgttaaccttcctggtgttgtggtggatctacccacacttactgagaaggataaggaagacattcttggatggggtgtacccaacaagattgacatgattgctctttcatttgttcgtaaaggctcggatcttgttaatgtccgcaaggttctggggccacatgcaaagaatattcagttgatgtcaaaggttgagaatcaggagggagtcctgaattttgacgaaatcctgcgggagactgatgcattcatggtggcacgtggtgatcttggaatggagatcccagtagaaaagattttcctggcacagaagatgatgatatacaagtgtaatcttgttgggaagccagtggtgactgctacccaaatgcttgaatcaatgataaagtctcccaggccaacccgagctgaagcaactgatgtagctaatgcagttcttgatggaacagattgtgtgatgcttagtggtgaaagtgctgctggggcatacccagaacttgctgtgaaaatcatggctcgcatttgcattgaagcagaatcatcccttgactatggtgccatcttcaaagagatgataaggtctaccccattgcctatgagtccattggagagccttgcatcatctgctgtccgcacagcaaacaaggccaaagcaaaactcattgttgtgctgacacgtggcgggtctacagccaagttagttgccaagtataggccagcggttccaatattgtcggtggtggttccagtgttgagcacggactcatttgattggacctgcagtgatgagacgccagcaaggcacagcctgatatacaggggcttgattcctatactgggcgagggatctgcaaaggctaccgatgcagaatccacagaggtcattctcgaagctgctcttaagtccgcaacagaaagggccctttgtaagcctggtgatgcagttgttgccctgcatcgtattggagctgcctctgtcataaagatctgcatagtcaaataatgcatgctcaactcaacgtgccgccaactaatgcagggttatgttttgccttttatttctttctttctgctgtttatccgtatcataaaatggaggatttagttactagctgtagatcgagtgttttttggtatactctgtttatattgcggagtacttctaaatcagattatcatggaaataatactcttaccttttaaaatgtgattggttttgcgg

SEQ ID NO: 2834 - DNA, 1988 bp, Glycine max
aatccgccccgccgtgggaatgaaagaccggtgtgggactcgtggcgactttgtggtaaataaaaatcgcacgcgtgcttggtgctgtttggaagaggaaaatacattacagcagcaaaggaaggttgtggtaagtaaatagtagtaacctaacccttgcgtttgcgagtgaggctgaggttgggtttggaaggcaaaggctggtgttgtcccaatccaagagagaagtaaagtaaagcaaaggaatggcgaacatagacatcgaagggatcttgaagcagcagcctgatgatgggcgcgttccgaagacgaaaatagtgtgtactttgggccccgcttctcgatccgtggaaatgactgagaagcttcttagggctgggatgaacgttgctcgtttcaatttctctcatggcacccacgactatcatcaggaaaccctcaacaatctcaagactgctatgcacaacactggtatactctgtgccgtcatgcttgacactaagggacctgagattcggactggttttctgaaagatggaaaacctattcaacttaaggaaggacaagaaatcaccataactactgattatgacattaagggggatcaggagatgatatccatgagttacaagaagctgcctgtccacttgaagcctggaaacaccatattgtgctctgatgggacgattactctcactgtcttatcttgtgatcctgatgctggtactgttagatgtcgttgtgaaaacactgctacgttgggtgagagaaaaaatgttaaccttcctggtgttgttgttgatctccccacacttactgagaaggataaggaagatattcttcaatggggtgtacccaacaagattgacatgattgctctttcatttgttcgcaaaggctcagatcttgttaatgtccgcaaggttctggggccacatgcaaagactattcagttgatgtctaaggttgagaatcaggaaggagtcctgaattttgacgaaatcctgcgcgagactgatgcattcatggtggcacgaggtgatcttggaatggagatcccagttgaaaagatattcctggcgcagaagatgatgatatacaagtgtaatctggttgggaagccagtggtgactgctacccaaatgcttgaatcaatgataaagtctcccaggccaacccgagctgaagcaactgacgtagccaatgcagttcttgatggaacagattgtgtgatgcttagtggtgaaagtgctgctggggcatacccagaacttgctgtgaaaatcatggctcgtatctgcattgaagcagaatcatcccttgactatggtgccatcttcaaagagatgataaggtctacaccattgccaatgagtccattggagagccttgcatcatctgctgtccgcacagcaaacaaggccaaagcaaaactcattgttgtactgacacgtggcgggtctacagctaagttggttgctaagtataggccagcggttccaatattatcggtggtggttccagtgttgagcacagactcatttgattggacatgcagtgatgagacgccagcaaggcacagcttgatatataggggcttgattccaatattgggggagggatccgccaaggctactgatgcagaatctacagaggtcattctcgaagctgctcttaagtccgcaacacaaaggggcctttgtaagcctggtgatgcagttgttgccctgcatcgtattggcactgcctctgtcataaagatctgcatagtcaaataatatttcatgctcaactcatgcagggttattatgttttgacctttttctttctttctttctgctgtttatccatattatcataaaatggaggatttacttactacctgtagaacgactgggtttttgtatactctgtttaaattacggagtacttctaaatgagtttatcatggaaataattactatttttttccttttaaaaaaaaaaaa

SEQ ID NO: 2835 - DNA, 2070 bp, Glycine max
ggtaaataaataacctaacctaacccttgcgacttgcgaccccccggccggactgaggttgggtttggaaggcaagggcttgtgttgtcacaatccaaggtttgtttgtgtttgtgccactgtcctgtctttgtttatatatcttagtttcgtcggtgtttacttagatgtatgtgttgttgtagagagaagtaatggcgaacatagacatcgaagggatcttgaagcagcagcagccttatgatgggcgcgttccgaagacgaagatagtgtgtactttgggccctgcttctcgatccgtagaaatgaccgagaagcttctgagggcagggatgaacgttgctcgtttcaatttctctcatggcacccacgactatcaccaggaaaccctcaacaatctcaagactgccatgcacaacactggcatactctgtgccgtcatgcttgacactaagggacctgagattcggactggttttctgaaagatggaaaacctattcaacttaaagaagggcaagaagtcaccataactactgattatgacattaagggggatccggagatgatatccatgagttacaagaagctgcctgtccacttgaagcctggaaataccatactgtgctctgacgggacgattactctcactgtcttgtcttgtgaccctgatgctggtactgttagatgtcgttgtgaaaacactgcaacgttgggtgagagaaaaaatgttaaccttcctggtgttgtggtggatctacccacacttactgagaaggataggaagacattcttggatggggtgtacccaacaagattgacatgattgctctttcatttgttcgtaaaggctcggatcttgttaatgtccgcaaggttctggggccacatgcaaagaatattcagttgatgtcaaaggttgagaatcaggagggagtcctgaattttgacgaaatcctgcgggagactgatgcattcatggtggcacgtggtgatcttggaatggagatccccggcgacgtggcccccccccccgagaagatgatgatatacaagtgtaatcttgttgggaagccagtggtgactgctacccaaatgcttgaatcaatgataaagtctcccaggccaacccgagctgaagcaactgatgtagctaatgcagttcttgatggaacagattgtgtgatgcttagtggtgaaagtgctgctggggcatacccagaacttgctgtgaaaatcatggctcgcatttgcattgaagcagaatcatcccttgactatggtgccatcttcaaagagatgataaggtctaccccattgcctatgagtccattggagagccttgcatcatctgctgtccgcacagcaaacaaggccaaagcaaaactcattgttgtgctgacacgtggcgggtctacagccaagttagttgccaagtataggccagcggttccaatattgtcggtggtggttccagtgttgagcacggactcatttgattggacctgcagtgatgagacgccagcaaggcacagcctgatatacaggggcttgattcctatactgggcgagggatctgcaaaggctaccgatgcagaatccacagaggtcattctcgaagctgctcttaagtccgcaacagaaagggccctttgtaagcctggtgatgcagttgttgccctgcatcgtattggagctgcctctgtcataaagatctgcatagtcaaataatgcatgctcaactcaacgtgccgccaactaatgcagggttatgttttgccttttatttctttctttctgctgtttatccgtatcataaaatggaggatttagttactagctgtagatcgagtgttttttggtatactctgtttatattgcggagtacttctaaatcagattatcatggaaataatactcttaccttttaaaatgtgattggttttgcggataaccctgtttcacgcctgctgccaccagtttcctacttcttccttgtatttgatgatacattaacagctgtaaaatataaatgctcattatccattagggttcataaggtaattttcaag

SEQ ID NO: 2836 - DNA, 1027 bp, Glycine max
ctcgagccgctcgtcccatattccaaatttctcattctcccatttcctctcagaaccctcgatcactcccacgcgctcctatatcctctccttcaccgtcgctctctccaacgatcacaacaacatcgtcatcccatggcaaacgccgcatctggtatggcagtccatgatgactgcaagttaaggtttttggagctgaagacaaagaggacacaccgtttcatagtttttaagattgaggagcagcagaagcaggtcattgtggagaagcttggtgagccagcccaaggctatgaagatttcactgccagccttcctgctgatgagtgccgttatgctgtttatgattttgagtatctgactgaagggaatgtccctaaaagcagaatttttttcattgcatggtcccctgacacatcaagggtgaggagcaagatgatctatgcaagctccaaagacagattcaagagggagctggatggaattcaagtagagctgcaagcaactgatcctactgagatgggtcttgatgtgttcaaaagccgggccaactaaaatgattatagaaaatagtaggctttctggtgggagcagcactccttaagccttagttactcatggaaaatatcctagtttgtgggatggtcaacttgggtagttatggtcccaaactctcaattttccaagttgtggcataaattctattgcaccttttaacaagctttgcttgttccagtgtgttttattatgatttgtgatttatacaaccttgcgtttgagtgccattttagtcgtcttatcccttactagttgaatttgtaactgtttgtgttatcagacaaaaaatggggtttcttcacttattgacactcgtcatccactaatgttttgtgacttgttctggccgatatatgctttcttttgtatgggcatacaaaggcatcttgttcatgctatattccttttttgttttatggtttggtggaatgagattttattcaactggttgattgttcttgaaaaaaaa

SEQ ID NO: 2837 - DNA, 1043 bp, Glycine max
cccacgcgtccgtacggctgcgagaagacgacagaaggatacgtcagctacgtaggcccccccccccaacttcattttctccttccgttcctttcttcgttccttccccaacccaatcttcgccttcgcccacaacaactcctccttcaggatcgctgccaacgttactttccatttttacccttcatcctcgagaaaaaaatggcgaacgcagcatctggtatggccgtccatgatgagtgcaagctaaagtttctggagctcaaggcgaagaggacgtaccggtatatcgtttttaagattgaggagaaatcgaagcaagttattgtggagaagctgggtgaccctgcaaatggctatgatgaattcgctgccagtcttcctgctgatgagtgtcgatatgctgtttatgattttgattttgtcactgaagagaattgccaaaagagcagaattttcttcattgcttggtcccctgatacatctagggttaggagcaagatgatttatgccagctccaaagatagattcaagagggagcttgatggaattcagattgagctgcaagcaactgatcctactgagatgggtcttgatgtgttcaaaagccgtgccaattaaatgattccgattattcataaataggagttgtgatggggatggtcaacttggctaatttggactcaattttccaagttttgacatgaggtctattgcagcttcaacaaagcttctcttgttccagtgtatcttgtggtttgcgacatataacccgtgtttgggtgtaatcttagtcctattcctagtagttaattttgtaactgttctttgtgtgattgaacgaaaatttgggaccaggtattgatgtaatgttgccagttgccatcttactaatgtcttatgacttaaattaactaaaaaaaaaaaaaaaaaaaaaaatcgagacagttctctctctctctcaaaaaaaaaaaaaaaaaaaaaaaaaaaaaagaaaaaaaaaaaaaaaaaaaaaaaaaaaaaaaaaaaaaaaaaaaaaaaaa

SEQ ID NO: 2838 - DNA, 1363 bp, Glycine max
tttttttttttttttttttttatagtaaataatttcttattacaaaaaatctcaacaattttatttatccaatatatgactgtgtatatcaacataaatgaataataaacaatgttgacaatccaacacactgatccttccggtcaaaacacagaacttcagaggaatttatagaacgcacacagttaattggaggaatttagatgatcaaatttaaacgagggcaatgctgcttcctccaccggggggtctgcgggcacctagtatatggtctctactttctgcctttccatcagcaaatatgtcactcccagccatttctctaagtttagctctgcttgaaggcttttccggtgatcctgcaggaacgtctcccttgaaaatattattgcctgtcatctctgcaaacttctggtcatgcatttttttcctcaatatcttaactggttgttcactgaatgagaaattactttggccatcagctcgattagaaacttgcgcagatgtactcactttttgtggaacagatcttcttgtgtctttactttcttttgattccaaagtgtgtgcagcagccaatgaacgaggcacaatttcagaaggaggggcaaatatatcacttccactgagctccttggtcttggcacttgatgtttgcttgttgatcttcgtgactgttttgctttgatatgttccaccaagttcacgttgctttgctatctcgtgtagagaggttggttttttaggagaaatgtttccttcagtgctgaatgatatctgactgattccattcattgcttgcttatatacgcgtatgcttgttctgttttttgaatttgcagaattttcttctgatgtggtatcttcagatttaccagaaaatataccacttccagtcatctctttcaatttatatcctgagcagggtttcttttttgttagactctgtgcttcttcatcggtgagctggcttccgcggagaacctcaccgattttatcagaaggctggcgagagcggtagccggaggcggaggattccggcggaggttgttcggaccacgttaggagatcggaggtggaggtgtgagggttccttagcggcgtggttctctggctctgcattttgtttaggttgagtgagtgtgaggggtgatgttattcaccacaccagatttgagaaaacgtttcaacgataacgaacccaaataatcactatccaatttcttttctcttctttcgatttccaactgcaactatggggggggggccctacgtagctcactaataatataacaaactctcgagaggttgggttattagttattatgatggcacctagaaatggatactcgctctcgagccg

SEQ ID NO: 2839 - DNA, 1840 bp, Glycine max
ctcgagccgaatcggctcgagcagaatgtgattttggattcaaaagagaagcttgagttataccgcaacaaaactgtatttcaggttctatataaaagcagatgcgataatcgactaaatgagattacggaaagggcatctgcggataagcgtgaggcagaatcattgggcaagaaatatgaagagaaatacaaacaagtagcagaaatagtatcaaaattgaccgttgaagaagctaaatttcgtgatatacaggataggaaggtggagttgcagcaagcaattgtcaaaatggtacaaggaggcagtgcagatggtatccttcaggtccgtgctgaacgcatacagtcagatctcgaggagttatttaaggctctagccgaacggtgcaagaaacatgggctagatgtgaagtcaattacaatggttcagcttcctgctggttggcaacctggaattccagagggagcagctctttgggatgaagattgggataaatttgaggatgaaggatttgctaatgatctcacttatacatcttcaaaaccgaagtcggcatttattgatggagaacaaaatttatctgatgataattctgttcatggttcacctgtgaatgcaaatgggaagcaagaaaattctgctaatggtgattatacagttgaggatgaatcctatgcacacagtgaagatgacttggcaagaagcccccatagtctagctgggaggagtacgttgggtagtccttctcgagacttttcaaatgctcattttggaaaaagtttcgaagcagatgcagaaacacacagaagttttgatgaatcaacctggggtgcatttgacaacaacgaagatgtggactcagtgtggggttttaacactaagaccaaggactctgacttcgagcagggagatttctttaaatccgacgattttggtataaacccagttagaacaggatctacacatacagatggcacgttccagtcaaaaagcccatttgcttttgatgattcagtgcctgcaactccagtttccaaatttgcttttgatgattcagtgcctgcaactccagtttccaagttcggaaactctccaaggtacagtgaggcaggggatcacttctttgacatgtcaaggtttgattccttcaggcacgaaagtggatattctccacaaccagagaggctcacgagatttgattccataagtagtagcagcaaggattttggttacaataatgataaattcacaaggtttgattccataagtagcagcaaggattttggctacaataatgataaattcacaaggtttgactccataagtagcagcaaggattttggctacaatcctgagacgctcacaaggtttgattccatgagtagcagcactgatttgggcttcggtcgacagggacatgcaaggtttgactcaattagtagcaccaaggacttcggtcacagtggtccgttctcttttgatgactctgatccattcggctcctctggcccttttaaggtctcttcagaaaatcattctccgaagaaaggttcagataactggagtgcattctagcctgcaatccaactcttcccgattttctttgttgtttctatttccttgattgttcatgacagcctatttttttgtgtatagctagaagaaaagctggacggtaatatatggtgtggccaatgtatcagtttgaagagagctttttctatttttttggggtaatgttcggatgttgtgtgaaagatagatagataaaattaaatgtcttgatgcgtatttactactaagtttaatggcaagtgcaagcaaagttttttttttt

SEQ ID NO: 2840 - DNA, 1220 bp, Glycine max
gatcctcgtgccgttcatgggtcacctgtgaatgcaaatgggaagcaagaaaattctgctaatggggattattcagttgaggatgaatcctatgcacacagtgaagatgacctggcaagaatcccccatagtctagctgggaggagtacggtggagaggccttctcaagacttttcaaattctcattttggaaaaagttttgaagctagatgctgaaacacacagaagttttgatgaatcaacctggggtgcatttgacaacaacgatgatgtggactcagtgtggggttttaacaccaagaccaaggactctgacttcgagcagagagatttctttaaatctgatgattttggtataaacccagttagaacaggatctacacatacagatggcacgttccagacgaaaagcccatttgcttttgatgattcagtgcctgcaactccagtttccaaatttgcttttgatgattcagtgcctgcaactccagtttccaagttcgaaaactctccaaggtacagtgaggcaggggatcacttctttgacatgtcaaggtttgattccttcaggcacgaaagtggatattctccacaaccagagaggctcacgagatttgattcaataagtagcagcaaggattttggctacaataatcataaattcacaaggtttgactccataagtagcagcaaggattttggctccaatcctgagacgctcacaaggtttgattccatgagtagcagcaacgattttggctttggtcgtcagggacatgcaaggtttgactcaattagtagcaccaaggacttcggtcacagtggtccattctcttttgatgactctgatccattcggctcctctggcccttttaaggtctcttctgaaaatcattctccgaagaaaggttcagataactggagtgcattctagcctgcattccaactcttcccagtttttctttgttgtttccatttccttgattattcttgatagcctatttttttttgtgtatagctagaagaaaagctggacggtaatatatggtgtggcaaacatatcagtttgaagagaactttttctattttttttggtaatgtgcggattttgtgtgaaagatagatagataaaattaaatgccttgatgtgtattgtatgtactacgaagtttaatggcaagtgcatgcaaagttttttttcttcttttaaaaaaaaaaaa

SEQ ID NO: 2841 - DNA, 1172 bp, Glycine max
gaagtattgctgaagcaagagtatgatggcaagattgcagatgtctggtcatgtggagtaaccttgtttgtgatgctagtgggatcatatccttttgaagatcctaatgatccaaaggatttccggaagacaattcagagggttctcagtgtccagtattccattccagacaatgttcaagtatctcctgagtgtcgccaccttatctcaaggatctttgtttttgaccctgcagagagaatcactattcctgaaatattgcaaaatgaatggtttctgaaaaatcttcctccttacttgatggatgaaaagatcatgggtaaccaatttgtagaatcagatcagcccatgcagaacattgatacgatcatgcagataatttcagaagccaccataccagctgcggggacctattctttagaccagtttatggctgataacataatagatgatgacatggatgaattagactctgactttgagcttgatgtagatagcagtggggagatagtgtatgccatataatttaatcatcgtctgcattttagagacagcataatgaatggacagcatcttaatattcaacagggcaatctcccttaatttaatcaaggaaagagaaagtgtggagatcgtatttcctgtaagattggatgatacacaaagttcatcatgttaatttgtatgttgtatacttcgtgaactgccgagggaaggaacatgattcttacactcagaagggttggtggctgagaaatcataattaccctttcctcttttcctgttgaatacttgttttatatcatatatatacactagcctttttgttgtctcttgtcagttatattggtgtcaggattcttgtttgcatatacatcagccttgtgaccattcctttaggagttcttgtgtttatcctgtgatctagaacatctcattcctgttcaccatttcagtttattttttgcatattttcgtttcggcactgttgtacctcttgtcctcttctgtgctgcaatgcaagtcacgaagctgtgaatgctactaaaaaaaatgtgataagattctacaatagttactagaatggggtggacggccttagaattttatttcctgagcctgtattaatcgtctcgttgcttgtgggttatatttcgatccttttattcctt

SEQ ID NO: 2842 - DNA, 1042 bp, Glycine max
gattgcagatgtctggtcatgtggagtaaccttgtttgtgatgctagtgggatcatatccttttgaagatcctaatgatccaaaggatttccggaagacaattcagagggttctcagtgtccagtattccattccagacaatgttcaagtttctcctgagtgtcgccaccttatctcaaggatctttgtttttgaccctgcagagagaatcactattcctgaaatattgcaaaatgaatggtttctgaagaatcttcctccttacttgatggatgaaaagatcatgggtaaccaatttgtagagtcagatcagcccatgcagagcattgatacgatcatgcagataatttcagaagctaccatacccgctgcagggacctattctttagaccagtttatggctgataacataatagatgatgacatggatgaattagactccgactttgagcttgatgtagatagcagtggggagatagtgtatgccatataatttaatcatcgtctgcattttagagacagcataatgaaagtacagcatcttaatattcaacacgacgatctcccttaatttaatcatggaaaaagaaatttgtggagatcgtatttcctgtaagattggatgatacacaaagttcatcatgttaatttgtatgttgtatgcttcttggaactgccgaggaagggaacatgattcttactctctagaaggcttggtggcttagaaatcataactacccttccctcttctcctgttgaatacttgttatatatatatatatatatatacacacattaggctttttgttgtctcctgtcagttatattagtgccaggattcttgtttgcatatacctgcttttgtagttttgtacacatactccttgttaccattcctctaggagttcttgcgtttatcttgtgatctagaacatctcattcctgttcaccatttcagttttttgcatatttccgatggaacattgttgtacctcgtcctcttctatgctgcaatgcaagtcacgaagctgtgaatgctact

SEQ ID NO: 2843 - DNA, 1100 bp, Glycine max
cggacgcgtggggtatcctatacggactcatccgaatattgcattacaataattaataaataccccaaagcataacaagttaaaaaagaaaaagagcattggaaccattggagattgctaaaatgattgaggaggagatatcagctttggtccctaaatggagggattggggcagtgctgagtatcaaaagcagcatagttttagctatgaagaagagtatgacatgagtaaccaccaccctttcttctcaacatcttctcgctcttcctctcatgcttctcttccagtgtttggttcttcctacaagaatatttcccactatcgtgggaatcattacccttttgctcaggctcgagctcaagatgaactatttatgaatgatgatgcgagctctcaaagctcaatgaactccttcaagtgtttcaatttcaattgctgtgaccctggcaatgaagatgagcatgatccaactctagtactaggagcagaacacctttactacaccccaaaaggaaacgaaaagtgcataagattttgtcctagagaagaagtgatggatgctgatttcaccaaacagttatgcaacatgagaatggattctcacaggtgtcatggaatgcacaggctaaccaggatccgttccttcgtggacctgaggagacaacaactgcaacgatcactgatggaggagattcacaagaggagaatgttcaagacggttggtgccgttgagaacattgggtttcagaatccagaaggaggcggatgtttttcttattgaaactccaatctccataggttccaatgctctttttcttttttaacttgttatgctttggggtatttattaattattgtaatgccttatgaattaagatgtccgtgaatatttgtatcctatacggactcatccgaatattgcaaaataaaacttgtaatatagtttaatttatgcttttgttaggagatgtttgcttgtttgtaagacttctgttgtgatatttctctttttgtatgttgaaatatggaatttcttgaaaaaaaaaaaaaaaaaaaatagagagcgacaaaacctttataagctctattttggcaatat

SEQ ID NO: 2844 - DNA, 1825 bp, Glycine max
atctttgtggggactgcggtggagcatcgttggacctcacatattgacatgtgtcagtggaagcgcgttagtgacggaatctgatggacacaccttcgaatggagccacgtagtccgccccccacctctttgccccgctttattgcatctcagaggccaattctttcgccgcttcttctctctttccaacgcttccccctgtggtgttctcgtgttgctggtaacaatatggttgttgacgctttgaatgaggatttgagaatcaacggagcagttgaaccgttgcctgaggactttgatgcaacagctgtaatcatagatcccgtgcctttggcagttgtagacaatggcattgtcaaggaggaggcgcagatcattaaaggaaaagagaaaagagaaatagtactgggaagaaatattcatacctcgtgtctagaagtcacagagcccgaggcagatgatgaggtcactggggaccgggaagctcatatggcaagtgtgttggccagatacaaaagagctttgactgaaaggacaaagcatcatttagggtacccctataatttggatttcgattatggtgcgctcacgcaacttcagcacttttccataaacaaccttggagatccatttattgaaagcaactatggtgtccactcccggcagtttgaagttggtgttttggattggtttgcccgattgtgggaactggagaaaaatgagtactggggctatataacaaactgtggtacagaaggcaatctccatggcatcctagttgggagagaggtctttccagatgggattttgtatgcttcacgggagtcacattattctgtgtttaaagctgctcgaatgtacagaatggaatgtgagaaggttgatactctttggtctggggaaattgattgtgatgatttcaaggccaagcttcttagtcaccaggataagccagcaattataaatgtgaacataggtacaactgtgaaaggggctgtggatgatcttgatctggtcataaaaaaacttgaagaagctggattttcgcatgacagattctacatccattgtgatggggctttgtttggtctcatgatgcctttcgtgaaacgagctccaaaagttacttttaagaagcctgttggcagtgttagtgtttctggccacaaatttgtagggtgtcccatgccttgtggtgtgcagataacaagattggaatatgtaaatgctcttgccagggatgtggaataccttgcttctagggatgccacaatcatgggtagtcggaatggccatgctcccatattcctctggtataccttgaatcggaaaggatatagaggttttcagaaagaagtacagaaatgcttgcgaaatgcacactacttcaaaggccgccttgttgaggctgggattggtgcaatgcttaatgaactgagcagcacggttgtgtttgagaggccacatgatgaggaatttatacgcaagtggcagttagcatgcaaggggaatatcgcacatgtggtggtgatgccaaacatcactattgagaagcttgatgattttctgaacgagcttctggagaagcgtgctacctggtttcaagatggcaaggatcaaccctactgtatatcatcagacgtaggtgaaaagaattgcctttgtgctttgcacaagtaattgcagcatcccatctagtgtttattgctgtagttggtttttggagtgtttatccagtgtacgtcactatgttctatcaggactttgatgcaattaataacatttagaatcttctttgctgtcaaaaaaaaaaaaaaaaaactcg

SEQ ID NO: 2845 - DNA, 1275 bp, Glycine max
  misc_feature (970)..(974): n is a, c, g, or t
  misc_feature (984)..(988): n is a, c, g, or t
gggccccccctcgagtcagctacgtaggccccccccccgaacaaacaaattaacactgaagaatagctagtactagctcttgacccttcttcccacctttttctggtccctcatccagaaatggcttccaattccattcttcttctttgtatctttcttgtggttgccacaaaggttttttcctatgatgaagatctcaagacagtggttcctgcacctgctccaccagtgaaggcaccaactcctgcctctccagtgaaatcaccatcttaccctccagggtcagtgaccacaccaactgttaaggtgccccctcctcctcagtccccagtagtgaagccaccatctccaacaccagcccctgttaaggtaccccctccacaggccccagtagtgaagccaccaacaccaacatccccagtggtgtaccctcctcctcctgttgctccatctccaccagctcctgtagtgaaatcaaagaaggattgcattccactatgtgattataggtgctcattacactcaaggaagagattgtgcatgagagcatgcatgacctgttgtgaccgctgcaaatgtgttcctcctggaacttatggtaacagggaaaagtgtggcaagtgctacactgacatgttgacacacggcaacaaattcaagtgcccatagaagcctaatatctagctagtaccttattacctatgttttttttttttgtttgttaagtaattaagtttgaatcatgagtatgtggtttgagttgctagtgtatttaataaccgagtgatcatcataaattatactagttatcgtgttaatcacaatagtcaacactgtttgtgttgtctataggatccatttgtggtccatgaaaaagtttatattcatatgattaatataaggaagtatttgctgtacgaaattcaggactataattaatatgaatatgaccttgctaaatttgattccnnnnngggcacatcnnnnngagatcatattagttgggtgggtgagatatccttttgttggcatggattcagccatggggtcgtaatattaaatcacctccatctaccactctcagaatggcttgattgaaattgtattgagaaaagcaaaacagaatgccttaaatcaaagcactaaatttcaatgtcagtaacttaagctataaaggaaaagtctttcctggttgtggcattggagtaatcatagtataagcaagttgtcttggaagtaaagttgggcatatagtataagcaagtcgtcctgcag

SEQ ID NO: 2846 - DNA, 1056 bp, Glycine max
tacggctgcgagaagacgacagaaggggagctcgatagacaacagctcgcggcgcgagatagagactgaagattgaagaacagtcgtcggctcctcgctcgcccttcgctgctgcgccatcaccgtgcccttctcaaagcgattttaacctaaccgcgttctttttttcttcagaaatcgagcataaggatttgaggattgaagtattgaacaccaaatcctttatacttgttgggcaagaagggagggaaaaaggagaaacacaaaaatgtttttccacatagtgctggagcgaaatatgcagctgcatccacgctactttggtcgcaaccttcgtgataatctcgtttccaagctaatgaaagatgtggaaggcacttgcagcggccgacatggatttgtggtggcagttacagggatagaaaacatagggaaagggctaattcgtgatggaacagggtttgtgacatttccagttaagtaccaatgtgttgtcttcagaccgtttaagggagagatcttggaagcagttgttactatggtgaacaagatgggattttttgctgaagctggacctgtccaaatctttgtttcaaaccatttgattccggatgatatggagttccagtctggagacatgccaaattacactacatcagatggatcagttaagattcaaaaagatagtgaagtgagactaaagataattgggactcgagtggatgctacagaaattttctgcataggtaccataaaagatgatttcttgggtgtgatcaacgaccctgcaacagtttaaatacccctttctgtactattgtatcgtatatagtttgcatgacttggatttttacaccttaatccgattcagatattatgttttcttactcgattgttgaaagtactaagtcgttgagtttttagttccagaatcaattttcaatcccacaagtaattttgggaaatgccatcaagcaagatgagctgtactattccaataaaattgttagttgcctgtaaatttcaaaagctgttgacgtagtaaagatgagactg

SEQ ID NO: 2847 - DNA, 2215 bp, Glycine max
  misc_feature (601)..(601): n is a, c, g, or t
  misc_feature (735)..(735): n is a, c, g, or t
tcagctacgtaggccccccccccccccgcgttgttgtcaatttgcaaaatcaggtcagatttctgggtttgtcgtttctgataatctggagtggagctaggtcaagatgccgtgggtttccttgtttgtggatcacaaaagaaattgtgttcgcttggtggtgttttttcgtgtgattctgtaatttaattagctcaggtgtagtcccattaggttgcgaagcaactcttttcattaggttgttctccttttcatttccaaagctgttggggggactgaggatgtactttgcggtaacaataaagagataccaagctgtgaaggaagttggacaaattaaaatgagtgttggagttattggatacaaccaattgatgcttgtttgccaggtaaatttttctttttccccacttctgggttgccatggaggaggatttgggttttgaacattagatggtattttgtatctttcctctgatgttaaccgcaagatattaaaatttgtacaattagcacatgacataagaatattgtgaaaaaaagcatgtatatcagtctttagtttctaaaaacatccaaggtttgaggtccattatcttgncatggctaatagctttacaaagcaacaggggatgaaggttaatgatagcgataactttttcaaaacatacataccattttgaatggtgtgaagttttctctaattgtataaattgtcttctagatttgacagtnttgaacaggaccaaattcactatttatcactacaatagcaaaatcatttttggttttttcccctttctattactactgctttaccacaccattttcttttgcaggccgagtattttcgtcagttgcttaaacctgttacgtagtctagcattgagggacaccggtttaggggggggattgccttatattgtacttcatcattataaagttgcagagagatgaagttttaatttggaaaagttgctattacttcttacatggaaattgaaatcaccttagcacctgctgtttagttttaacattcctttaggaacttccttccagccttagtacagaataattgccagttacataggctaaatcagcattgcttgctcgaacgtcagtcagattgaacagataatataatgcaaactcgggaatattttctcccagataagatgggacttcctttggctgatgagaccattgatcctcatatgcatgctccacttgcttctacctttgatgcatatttacctccaggtgtgaggcagataacacccattgaaagatttaaattgctaccctctgaggcttgccccaagaactttgtcatctttgatcaaacagatcaacaaagcaggatcatgttccatcctgcaatgacctacaaatttgacagtcctagcttacatgctcatgctactggttctcaagattttgagaagaacaaagtcaatcaaatggaaagagaattgtcatctgcttttgaagaagatcctaatgacattgatgcattgttgagcataggagcggatgaactagaagactttgacgaggaagaagtcagcacagcaaggactcgtgaaaaatatgaaagtttatccgatacttgctccagttattgctcaaaatcaaggaagaagaggtcatcatcatcatcttctgtacagaagtcttctggggctgggggttactgccacaatgaagggaagcaccaggagataaagaggatggtgaggatgttgagaaagattgtgcctgatggaggtaatcaaatggattctgttgctgttttaaatgaagctgttaaatacctcaagtctctcaaagttgaggttgaacaattcagggttgaaccatgaaaaatgtaagttagtcatatgctgctgcaacagttgactacatccccagctatgtttgttaccttctatgaatagcaccctttctcgccttgctcgccatcctaatgagaagaggccatgctatctgagtaataaattacgactgaccttttacttattctggttatgtaagaaaatactgtcataattgtacttttaggttgtgtttgattgtgtttctatgctggcttatttcttatagccccaaaactcaatttttattatgaatgttatgttatgaatgtactaaaaatttatatggctgataactccgctatttttgaggagatataaggtgagttggatagttaagg

SEQ ID NO: 2848 - DNA, 1056 bp, Glycine max
acgtgcctgtcccctgaaaggacatacaatcttcgaagatgaccgggaaggacgagttcgtctcttactcgcccctttcctccaaccccaaccctaaccctaaccctaacccttattccaatcctaatccttattacgaccctaaccctcatccttacccccaaaacgtcgtcgttttgctcccctcctaccgcctccgttcctaccgccgtcgccgccgctgcatcctctactccgccgcgctcttcctcttcctcctcatcgccggcgccgctttcctcctctacccctccgacccggagatccgccttacccggatccgactcaaccgcatcgggatccgaaccaacccgaggcccattctcgacctctccttctccatcaccgttaaagtccacaacagagacttcttctccctcacctatgacaccctcgccgtctccgtcggctaccgcggccgccagcttggcttcgtcaccggcggcggcggcggccgcatcagggcgcgtggctcctcctacgtcgacgccacgctcaccattgacggatttgaggttatctacgacgcgttctacctgctcgaagatatcgctaagggcgtcattccattcgatactgacacccgagttgaagggaaattagggcttttcttcttcactgttcctttgaaggcaacagtgtcgtgcgaagtgtatgtgaatataaaccagcagacaattgtacgtcaagactgctatcctaagtcactgggtgatccgctggatcagagcgcatatattgaagctggagatacatgatgtggtatcaaccttttgcatccttctcctatacagcgctgctgctggtgttttcattacattacttttagcgtgctgtataattgtatatggatcacacatccttgtaaattatggttgactacagaccacttgcattttgtatttaacgctcgtacgaggtaaattcaatgcaaatggtacctgggagttaatcagttttatagttgaaaacttgagaaataaaaatatattttacttctccttttaaaaaaaaaaa

SEQ ID NO: 2849 - DNA, 1330 bp, Glycine max
  misc_feature (1085)..(1085): n is a, c, g, or t
aatttgtctcttgagtaacattatcattatgtttagcattttgcacatgatacccactcaacttcatctcatatatccgaccacctccccttgcacctcgtacccaatcacttccacaaccaagaccaatgcaagcagtggagggatcgatggtcatggagtataggagtcaccatattttttacagtagtcaccaattaaaaaatgccaaaacataattgtagacattaagcatgccacaattgttgagtgtcaagttaagcaaaagcaaggattaataatggtgtttgtataattttgttttacttgtttgtctcctgaaagtaccatacaatcttcgaagatgatcgggaaggacgagttcgtctcttactcgccccttccctccaaccctaaccctaaccctaaccctaaccccaaccccaaccccaacccttatcccaatcctaatccttattacgaccctaaccctcatccttacccccaaaacgtcgtcgttttgctcccctcctaccgtccccatttccagcgtcgtcgccgccgctgcatcatctactccgcggcactcttcctcttcctcctcgtcgctggcgccgccttcctcctctacccctccgacccggagattcgtctcgctcggatccgactcgaccgcatcgggatccgaaccaacccgaggcccattctcgacctctcattctccctcacagttaaagttcgcaacagagactttttctccctttcctatgactccctcaccgtctccgtcggctaccgcggccgccagctcggcttcgtaaccggcggcggcggcggcagcatcagggcgcgcggctcctcctacgttgacgccacgctcaccatcgacggatttgaggttatctacgatgcgttctacttgctcgaagatatcgctaagggtgtgattccgttggacactgacacgcgagttgaagggaaattaggccttttcttcttcactgttcctttgaaggcaacagtgtcgtgcgaagtggatgtgaatataaaccagcagacaattgtacgacaagactgctatcctaagtcactaggtgatccgctgngatgagagcgcatatatcgaagctggagatacatgatgtggtgtcaaccttttgtatactttgtctatacagcgctgctgctggtgttacatcacattgagcgtgctggaaaattgtatatgggtcacacacccttgtaaattatggcttactaccagccactggcattcggattaaacgcttgatgacggaaattcaattcaaattggacccttgagtctgttctgtacttgcgtaggaagcta

SEQ ID NO: 2850 - DNA, 961 bp, Glycine max
aaaaaagaaaggaaaagccgtacggctgcgtatttctttcttacagctacacacataaacaatagaattgacccttgtgtgttgtctctctgagattgtggtgagtagcataatggaggcaccgaagctgaaggtagtgacactgaaagccatcgaagcaactccgtcaaccttcaaagagttcggtcaggtcgtggaggcttcgcgagacggccaggaattcggtccccacgatgctcaactcgacctttcccaaggaactccaaggttctacattatcaagcttgaaaaatgcccgcttaagttttctagtattacacatcatgcaatcgtgactcagtgcctcgggtctatcggtggtcatgtttggtatcttggagtggccaagtcatctgttgttgattcaaatgagatcaaggatgacacaggcaagaagattgtgcagtcacgttctggtcattcatatgtgcctccagccattgaggatgtccaagttttcaagatttcaggttccaaatttcttaagcttaaccggggaacatggcacgccggccctctatttaaggctgctgcaatggacttttacaatctagaactgagcaacacaaatgagactgatcataccacacactactttaagaaggacgatggagtgatgtttgtaattgacgattaacttcataattttatctagtttccagcatttcaactgattctgcatgttatattataccattaacactttgtttggtttgagtgacttagcagggagtgatttaagttggaaggatttaggagagatataaatcatttcccttgttgtttgtgtgaaattacgaaggataaattacaaaaatccgttatttgggacggaaattgaagagtgcgatatgcattattttgttttcaaaaaaaaaaacattctatcaaaatgttttgatctttaaatgcaaaaataaaa

SEQ ID NO: 2851 - DNA, 637 bp, Glycine max
accagcacactaacctttttttgcatatacatacacacaagggtcttggttgtgtcgcacaaaccatattaaaacccttttttgaaatactcttgtgaccaaccaaggtctcttatttctagacataggaggaggagagaagaattgtttctatttcaaagattcagcaaattaaggagcagaaaaaagtcacatattttgttgttgaattcatcaatatggctaagggaatcagaaacctaagttcgtggatggaggttgccccggcaccaataattttcccaacaaagccttctaattcgcctgctttggagaccatcacagaagaagttgctgaggatgatgaagcttccatgaatacccttctcaagtagtagcaaatgttgcaagatcaattatgaagcctcttttgaagaggcttcagcttatgaagattgaagaggatcaatcaagttgtggaaataatcactagttgttattcgctacaactttgtatagtcaattttgtgaaatatgtagttctctttttccttctttttggatgattttaatctatacatccctgcctttgtttaggctggagttggtttattaagaaatggcaaattgcagtttctcgttgttttgaaaaaaaaaa

SEQ ID NO: 2852 - DNA, 1034 bp, Glycine max
gcctagatgggtgtggagactcatctacacatgaatctggtctcttttttgacctaaattggaaaaccaatttccaaaatttgcttatggtttgagaaggggtcccaagaaggaagaaaaaccctcaggcacgttataattaaaaaaataaattatcgtcctattaataattgatttagcgagtgagtgtttcttttttttctctctctctctgaacttgaactcaacccttccttcgttccgcgacaacgatgaccaactacggcacaattccaacctcctcctcgccttcgaccaacctcgacttcatctcacgcgccaagcagcgcgtcaaggagggcctcggaacccgccgtccatggaagctcatgttcaatttccgatccttcggtctccccgccggggtcggagacgccgtcgcgcgtgtgagggagaacatctcctacttccagatgaactacgcgatcgtcgtgctcatcgtgctgttcctgagtcttctatggcatccaatctcgctgatcgtgttcgtcgtgctcatggcggcgtggctcttcctctacttcctccgcgacgaaccgctaatcatcttcggaagactaatcagcgaccgcgtcgtgcttatcgttatggcggtgctgaccgtcgtgctgctgcttctcaccggcgccatcggcaacatcctggtggcgctgctcatcggagcggtgttgatagtggcgcacgcggcgttgaggaaaaccgatgatttgttcttggacgaagaagaggccactggattctctcctcccggtgctcctctctcttgatcccaatcttctctttctttctatgaatttgttatttggtcaatttagtaaataattttaggttcagtttggtttctttcggtttatatgtttttgccctttttcggaggggaaatttgcatttcgtgtctgtgaagagagatgcttggtgaagtgaaattcattttcttacgctttgttaatttaatttagttattatatcagagattggatcatcttttttttgtc

SEQ ID NO: 2853 - DNA, 1708 bp, Glycine max
ttttttttttttttttttttttttttttttttttgtgtatcccaaaaggcccttttatatagtatatagcatacaaatgaaccatgaagtctgaatgtgttcaattaccaatccttgaacattatcacacagaccatgttaccatgtcaatgggaccaatctttaaaacatattcattagtaagagcttgactgtcattcaaagttacaatcagctatagctttcacgataccataaagaatcaaataatagtaacaataaatataatggggtatttagaacttgagcttaagtaggaatggcattttgtctgagaaaggagggtccgagtactttccagtgagaatttgtgatgctacatattgatttgcagtctcagtgtaatgaatcccatcccaacttatgtactcactggtatcattacaagcttttgctgtaattgtggtcccgttaaaggtcttggtttccccacaggaaactcgactgtcatagtttagtggtggacctccgtatccacaacaagccataataggttgttcaaacccgtatctagaaaagtttgaaatgaggcttgattttatagtgaagatatcaacgtatgtgacatttgaatctggatattggccctgcaatttagtacagagagcacgtagctgtaggttaaaggttttagcagcttggttgtgtgaactaacacaccctagtccgtcaagctttgatgaatcagttccaaatttggctatattctgaggcaagcatccgagaggacctgtattgtgtatccagaaatatctagccccctggtcatagagattctttattcccttttcaagctctaaaagaattgtggggattgaggcaagtatttggtctaatgttttggaataaaatgctccagcaagatcattctggccaatatcaaacatgtacaatcccttctcaaaaacattttcatcagggacgtacttatcaaatttcctgcctttagcgatcaattcaagggcccgagctttgaatcggaggaactgagacacctgaaccccaaaggagaaggggcagagggatgatgcagtggctggaagtatagttgcagctgctgcggcaaagttgcatcccttcctaaaatttggcaaacctaacgaatcaagataggcatttaggaatggcaagtccatagcatccattaggaagtccactatgagacggccatcgcagaacctcccagaaggaattttgaagtagtcctgtccattaggtggagcgaccagaaagcccaaccctgcagcaagttctcctgtgtccgaatttgaatcaccgaagttgaaaactgcgggatatttgaactcgaccgaatttgccatagccaaacacatggtaaataagacaaattgaagaattacattcttggaagccatgccacgtagttttcacttgtgtccaatggaaccaactaccaactaggtaggctgctaccaattatagctccggatacactctcacaatggaaaatgattccatgccttttatatgtgcacgctcagttggttgcttcgaatagctaacgtgaagtcttacctaaaagacaattaataaaacccttgctttagatggtggaaaagcaactgaaagccaaaaggaaaacgttccttgagttaccatgatatccttatattattactgtcaactgctattatattaacccatatgc

SEQ ID NO: 2854 - DNA, 1714 bp, Glycine max
ctgtatccttggtggagaaccattctgcttgcagaacaaataggggctggtcggcccgcgcggccgaatggccaggtttggaaacctcatctgttacttctatcttttgcctccaaaattctggctgaagcaaatgctcttctcaagttacaagatagtccacctgggaagccatatgtagctcgaacaagagcgcctccattaccttttcttttgtcaacccttctccaatcaagaccgcagttaaagttgccagaggagcagtttggtgatgaggacagtcttgatgatgaccttggtgaatcatcagagtctgatgatgaaaatgaacatgatgacttgccgccatttaaatcagctacgtaggcccccccccaaaagctgtctaaagctcataagaaagcatattttgatgagttggagtatagagagaagcttttgatgaagaagcaattgaaggaagaaaaaaagcgacggaaaatgttgaagaaaatggcagaatcagcaaaagatctaccaagtgaccatagtgaaaatgtggaagaagaaagtggtggtgcagcttctgttcctgttcccatgccagatttggccctgcctgcttcttttgattctgataaccccactcaccggtatcgttatcttgattcgtcatcaaatcagtggcttgtaagacctgttttagaaactcacggatgggatcatgatgtgggttatgaagggttgaatgtagagagattgttcgttctcaaggaaaagatacctttatctttctctggtcaggttactaaagataaaaaggatgctaatgttcagatggaaatatccagttcagttaagcatgggaaagggaaagcaacttcattaggttttgatttgcaaactgtggggaaggacttggcttatacattacgcagtgagacaagatttactaattttagaagaaataatgcaaccgctggtctctcatttactttacttggtgatgccttatcatctggattgaagattgaagacaaattggttgctagtaagcgattcaagctggttgtcagtggtggcgcaatgacagggcgtggcgacattgcttatggtggcagtttggaggcccaactgagagataaggattaccctcttggtcgtttcttaaccacacttggcctttctgttatggattggcatggagatcttgctgttgggtacaatgtgcaatctcagatcccagtaggacgttatacaaaccttgttgcccgggccaatttgaacaatcgaggggccggacaaataagtattcgattaaatagttcagaacagcttcaaattgctttgattggtctcatccctctcctaaagaagctagttggttatcatcaacaattgcagtttggacaatactgatgatgatagcgttagtttatttgagctggagcactttgatggtattagggaatgatttcaagatggcatctttcatgaaatgagtgatactgattttcgttatgttttttatactcgaaagtttgtcttatttgatcattttctctgtaagcaattctcttttggtggttttgttatattatgctgctgaactctaagaattacatcaatttattcttgtcttctgcgtatatatttaaggcattgtaaattcttctcttctttcttagaatgttgtcacttgtacttttcggcttctccatactctaatagcagt

SEQ ID NO: 2855 - DNA, 1848 bp, Glycine max
  misc_feature (59)..(59): n is a, c, g, or t
  misc_feature (657)..(661): n is a, c, g, or t
ggtagtgcagcagccccgtgctaatggtgccgtgtctaatactcagtcccagcaaatgnaggactcctcgagtggggaggctgaggagtatgatgagacacgtgagaaacttcagatgatcagggtgaagtttttacggttggctcataggcttgggcaaactccccataatgttgttgtagctcaagttttatatagattaggactggctgagcaactccgaggaaggaatgggggtcgtgttggtgcttttagctttgatcgtgcaagtgcaatggctgagcagcttgaagcagcaggtcaggagccacttgatttctcttgtacaattatggtccttggaaagacaggagttggtaaaagtgctaccatcaattctatttttgatgaggttaagtttaataccagtgcttttcatatgggaaccaagaaggttcaggatgttgtgggaacagtgcagggcattaaggtacgggtcattgatacgccgggacttctaccttcctgggcagaccagcgaagcaatgagaagatcctccactctgttaagcactttattaagaaaactccacctgatattgtgttgtatcttgataggttagatatgcagagcagggattttagtgatatgccactcttgcgcacaataactgaaannnnngggccatccatttgggttcaatgccattgtggttctgactcatgctgcatctgctcctcctgaaggccctaatggtactgcttccagctatgactggtttgttactcaacgttctcatgttgtgcagcaagccattcgtcaagcagctggtgacatgcgtctcatgaatcctgtatccttggtggagaaccattctgcttgcagaacaaatagggctggtcagagagtattgccaaatggccaggtttggaaacctcatctgttacttctatcttttgcctccaaaattctggctgaagcaaatgctcttctcaagttacaagatagtccacctgggaagccatatgtagctcgaacaagagcgcctccattaccttttcttttgtcaacccttctccaatcaagaccgcagttaaagttgccagaggagcagtttggtgatgaggacagtcttgatgatgaccttggtgaatcatcagagtctgatgatgaaaatgaacatgatgacttgccgccatttaaacctttaactaaggcccaggtggaagagctgtctaaagctcataagaaagcatatttcgatgagttagagtatagagaaaagcttttgatgaagaagcaattgaaggaagagaaaaagcaacggaaaatgttgaagaaaagggcagaatcagcaaaagatctgccaagtgaccatagtgaaaatgtggaagaagaaagtggcggtgcagcttctgtccctgttcccatgccagatttggccctgcctgcttcttttgattctgataaccccactcaccggtatcgttatcttgattcgtcatcaaatcagtggcttgtaagacctgttttagaaactcacggatgggatcatgatgtgggttatgaagggttgaatgtagagagattgttcgatctcaaggaaaacatacctttatctgtctctggtcaggtaactaactgataaataggatgctgatgtcaccagggctatatacgtttcagacatgaatgggaaatggatagcaacttcgatatgttgtgattggcagactgtggagaaagacttggcttatactttacactgtgagacatgatttactaatatgccattaaataatgcaaccgctggtctctcatttactttacttggggatgccttatcatctggattgaagattgaagac

SEQ ID NO: 2856 - DNA, 887 bp, Glycine max
cgattgggtaccgggcccccccccgggccgcctccttaggccccccccccgttttttatttttattattattattattgttgttatttctgccacaacatttaggggtgcattgcaaatggcttccattgttgcaagcttgccgccaccattgctgctccctgctagaaaatatcatccgggcaacttcccaagttcccctttttctcttctttcagggagacggaatcatgtttcttttgttgtgaaggcttctggagaaagttctgaatcttcaactacccttactgtttttaagtctgttcagaatgtttgggatcaacctgaggaccgtctgggacttattggtttgggatttgcagccatagcagcattttgggcatcaacaaatttgattgcggccattgacaaattgccagttttcccaacagtactggaattaattggaatattttactctgtgtggtttacttatcgctatctcatattcaaacctgaccgggaagagctttttcaaatcttgaacaagtcagcatcagatatcttgggccagtaagatgtgcggccgaaatgctatgctagattgggaggaaaaggtgaaaggggctttggttgtcttcactccaatcgtaaatgtcaatgcaaggattatttatttggtttaagaccactatattacatcaatgagttaaagcttacttcttttgtgttggtttctttgtataaaattttaactgagttcccttgtgcatccaactatcaagagtaaaactagcctaaataatgcccagaacataactgctaagtgccaacttatatactgccataaatctttacaaaatcattgtatgtgtattctcatagtaaaaaaatgctaatcctttgggg

SEQ ID NO: 2857 - DNA, 1095 bp, Glycine max
tcttatccaaaaaacaacaatgaaaacgagatatattaatacaacaccgattttcgttttcctaacgagaataaagaaaaggcgattactatagcaacaaactctttataaaagcacatcaaaggaaccataaacaacaacaacaacaacgtaggagaaagaaaagaaaagaaaaccatcgaggacgaaattacaacctagcacacagagatatatagcggaagcaaccaacagaagaaccttcaacagttcctccacacgtacaacaacgttgttataaaatcaccacttgcatgcttacaataatgtcgagcagaaagaaccacttcagttcacgaagccatcgttttctccctgtggcctcagacatagacgactctgcatccctaaccatggattcggaatccgcgttcgagttcgacgagtcagagctttacaactcggtccaagccaactcgttcgagttccagagatcgcttcacagccgaggctctaataattcctcggccaagaaaaaaccctcttcctcctccggcgcgccggcttcaatgccggtcaacatccccgactggtcgaagatcctcggggatgagtaccggaggaggaacagctttgacgacgacgacaacgacgacaacaacgagggttacgacgatgagaggagtggaagggtgccaccgcacgagtttcttgcgaggaatagggtagcttcgttctccgtgcacgagggtgttgggagaaccctaaagggaagggatctcagcacgctccgaaacgccatttgggccaaaaccggttttcaagactaaaaaaaaaaccccacaaccctcactcacccaaccgaatcgaatcgaatctttattattttttttttcttaaccctttttggttctacttctgttactgttgtgattggtatgtatttttagttgagttttccttttgttaatttttggtggtggttacgttgacgtatatgaggtaattataagaggtttcggttattaattccgaaacctgaggctcgtgattttgtatctacgtacgtagtaccctcaaggaatatatatctttttttcaaaaaaaaaaaaaaaa

SEQ ID NO: 2858 - DNA, 1801 bp, Glycine max
tcagctacgtaggccccccccccccgatactgcaggtaatctggcagggacaaatcctattcctcctcctgtgcaagacataattgacccgtcaatggctagggcatctcatcatggtatctcctacgttcgcccccccccccccccaggaggtgttgctggaggagttgttttactacttgtggttgggctatttgcttttgctgcatcacgtcgtcgcaggcaaggaaaggattctggtacaagtgaagggccatctggctggcttccactttctctttatggtaattcacactctgcagcttctgccaagaccaacacaacaggaagctatgcatcctctctaccatcaaacctttgtcgtcatttctcatttgctgaaatcaaggctgccacaaacaactttgacgaggctttgcttcttggtgtgggaggattcggtaaggtttacaaaggagaaattgatggtggaacaaccaaggtagcaattaaacgtgggaatccactatctgagcagggggtgcatgagttccaaactgagattgaaatgctctcaaaacttcgtcaccgccaccttgtttcactgattggctactgtgaagaaaacactgaaatgatccttgtctatgactgtatggcctatggaacactcagggagcatctgtacaagacccagaaacctccacgtccatggaagcagaggcttgagatatgcattggagctgcccggggtttacactatctacacactggtgctaaacacactattatccaccgtgatgtgaagacaacaaacattttactagatgagaattgggtggctaaggtttctgattttggactgtcaaaaacaggtccaactttggataatacccatgtaagtactgtggtaaagggtagttttgggtacttggatccagaatacttcaggaggcagcaactgactgacaaatctgatgtttactcgtttggtgtggttctctttgaggtattatgcgctcgcccagctttgaaccccacccttgctaaggagcaggtgagtctggctgagtgggcagctcattgctacaagaaaggcattcttgactctatcattgatccttatctaaagggcaagatagcttcagaatgcttcaagaagtttgccgagactgcaatgaagtgcgtggctgaccagggcattgataggccatccatgggtgatgtcttgtggaaccttgaatttgctttgcagctgcaagaaagtgccgaggaaagtggcaacggctttggtgacattcactgtgaagtggagccattatacacagattctaaaggaaaggactccaatccgggttatgatggtaatgcgaccgactccagaagcagtggtatttcaatgagcattggaggtagaagcttggctagtgaagactctgatgggctaacccctagtgctgtgttctcccagataatgaatccaaaaggtcgttaaggttatgcagcagtaacaacactttcaatacatacacagtcaacccactcaagttctgtagtacaatctgctttcaccaaatttgaatgttactcgttattcattttcttaatattgctattcctttgtatgttgtttctaattttttatgattatgtaagttgtaatttgtgaccatgttatataaagattgaagagcaaacatgttgtaacgaggttgttatctgaattatttgaaaaccctttccttcaaagattgataagagacgtgaaaggcaaagaatacgtgtttctttctctctttttttcaaaaaaaaaaaaaaaaaa

SEQ ID NO: 2859 - DNA, 1363 bp, Glycine max
  misc_feature (610)..(610): n is a, c, g, or t
  misc_feature (618)..(618): n is a, c, g, or t
  misc_feature (649)..(649): n is a, c, g, or t
ccacgcgtccgcaaaaaaaaaaaaaaaaaaagaaaacccagaaaaactctgaagaagagttcgttgctttctgcttcactgcgaagatgaacggaggcccatctggtttcacaaatgctcccgtcacaagggccttcatcatcgcttcggcgcttttcacaatcttctttgggatccaaggccgtttcagcactctggggttgtcgtatcaggatatttttggaaagcttcgcctttggaagttgatcatgtccatattttccttctcgtcaacaccagagttgatgtttggactgtatcttctatattacttcagggtctttgagcgacagataggttccaataaatactcagtctttatcgtgttctccatattaacttcactactgcttgaggtccttgctgtagcacttttaaaagatcctacagcaaacctagtcactcctggaccatatggccttatatttgcttcatttgtaccctttttctttgacattccagtttcaacacggtttcgtgtgtttagcttcctcttctcagacaagtcattcatatatctagctggtcttcagcttcttttgtcatcatggaaaaggtctatcttaccggngggatgtngtggcatccttgctggttccttgtaccgttntgaatgtcttttacattcgcaaagcaaagttcccagaagatgatctcatcattattttcaagaatttcgttgccatctatggggagtccacgtgcaccatcatcagcaaggaatgttgtcaggaatttaccttcctatccaactcaccaaatggagagaaactaccctgctccaatgcaagctgcagtagagccaacggaggactcgatcactacccttgtctctatgggctttgacaggaattctgccagacaagccctagtgcaggccagaaatgatgtcaatgtggccaccaacatcctactggaggcacagtcgcactaattccataaatgtagcgcataaatgagagccggattgttctgaattgatagatggaatcctaatcaatgaaggattagaaattcactaatcatgatgtgaggatgtttgtgaacttcaggcattcctatatagtatcatcctcaaggactcctgctttctgaggatcatttttcccaccttaacttgaatctttagataaaatatcttgagtactggcattgatagacaaatgagttaggatcctgtacaaaatacttgcaacatatggaaaattatgcacatttttatgaagtgtgaatcagatatttgtagttgcaggttcttctgtgccacccacaaactaaattaaaaatcatattgcaaattgttgaggttaattttgtgtcccag

SEQ ID NO: 2860 - DNA, 1981 bp, Glycine max
tcagctacgtaggccccccccccccccataatgcagaagctcttttcaaggaaaatagatataaattatatagtttagataaattgttgttgagaggtgtcttgattatctcatcagcatgaaatcatactaatatttgggaattatttgggttatctgatatttggtatctagctacttgtgcaatgatataatgaacgtaagcttttgatgatatacattatcatgtaagaagaaaaatatgaaacaagcttttccatatgttaaaattagcttatacacaccttaaaaatcagcttttggaaaaatatgagagattctacaaattaacttgtgcataatataatcttgtcctattggagaagttgatttcatttttccttattttcttctcctataagtgctttaaaattaaatcagtttggcaaaaaacataagctatcttattcttgatgcccatgtcatgtttactagctatggaatttgcttgaatgagagtattttactattttcatgtccactagtcatgttggtgatggaactatggatttccccctccaataagactgagtgaattaatgcaatagaggaatcacaagaagtgataaggctatattgtgttaaagatcaacaattgaatattatcaatatttttaaagtatacatgtaatttgctttgctgttcttaaattgcagagtcatgctaatcggtataagcggtatatcgttcctgtgttatctgttcagatggatttttatcttcgtgtttttgttcgcatatatacttctgccagtgctatgaaaaacacccccctaaagctttcatatgtttatcagtgcactggttgtgattctttccacctacagcccattggaagaaccatttccaagaatactagtgtcagatatttgcctggctttggtcctgttgttcctcaagaatgccgtgattgtgggaaaaaattcaatatggggggccctatatggtctgcccctatccacgaccaagaatgggtggctgctattctagcagatgtgaaatctatgaaagacagatatccagcttatgatcgcatttcagctgtgttgactacaatatcagaggaattgccagatgttcccctctttttgagtctgcacaacctctgtgcaaccctcaaatgcacttctccatcagcaattattttccgttctgcagtgatcaatgcaggctatcgtatatctggaactcatgttaatccattgggacttaaatcagatgcacccatggatgttatttgggatataatgcgctgctgggtaaaaaatcatcctgtgaagcctcaaccagcagatcaaccaggaagcatcatacttgcaaaggaacctgttcttcaggctaattttgctcgagctgtagcatctcttagcaaggcacaagctaagaaggttgcgcgctttcttccaaatcctgaaagacactggggtccaaaacttagggcaggacgtcaaattacaagcaagcatgtctctcttttgggtcctgaagcaattaatggagctctcaatcaggaagacgatgaagaacctaaaagtaagaagccaaagaccgaagatagtgtcacttcttagttcacaaatgaggttttgaaattaattttcatcaatctagaggtcatggaattccatgcttgtggttactaaagaatccatttgtcttcactaaattttgcagagtggcgagtaaaagtagaaaatgtgcttgtttctcaattaacaactaggtaaattgctgagggaagattaaggcactttgcatcaaattagatatcagaatctggcattttattttttgggattatggaaattgtatcgtgtggaataatatttattttcggtgactttgtatttggtgtttcttataatcgaagttccaatttctgagcaaaaagtcagacaataaaataaaaaggaaattaaaaacaaaaaaaaaaaaaaaaaa

SEQ ID NO: 2861 - DNA, 1963 bp, Glycine max
agagggaaaaaaagcatgttgagaagggaggagaaaaacaattttgtacatcaaacattatgcactcggtatgattcaacaccaattgttctcttcggttttgaaatttgctgatatcttcgcaaatcatgaaatcgtaggttcaaacatggcataaaaaatgttgaaaatagaaaagctacatttcaggatattaaacaaggtcgatgcactgtgaatcatgtattgttggggaaccatgtttttgagacaactcaccatggaattcttttgggtttttttggggggaggggggagggggggatcattttcatcaaacaagcattcatataggtagctgtttgtactctgccaaaagttttggaatatcatccatgcgcaactgagtagcattttttacatggtaaagttgatgcatcacttgttcaccaaatccaggttgttgagcagatgcactcctttctagatattgcctgtatattagacgttggtaatcccgaagcaacggtccaagctctttgagtttaaccatattcgattcagactttctccagtgttcacgaagtgcttcaattgccttcagtgaatttgtagaaacattttcacctgctaatcttgatgctaactcaagaagctctttatcttccaactcatttacaatatgaagcctagaattggattccgaaactgatatttgcaatcgtctttgcaattcagagaaaggaaatttctctgtttggctttccttgaactgaggttgaaaatcatcattaagtgaggtaacatccttactttcaggaatatttctgggtggagatgcagttaatctacttgcaattgggtcctcttgagggactaaccaccagggatcaccataagttgatttcccatcaaaaccaccaattagcagataccgtgaaccaataattgacatagagtggtatgctctagcaggagggggttcattgcctatggagagccgcttccactgtgctgaaactctgtctaatataatgcaatcattataatagatatcataacgactcaaccatccaccagtcccatgccctccaaacatcaacaaatagtgtcctccggatgtcactgtatggccacatcggggagaaggtgcttgacctggaagctttaattgagtccacccaggtgcttcattctcttcttcaatgaggcccttcaacgcccataaatcgcccataattggtccacctcctcctcttccaccataaacaagtaaccgtttttcgaccattgtggcagtatgcccacatctagggtgcggcaatgttccagaaactgagagctccatccactcgagggatattgtatccaagacataaacatcagataaccacttttttccatcccatccaccatacataacaattttacggtttccaactgctgaagctgcagcaaaatctcgtggtgaaggcaagtcaccgaagccagttagttcagaccattgccatatatcagtatccaaaacccaaaagtcccccaacctttgactcccaaggcgaccaccaaaaatgaacatatgacaatcaatggcaacggcaacatggaaagcccgagagctaggacccacatgcccatctgaaccacttccagtgcactcaggctgaaaccattgtttggcctcaatatcatagacagccatatcgctgagaaacttcttatccacgagtcctccgaacacgacaaccttggatttcccgatgttaacagcggaatgaccactgcgacgttggggatgggttccggcgaaatcagaagaagaagctcgaacccagtaatgcattcttcttgtttcgtttcaaagtccttcgattcgaatcaaaggattgtgaattgggatgcagcaatactaatcaggatcaaccctgcttccaccgggggggggggggcctacgtagctgattattattcctcgagccgaatt

SEQ ID NO: 2862 - DNA, 1080 bp, Glycine max
tacggctgcggaagacgacagaagggggaatcaattgaattgaatctctccaaatttcacttcaaatgcgagtagtgttgttcttctctgttttcattgttgattaagtagttgtgaatcttttgccctttaccatatgaaggtgttaactcgttctctatgctggattttatggaactggagggataggtaaaacaacgaccgctgtagaagtaattgttatagttagttgttgttttacctattccacccattccatgtatccctttcctgagggcgcggttaatttcttacttttcactgccgattccgttgaagctttgggttttaatcagacgaatgaaagtatattaagtttttgctctggatttatgtgcctgtaaaatgatcttaagattctaactttattatttgtttatgggattttttttttcttttttggccaatagttcacagatctgagagtttcaagttttccctcttgttttctatgccagtaaattgattttaagattgttaactggatttttgttttttttttgtttatttggtattttttttctccagatgttcatagatctgggagtttaagctttgatggttgttgatttgtcttagttatatctgattgtgatgtgtttggtgttccgattttgaagatctattatttcaaaattgagaattctattaagtttatttaaggttcatgaatcggtggaaagagctcagatcttggttggtttatcctgcaattagttcaatgttgtttttcttgttaattgttagtaggagggatcgaatcctttatctcctaggtcaatgttgtttgcaaactcggcatatttgtttattttttcttttttattgatcgaatttattgatgttataacatatcagttgaattgcttcagaatgatcttacttgtttaaagaagctctaatcggtttattgggagcttattgaagaaattaaagggattccacccaacttaggaacattctacggtccgaattttaagaatgttttgagggagtttatttttgaatattttgtgaggatcttcaaaaagctgcacttta

SEQ ID NO: 2863 - DNA, 819 bp, Glycine max
  misc_feature (5)..(8): n is a, c, g, or t
tcccnnnncgacccacgcaaaccatttcccagaaataaacacgagaaaaaaaatttcacataaaaaagttagtaatatgtttccctgagtcactatatatgtgaacctcaataatcaagtatccgctcttaaagattcagattctcaatagagagaaagagagagaaatggctttcacgatttccagatctcaatctgctttgacagatagagagaaggagaatcttgacaacttagttgacaaggagtgtgcaaccacagagggtatgatatcgagccagctcaagttgaagtcttctttgtcatccaaagcgtcttctcatcaaagcatggacaaacatgcaatccttcgacgtatcaggcaacgcaggtttaataacaaagccaaaaccgctctggaagctctcataggcacctcagaagccaacaataccggcactgcccaagaacagaagtggcttcaactgggtgactctttctcatctccttaactggaaacacaatctccccccagtttgcaacccatctataaataccctctttagtttccttcacccaacaaagtcatcttttccatacgcttgcatggctaggaaaggaaatccaacccgatctttatcggcatgcttaagaaatcccactatgtatctattaactgtagtagaccttgtcggtttgctactttaggtgtgaccttgtgaataccacgttcaattgttatataaatatattatattatgatgttatatatctaatatggaaagtctaagctttgttttgcaagtaaaaaaaaaaaaaaaaaaaaaaaaaaaaaaaaaa

SEQ ID NO: 2864 - DNA, 650 bp, Glycine max
tttttttttttttttttccaaatcctccaggggatcaaataatatcaaaggaggaggaggcgacaactataacgacgagaatctaagatttcaccaatcaaacaatatttacaccgaaaatagaaaaaaaaatccaaaataaccactgaacaacaacaatgtttcaaatatcacgaaccaagaacgagaacctctctctctctttctctcgctctccacaacacccagcaacaaaaaagcacgaaactttgaaatgctaatgagacccccacaaaaactaaccgatccctaaatcacccagaatgcagtgaggaaccgattcgagcattaccacgaaaaaataaacaagacccttaatagaaaacgagtttttctctctgtttagaacaaaaaggtgaagtctttgaataaagaagaagaagagaagagaagagaaagtgtgaacgaaggaagaaactttaaatgatgggaagaattagaatcaagaggagaaagagaagaagtacagagaaggttccctttctaccggaataggctcgcatctcaaacaacaacaacgccacttccttcttacccatctttctctccttcactgctttcttttcttttcttttttcccttcccccttctgtcgtcttctcgcagccgta

SEQ ID NO: 2865 - DNA, 1541 bp, Glycine max
tcagctacgtaggcccccccccccccggcagttgatatttggtggctcatctgtttctggttgaagtgtttgtgcagcatggccatggtaggcggaaccatgatggctgcgtatttgcgtgtatccatgcccacttccccacagtcccccaccactacgaggaggagatgcagaaatctgaaaacttcttgctccgttaacagacccaaaattccaatgccccctctcaaccctaaagacccctttctctccaagctcgcttccgtcgctgcttcttcccctgaaacgctcctcaacactcccaaaaactccgacacccttccttatctcgacatcttcgactcccccaaactcatggcaactcccgctcaagttgaaaggtctgtttcatacaacgaacaccggcccagaaggccgccacctgacctgccttcgctgcttctccatggtagaattgtttacattggcatgcctttggtgccagctgtcacggagcttgtcgttgcagaattgatgtacttgcagtatatggatcctaaagagccaatctatatttacataaattccactgggactacgcgagatgatggtgaaacggtaggcatggagacagaaggttttgccatttatgatgcaatgatgcagttgaaaaatgagatacacacagtggcggttggatctgctataggtcaagcctgtttgctactttcagcagggtctccgggtaaacgctttatgatgccacatgctaaagccatgattcagcagcctcgtattccttcctctgggttgatgcctgcaagtgatgttcttattcgtgcaaaggaggtgataattaacagggacaatctggttaaactactggccaaacacacgggaaattcagaggaaacagttgctaatgtgatgaagagaccatattatatggatgcaacaagggctaaggaatttggggtcattgatagaattctttggcgtggtcaggaaaaggttatggcagatgttgcttctccagatgactgggacaagggtgctggtatcaaaattgtagatggattctagttcctcttttgtggatacgtttcttgtttcttgtcaatgtcacatgtttcggtaggatttgttttcatggtctacgggtccagaaatgttccacagctattcttcatagaacactgaccccgtagttacccaagtgcccaggagacagaggagttgatggacgttttactaagaatgtcccgaaaaaagaaaagaaaagaaaaagaaatagtgattgttcatccatgtaatcatatacagtgattggttctgactattagttagtcattggctgcctacccgaattttacacagggactgtgattggcgtttatcattacacaattaaatagagtacataatttgtaatctttttgtttctatatcattcgatcagagatgaaccaaaagaaacatctttgcaaatcacgtaccactcttctctttcaatttaatttaattgtagcgtagcaaaaaaaaaaaaaaaaaaaaaaaaaaaa

SEQ ID NO: 2866 - DNA, 759 bp, Glycine max
  misc_feature (2)..(2): n is a, c, g, or t
tnaaccaaacctagaaagggcgcaattggaagatctgaagccgaagatatgcaaacccgacaaccttttggacccacgcagatgactccaacaacaactcaagtcatcggatctcagtattgtaaaccgtttcccacctcactggagattgttcgaacggcgccgaatacgttcgctaatgaattccgtttctacgaccacaactccgttttcaccctccaaagcgcttccttctccgttcataaacgctgtatcttagtccatcaagggaaccccatcgtcacgctacgccgaaagagaatgacagcacataatagatggcaagttttcaggggtaaaagcgaccaaataagggatttgctcttcagtgtaaagcgacccaataaaggatacaacatattccagccaaacacggcactagaattagaagtgttcttagcccaaaatactgaagaaaaagtctgtgagtttaagatagaaggaaattggtccaatggatcttgtgaagtttgttccgttcaacaccgcaatattatagcactgatgaataaacacgctgttcaagccactgggtctgataatttcgtagtcagagtggaagccaatgttgacactgctttcatagttgcattaattgcgattctttgcctagagtagaagcagcatggagttgatttcgaatttgattctgcgttcatgttccttcaaataaactgttttgtgtgtatatgagtaaacgaaatctttaaagaataatgc

SEQ ID NO: 2867 - DNA, 965 bp, Glycine max
cttttactcaagtatcattcactaaaattctttccctctcgcctgcagattttcacatcccaatcatacaggacaattcattgtaataatcatctgtggaaaagagattttggaaactctacttgtggtatcaaaaatttctgtctacacttgtaaatagtgttcataaaaattcttttaagttattatatgtttgctgtatcacaaataaaattaaattaactaatctatataagcttcttcttctggaagtaccgcttcaaataccacaattgcaaaccagaaactgcaatgcacatagccaaggacataatgctaaaccatgccactctgccatttgttttttcactcacagtcctcatatcagcttcccttcccttaagatagagcaagttctcatggatggcctctactgctccttctagctttctcagctcaagctcgactccctcaatcttctcttttctagcaactgaatcccaatccttggctgcaattccaattttccaatcaaggtttacattaacctcaccaactccttgactatggctatccacccagaagcatgcaaggtagttcccagcctcttgagtcgtaaatgcaatattaccatgtgttgtgttctccttgtgatgaagattgtttccatatggtgatgtcaccttgacggcgatggtggggttgtgggtgtgatcactggggataacgacgtaatcggccaaaacgacaatgttgtgttggatttcttcagagacgcacttggtgccagtggtgggtaacgacagccagatagccagagcggaaggaaacaatttggtcgagaagaagaagagtagcagcgttaacatagctctgttccccatagcagcctccacactctctctccccctctatgcacacaacacagcaacaaacaatcttttttctcccttctgtcgtcttcccccagccgattcggctcgagt

SEQ ID NO: 2868 - DNA, 1159 bp, Glycine max
cccactcgtccggttagacagagataccgactgattttaaaatagtatatttccggaggaagaaaagacattggcatttaatccgagttttgaacccctccctgtcccaggtaaatctgggttttgacaaactacttgaaattgatcaagggaatgaggatcgttggactgacgggtggaatagcgtctggaaagagcaccgtttccaatctgttcaagtcccatgatgttcccattgtagatgctgacgttgtcgctcgcgaggtgttaatgaaagggagtggtggttggaagaaagtcgttgcagcttttggggacgaaattcttcttgaaaatggagaagtcaatagacccaggcttggccaaattgtcttctccgatccggataagcgtcaatttctcaaccgattgctagctccttacatatcacgtgggatattttggaaggttttgaagctatggatgaagggatacaaggtcattgttcttgatgtgcctttgttattcgaggccaagatggacaagttcacaaagcccattattgttgtatgggttgatcctgagacgcagattcagcggctcttggcgagagacaagtccagtgaggaggatgctcggaataggattaatgctcaaatgtcactggatgttaaaaggggtaaagctgatatagttatagataacactggttcattggatgacttgaatcaacagtttcagaaggtttttgttgaggtcacaaggccattgacatggactgagtttttgcgctccaggcagggagtcttcgccattcttgcttccttcacctcaggtgttgttctgtttatgaagacattcaacaatcatacccacatttcatagccacctgtgttctacacatttgttaatgtattatttacattccctctaaagccctaaacccatgagttcttttgtgtatctcttttcaaattccccaacaaatcctgctgttcaaagttgattaatttaaatttgaagatacaacttcaagttttaaataaccatgatattatatttcttacgacatgctttctttctttttgttgttgttgttggttgggaaatgactgttgttgattggtcgttgaaggcttttgaacatatatgtttgaaattttttatagatatcatgttt

SEQ ID NO: 2869 - DNA, 1538 bp, Glycine max
  misc_feature (23)..(23): n is a, c, g, or t
  misc_feature (1371)..(1371): n is a, c, g, or t
ttttttttttttttttatcattnaactctgacttctgtattgatttttgcattaaatatttaaaaattaaaattacatatagttcatcttgaaaatgtgcattttactaaatgcaaatgcatgtgccatgtggtcatgttagtcagaccctatatcatatctacaataaagagaaaatcactggaaggataataagcaggttcttaaataactgtcaatgcaggtactgcttgcactgcatggcaacatgagtcgattaattacatccaagtggctacagaaaaacggggtgtgcacaatggaagcatctgactggaacggactaactcaaattttgagggaactctttcatgcaagaagttcagttcataatactgactttgatgcacactatccagcaaaagaggaattgaagtctaaactactcaacataggagatatgaggaacccggtttttgtcattgttgttgacattggactacttgacttgagtacagatatatggaaggaacagtttaacttcctccacaggtactttggtagagcaaagtttgtatggatgttaaaccatgacacttccaataccataaaaatggagctccgtaggaaagggcatatacttatggttaacaaacccctttacaaagcaaaaatgattcatatcttggaagctgtcataaatgagagaaatcttgagctacaaaagaaaaacatgatagctccaaggaccacaatgaaagagggtgatttgcatgagtttcttgagattgattccactcattttgatggtgctagctctgatgattctgacatatcagaaataagtggttctaatcccgttagtgctaatggagataaaccagttgagaagctagaaaactctcatccatcatcaccacaccatatgaataactgcctagttagattaacaaatgaaaatgaatgtttggaagaacataatttgaggaaagaagaatcttctagtcccagctccagttctgccactgaagacaaccaacctaaatcactatccaccaaagaatcatcatccatttcaacagaagatcaggaggaagattctgaatgtggggaaacaaatagggtcaccagctcaagtaaagcagtagatggaaaaaaatctcttgagggcctaaagattttgcttgcagaagatacaccagtacttcaaagggttgctaccataatgcttgaaaaaatgggagctgatgttgttgctgtaggtgatggacaacaggcagtagatgctctcaattgcatgttcgctgctgaagattgtagaagggaatcactccagaaggaaagaaacacgagatctcaaacagagatttcgacttgtcgtccttatgactngatcctaatggattgtcaggtatgagctataaaaaaaatgcatatctctttaattttaaaagttttaggaacacagatcatgcttataaaagaataccaacagagattaccataaaattttatgggttaaatgtacttttgcttcatttattatcatcattttgtgg

SEQ ID NO: 2870 - DNA, 956 bp, Glycine max
  misc_feature (903)..(903): n is a, c, g, or t
  misc_feature (929)..(929): n is a, c, g, or t
cctcgtgccgaactgcagaagaacaacttgtttggtaagttttcactagacatgtcaaactttacatcattggtattcatcaatcttggagagaataatttttctggagttctaccaacaaagatgccaaagagcatgcaagtgatgatattgaggtccaaccaatttgctggcaagattccaccagaaacatgcagtctcccttctctatcacaacttgatctttcgcaaaacaaactttctggatctattcctccttgtgtctacaacattactcggatggatggtgaaagaagagcgagtcattttcagttcagcctcgatttgttttggaaaggtcgagagttgcagtataaagacactggactgttgaaaaatcttgacctttcaacaaacaacctgtccggagaaatcccgcctgaactttttagcctcactgaactgttgttcttgaacttgtctagaaataatttaatgggaaagatacctagcaagattggtggcatgaaaaatttggagtcccttgatctctccaacaatcatctttcaggggaaattcctgcagccatctctaatctttctttcctgagttatctcaacctgtcatacaatgatttcactggacaaataccattagggactcagcttcagagttttgatgcacggagctatgctgggaatcccaaactttgtggacttcccttaacaaagaattgctctaaggaagaaaattatgacaaggcaaagcaaggaggagcaaacgagtctcaaaataagtcactctatcttggaatgggagtaggctttgttgttggcttatggggactttggggttctttgttcctcaatagagcatggagacacaagtattttcggttgctggatcgtattctagactggatntatgtgtttgtagctctcagataaantaagttggtgaattaagggcaagttct

SEQ ID NO: 2871 - DNA, 1891 bp, Glycine max
ttacctctcctgtaagcttcagttcagcagataaggtaatctcaaagctcgtcgtgttttcgcatcaatggccatggccatggctgaggcttcaagaatcacgttacactccactctcctccctttttttacccccaaaacccacgttggtcaccgccacttaagcctctcgtcatcacgcaagcaccaagtccagtgctcggtgtctgcaggcgcggcggctcagacgaacccagtggcttggggctgcgagattgactcgctggagaactcttcggctctgcagagatggctgtcggagtcggggcttccgccgcagaagatgggaatagagagagtggaggtgggagagagagggctggttgctttgaagaacattaggaaaggggagaaactactctttgtgcctccctcacttgtcattactccagattctgagtggagctgccccgaagctggtgaagtattgaaaaggaattcagtgccagattggcctttgcttgcaacttacctcataagtgaagctagcctcatggaatcttcaagatggagcaattatatatcagccttacctcgtcaaccttactcacttctttactggacgcaagcagaactagatcgctacttggaagcttcacaaattagggagagagcgattgaaaggattaataatgttattggaacatacaatgatttgaggctcagaatattttccaaataccctgatttattccctgatgaggtgttcaacatagagtccttcaaatggtcatttggtattcttttctcccgcttggttcggttaccctcaatgggtggaaatgttgccttggttccttgggctgatatgctgaatcatagttgtgatgtggagacatttttggattatgataagacatcaaagggaattgtcttcacgacagatcggccctatcaaccaggtgagcaggtatttatttcatatggaaaaaaatcaaatggggagcttttgttatcttatggatttgttccaaaggaaggcgctaatcctagtgattcagttgagttgtcactgtcactgaagaaatctgatgcgtcctataaggagaagttagagctgttgaagaattatggattatcagcatctcagtgttttcctatacagattactggttggcctttggaattaatggcttatgcttatttagctgttagtccttcaagcatgagaggagattttgaagagatggctgctgcagcatcaaataataccacctccaagaaggatttgagatatcctgaaatagaggagcaagcattgcaattcatactagatagttgtgaatccagcatatcaaaatacaacaagttcttacaggcaagtggatcactggatctggatgtgacttctcctaaacaactcaaccgaaggctctttctgaaacagctagctgtggacttgtgtactagtgagcgaaggatattatttcgtgctcaatacatactgcgaagaaaactgagggacatgagggctggtgaattaagggccctaaaaatattcaacggtttccggaatcttttccaatgaggccattcactggtgcattattttctgccctggtttgcccttggttgttttgaaaaaacctatctcacccttgagcatcatgaactttgttcaatggtaccacctaattgtgggaaacaggtccagtcttcagtttttattgatcaatatagaagaagcaagataagaaatagaaaaggtaaggaatgattgtaatataggcttgctatgtatttattgatccaaataaatttttcttttcctatgttaaattttcgatgaaaaaatcttctttggatcttcaaaacaaaaaaaaaaaaaaaaaatcgagactagttctcctgg

SEQ ID NO: 2872 - DNA, 1762 bp, Glycine max
aagtgtgtatgctatgtttttccaaaaaggttcaaactttgggtgcagaactgcagatgtataggcaccgtagggaaactcatgaacatcgcaacgcgttaggtagcttcctctccactattcaaaatcggttccattccaatataagaagtgaaagagcccagaactaccaggcaagaacatagtgtatgtgtttcaaaactgtgattttgttatctgttcttcaaaaccattgaagatgaggtggctctttcctctcctctttcttttttcgcttggtcttactgttactggtcaagaatccattgagttcctcaacctttgtgagacaactgaagacattttacaagcctcatcacacgctgagcttcccttggctatttcagtgaatggtggaaacctcaatgaggtttccttcagcattctattggctgaaaaatggctcagacacaacgttcttgcacactaccctgcctcaaatatcaccaccattgttgtggaaaccactgctttttgccaacaagaccaccaacacaacaacaacctcgctgtggttctgtcttctttgaagaatgtctaccactctctcaagagatggggtttggagaaagacattaaagtctctgttgcttttaatctggactgtttgtctctaaactcagtttctcttaacaatgatttgaaactggtcaaacccctcatagagtttctccaagaggtaaactccacatattctgtgatcccacattatggcttctcacgtttttctgataaaagtttgagcttggtctcttcccacttggagtccttgaaaaagcctggatttttctacttgaataacataaatgttctagccattgttccaaaagggagaaaaaacatagcaagaaagctttcagttgttgattttagcccaataggcccattcccagtaaggccagctccagtgccagaaatagccaagtccccaatgactccttccaatgtagctttccctcctttagctcaagtagtttcttcaccccctccaatactttctcccacttttgcccctgaagagccaccatttccatttggtgttccagctaattctcctcatggtttctcactccctccttgtaatccattacacgatggctcaccccaaatattcccgatccagaaactgtggtgtgtggctaagcctagtgttcctgaagaaacactgcaacaggctatggactatgcttgtggagagggtggtgctgattgcatggagatctcaccgcagggaaactgttataatccagacaccttggttgctcatgcctcctatgctttcaacagttactggcagaagcacaagagaagtggtggaacatgcagctttggaggaactgccatgttgataaattctgacccaagtttccttcactgtcggtttattcttagctaagtgaatagaagtggcgtggcgactttctgtttttgttgcagatagtgtggaggattttatgttaaggtgacttttcttttgattaactagcaatcggtttatgtataatgtatggaccaacttaaaacttctatattgggatcttgttggactaacttaatactttctagcttaattgttatgttgtttctccatatgatatataggtattagtagtagtaagttggagttctgttctaaattacttactgattgaatcctatttgcctacgcagagtttgtttaatcaggtgaaaaaaaaaaaaaaaaaaaaaaaaagggcggccg

SEQ ID NO: 2873 - DNA, 667 bp, Glycine max
ccccccacttcgctgcacgccaaacatgcactgcgcgaaaagataaggtaactaacttttgtttggagtctcagtctcagagtatggacactcagaaagggccgtcttcatcggctgcagctgttacttcatgtcgaaagaagaagaacgaagaagccacttttttggaggacttgaaggatcacattgacgagtttattaatgcttctatggatgaacataagacttgcttcaagaaaacagttcagaagatgttcggaatgtccaaggctgttgcagagagggacaccaatgctgccaaagaagttgagagttctctgcctcttcagacaactttgcaagactagtatcatgcttgctctcaagaaaaataatgtttgttttctagaagctcttttggaggatgttgataaaaataagtgagtgattaagttggttggtcttgatccatgggactaggttgttgttgaatgtgtgatttgcttacatttcttaatgctacacaaccctaagaaatcgatggccagaggtcttaagaagcattgaattcgatgaaggcaacagacaggttgcattaacattatgggtagggaaggaagggtctccttagagagagaagcaaaaaataaataaataaaaaatcaatcattattcaggtattcaaaaa

SEQ ID NO: 2874 - DNA, 641 bp, Glycine max
  misc_feature (624)..(624): n is a, c, g, or t
gccctgtttcgtgttctcgggttttgtttttcttgatctttctctccacgcaatcatcgttatttaatcctctctccgactcaagaggcgacccacttcgctgcacgccaaacattgcactgcgcgaaaagtctcagagtatggacactcagaaagggccgtcttcatcggctgcagctgttacttcatgtcgaaagaagaagaacgaagaagccacttttttggaggacttgaaggatcacattgacgagtttattaatgcttctatggatgaacataagacttgcttcaagaaaacagttcagaagatgttcggaatgtccaaggctgttgcagagagggacaccaatgctgccaaagaagttgagagttctctgcctcttcagacaactttgcaagactagtatcatgcttgctctcaagaaaaataatgtttgttttctagaagctcttttggaggatgttgataaaaataagtgagtgattaagttggttggtcttgatccatgggactaggttgttgttgaatgtgtgatttgcttacatttcttaatgctacacaaccctaagaaaaaaaaaaaaaaaaaaaaaaaaaaaaaaaaaaaaaaaaaaaaaaaaaaaaangggggggggcggtataa

SEQ ID NO: 2875 - DNA, 2028 bp, Glycine max
tttttccgatcagctacgtaggccccccccccgaatccgatctttcttctccttgctttgaccttttgccggttgttgtgttgcattggtgcaaatggcgttcttcagaagcgtttctgcactttctcgacttcgctctcgcgtgggccagcaatctaatcttgcgaattcagttagatggctccaaactccgagctccagtaacactgatctttattctgagttgaaggaactagttccagagtatcaggaacgtgttaagaagctgaagaaagatcatggaagtgttgaattgggaaaaattactgttgatatggtacttggtggaatgagaggaatgacagctttagtatggctaggctcagctgttgacccggatgagggaattcgctttaggggcatgtcaattcctgaatgccagaaaaagcttccaggtgcttttactggtggggagcctttacctgaggctgtactgtggcttctattgacaggaaagataccaagcaaagcgcaagttgactcattatccaaggaattgcgaagtcgtgcaactatcccagattatgcttataaggcaattgatgcattgcctgtttctgctcatccaatgactcaattcacaactggtgtcatggcccttcaggtgcagagtgagtttcagaaggcatatgagggtgggatagctaaggcaaggtattgggagccaacttatgaggatacaatgaatctaattgctcgtttgccagccattgctgcttatatttatcgacggaaatacaaggatggaaaaatcataccgttggatgattctttggattatggtgcaaactatgctcacatgttagggtttgatgatccggaaatgctggagtttatgaggctgtatatttccatccacagtgatcacgaaggtggcaatgttagttcacacacagcccacctagttgctagtccgctatcagatccttatcttgcatttgcagctgctttgaatgggttagctgggcccctgcatggtttggccaatcaggaggttctacgatggatcagatcaatagttgcagagtttggaactcctaacataagtacagaacaattggctgactacattaataaaactttgagtaggggccaggttgtgcctggatatggacatggggttttacgccagacagatccaagatacacatgtcagagggagtttgctttgaagcatttgcctaatgatccatatttccagttggtgtctaagataaaagaggttgtgcctcccattcttaccaagttaggcaaggttaaaaatccatggcctaatgttgatgctcacagtggagtgctactgaactattatggtctaactgaggaaaactattatactgttctctttggtgtatcaaggagctttggagttggccctcagttgatatgggacagggctcttggaatgccactcgaaaggccgaaaagtgtaacactggagaagctcgagcaattggtcgccaaatcatcctgaaatttaaggcaccatttctgttaataatttctaaaatacacactgcggtagatgtgtggtggtgttgagttgaaaatttggtaccattgtaatgaggaatattcactaccctcccccatggtttctatttcagaagattttggtatttaggtaaagggtggtttttcaccctcacagtggtctttcccactttttctgaactgcataaattaggtttgagggaacataagaataaaggcattattgttttggggtttatcatccccttgtattctttctaaattcggaattactcccttagactaatgatcgataacatttatttaccgtgtcttgcggcccgtggataaatgtaacattctcacaagaaaaaaaatgttggcactgtattctttgatggttacatctatcggaggttcttttaaataaatttcagtatttctagtgatatgtcactaactcttgattagatgttttctgcattcaataaaaaaaatccttaatacttttgatat

SEQ ID NO: 2876 - DNA, 1196 bp, Glycine max
  misc_feature (844)..(844): n is a, c, g, or t
aaagaccaattcagttcccaacttttctggatccgccatcttcctttttctttctttgaccttttaccggttgttgcgttggcgcaaatggcattcttcagaagcgtttctgcactttctcgacttcgctctcgcgtgggccaacaatctaatctggcgaattcagttagatggctccaaactccgagctccagtaacactgatctttattctgagttgaaggaactggttccagagtatcaggaacgtgttaagaagctgaagaaagatcatggaagtgttgaattaggaaaaatcactgttgatatggtacttggtggaatgagaggaatgacagctttagtatggctaggctcagctgttgacccggatgagggaattcgctttaggggcatgtcaattcctgaatgccagaaaaagcttccaggtgcttttcctggtggggagcctttgcctgaggctgtactgtggcttctattgacaggaaagataccaagcaaagcacaagttgactcattatcccaggaattgcgaagtcgtgcaactatcccagattatgcttataaggcaattgatgcattgcctgtttctgctcatccaatgactcaattcacaactggtgtcatggcccttcaggtgcagagtgagtttcagaaggcatatgagggtgggataactaaggcaaggtactgggagccaacttatgaggatacaatgaatttaattgctcgtttgccagccattgctgcttatatttatcgacggaaatataaggatggaaaaatcataccattggacgattctttggattatggcgcaaactatgctcacatgttagggtttngatgatccgggaaatgctggagtttatgaggctgtatatttccatcctcagtgatcatgaaggtggaaatgttagttcacacacagcacacctagttgctagcccgctatcagatccttatcttgcatttgcggatgctttgaatgggataactggacccctgcatgaactgggcaatcaggaggatctaccatggatcacatcaatagttgcagaatttggaactcctaacataagtactgaacaattgaatgactacattaataaaacattgaatacaggacaagatgtgactgaatatgaacatgggggtttaccgcgcacccatgccacgatcccgtgcgcgagggag

SEQ ID NO: 2877 - DNA, 682 bp, Glycine max
ttagagtaaaaaatgtgtcactagtcactaggcaaaattttgaatatcgttattcaaacaggcataatttggttctccagaagtactacaagtttaaaaggccttaaggtaaaaaatgaactccatcttttagtacaaaaaaccttatattatatgctaaatgaaaaaagatgattcatctctaacttgtgatctagacaaataaatcagtaaaaagtggatacaaactcctccccgacttacttcttcacctcctcatattctgcctcaggagcctgatccccaccctgagaaccaccagctgaggaaccgccactagaaccacctgacatgtgctctccaatcttggacacagctttgtttgcagcatcaagctttgacttgatttcatcaacattatcccctgacatcgcctgtctcaaatccgaaactgcatcctcaatttctttggccacttcactgggaatcttctctctgtattcacctaaactcttctcaatgctatagatggtagtgtcagcactgtttctaatgtcaatgagagcctttctctcttggtctttctgagcatgcaattctgcttctttgaccatcttttcaatctcatcatccgagagtccaccggatgaccgaatagttatttgttgttctttaccagtggacttgtctttggccctcgtgc

SEQ ID NO: 2878 - DNA, 648 bp, Glycine max
ttttttttttttttttcaagtaaagtgaatgttatactataataagaaaaagcttgttaattgcaatttgcaaatacatcccctgtgtggtggttgcgcaaagatgcgtaatccccttaaaagctaccgctttatactgagtcaggctgatacaaaagaaaatagttgagctgcggtggggacaaactttaggtaataggtcacgcttcagccatttcaattttcaagtcatgaagaaaccatgctgttttcctttcttctcctgttcttctttttcttccaccgatagcacgttggctttgcataaaccctcctgggagttccaatcagtgacagcaaaagcaagatgagtagtactagtattggtgtgatcaaagctgaccaattcgtcttcttttcttcaactaccaccacttgttcacgcgtaaagagccaaggtatgccaagaagcatcaaggccaccgccaacatcacaataacatctgatgtatgagtactataattgcgtttatagcaatagtaacccatcctcagaaatctggaaatgattaattatagagattcttacactgattaagtggatcaaagcatataatagcaaggaaaagcctttgcttctatggaactttatagaacaaaccacctggt

SEQ ID NO: 2879 - DNA, 1184 bp, Glycine max
ttttttagcaagaaaaatcatggaatctatcttttaaagttcaacaatagtttcagtccactgattgaatgataaataaataatgatggttagacatagttgaacaaatttgattatggggagattaaatctcctagtggatttcactatacgctgcttcatgcacagctttaatttctcttttcttaggggggccgtaccatctggccgctgttattatccctctaccatctattacgcccattcatgccaatgtgaccaaaagaacattaaacccacatcaacaaaccaaatacagccccacctatccctatcccattggaaggaagatccatacggggagggttatttattattcttccttctcgatactatctctgatgcccaggctttgccagtttcagtttggaacttcccagcagttgactggaaaaattcatctagatccttcccctgctcatcttcatattccaaagcttggagtatcatctccaccttgtcaaggtccttgacaaatttagcttctggagaagaatttgcttcatactccatccacaactcagctatttcctttgctgtagatcctcctccgagtactttacacatatgatctagtgcttcctgttctcgttgattcttttctgctttcgaaactccatccaatggagttatgtccccaacaattgcttctgcaatgtcatgaacaatagccattttaatgcacttgtttcggtctacaccagggacatctgacgcaatcagagccatcaaactcattcgatacatatgatcggctatagattcaggattcttaacatcttttcgtacccaacctgttctctttgttgccttgaggcggtggcagattgagaggaaatcaatggcagaggaagcagaaggagcgccgtcgcgaaccgccgcggaagaaggtgaagcggccatgcaagaaaccctagtgaaagtcgctgcggaaggtgcaacgggtttgaatttaaggaaggcggcagaaagaaaaggagcaggcgcacgggatagaagagtgaatcgcattcctctaacaattaattaattcctttttattcacttctcttgtctctccagattttgtggaaacttcacacttggtggtagtaaaaggatgcgcagatgtgaaacgcccaattagggaggaaattttcaggacc

SEQ ID NO: 2880 - DNA, 898 bp, Glycine max
ggctctatacgcggcaaagaagaagaaacagaagagagtcgaaaacggcagtcccctccctcatcggaagggaggaacacagccagccacgacaggattactccctggaatcgggttctgtcttcttcattgcagcagatctcactacactgcatgcatatgggagcagtggttgtcttggaccctttaaaaagcccccactaattgctactgcagatgttccgccaaaaggattgaggaaacaaggtaaggcagcaaagaaacctagcacatcagaagatttctggatcaccagcacgcatgatatggacaacagtgctgttcagtcacagggaagcatctcatcagccagtataacaaaccaagctgcagatcctcatggaggttcatgcaaccccactgagtttgtgaatcatggtcttattctatggaatcagacacggcaaggttggataggaaataaacggtctaagaaccaaactgaacagttgcgagaacccaaattgagttggaatgcaacatatgaaagtttactggggagcaacaagccattccctcagcatattccccttgcggaaatggttgattttcttgtggacatctgggaacaagagggtctgtatgactaacctatagaagactgaaggggtgtcaattggtttgatcaacagattaattatagttctttcttctgagtgtagaggaaaattgggcatactgcagtttgtaactttgtatatctgttgtaatgttatctttcagttgataatgacgaggaattttattagtttctccagaggcctggacataattgtattattattctcctttgcattttaatgttgaaacgaaaatttcctgtcaaaaaggttgaattttatttgaatcacgttaataa

SEQ ID NO: 2881 - DNA, 1356 bp, Glycine max
aattcggctcctactcgcccaattcccacactaccaatctcaacaacaaccgaaaaaagtgaacaaatgattgaaacatcagaagcttcagtttacggtgtgatggcaagttggctcacaccctccaatctattcattttcatcaatctcgtcattggaaccatcgccatctcctctcgtttcgccaacacgaccaaaagacaacaccagctcgtccgttctccttctttgctagaaaggcttgcgtcctttaacctttgttatcacaaacatgaaccaacaacaaggatgatgacgacgacaacaacaatgtttcacagagttgtggacccagtcgagcgtctggatgaattcaggctcgaccaggtcccctcctcgtccttgttggacagggttaggtctttcaacctggggttttataagagtgataatattgaaagacatggtccggtccataattctgacttgccccaactggcccagctggatcggcttccttcttcatctttgttggaccacgtcaagcctttaaatcttgagatcgaaagacctgacctggtccatagacttgactcgtcccagcttgatcgggtttcgtccatatcattgctggaacgagtcaggtcatttaatcttggctttagtaaagtcgagatggaaaagcctgattcgatacagcaacagctaacccgtgctccctcgatcctccagcggcttaagtcttccttgtcgtttgagcctgaatccgaagttaccggtggtggagagttggcggaggaaactgaagaagaaggggtggatgcaaaggctgatgatttcatcaacaggtttaggcagcaactgaggttgcaaaggcttgactctattatacgttacagggatatgctcaaacgatactaagaactagagaagagaagagaagaaactcttggatccaatattttccccaatagttcattccttcaccaccagctgcatgaacacgagaattctgctagctagggtgttgtttgtttgtttgtaatggtatggtgttccgcaaggcttgataaaccgttgctagttctttttttcttgtatactgatttgtttgaactgattatagttcataaagtacaattaattacaattcccatactgaaaattttgtagtttgcgttacttcttacggcgaaggcataaggttacttacgttaaatttggagaaactacttataaaacagccgctagggttatcgccattttatttattcatataaagtttttttttttaatttcttgagggaaatttatatatagtttatatgtatcatatattttaactatagtaagtcatttttgctgtttgcgtggaac

SEQ ID NO: 2882 - DNA, 1131 bp, Glycine max
ccacgcgtccgcggaaattagaactgttttttaattcaaggttttatgccagtgacaatagtattgaaaattgaaatggtattttttaagtttcaaaattcgagtctgcgcacgtctgcccaccccctcaaacatgtattttaactgttcgtatttttttcctctaaagaaacatgggagcctttggtttgagaaaacattctttttcattttctatttgcacttttaattacaaaaaaaatgtcaattgttttctaaacaaacaataaacaagataaaaaaatcatgttagatatgacttctagatagttattatatattctaattagtaatttgtgattggatcacgacataaaaattctttaactgtcaatgcaaacattatttactctttttgtaattagaatagaaaactttcaaatgaacccctgaacaaagggatgtaacatcctgaaattaattgaatgtgaaaagttggagatgagcttattatcgtttaagtggcttatatgctgctgctagtatggtgacggactaagcacaatcatgtaactagttactaactattggacccatctaactaacccaatatgtggtagtaataatgaggctatgaatttgaaattgttattgaattgattgtatatggtgtggacttgcaggttgcatcacaaccaaggagcttggaactgttatgcgttcattggggcaaaacccaactgaggcagagctccaggacatgatcaatgaagtggatgctgatgggaatggtaccattgacttccctgagttcctaaatctcatggccaggaagatgaaggacactgattctgaggaggagctgaaagaggcattccgggttttcgacaaggaccagaatgggttcatctctgctgctgagctccgccatgtgatgaccaacctcggggagaagctcaccgatgaagaggttgatgagatgattcgcgaggccgatgttgatggcgatggccagataaactacgaggagttcgttaaggtgatgatggccactgtgagtcatcacattatggccacataaacctatatgaagaaatgttgatgtaaagggaacgacccaaaaaggcggaagaggaatgccaagggtttggg

SEQ ID NO: 2883 - DNA, 1103 bp, Glycine max
gaagctccaccgtatataatcatcgcgtacctccctcggccccaaccattaaaacacacactctctctcaccaaattcttattagaacgaaaaaagaaaagaaaagaaaaaagagcgatttttccctcaccaaagaagaaccaaaacaatggcggatcaactcaccgatgaacagatctccgagttcaaggaagccttcagcttgttcgataaggacggcgatggttgcatcacaaccaaggagcttggaactgttatgcgttcattggggcaaaacccaactgaggcagaactccaggacatgatcaatgaagtggatgctgatgggaatggtaccattgacttccctgagttcctaaacctcatggctaggaagatgaaggacactgattctgaggaggagctgaaagaggcattccgggttttcgacaaggatcagaatgggttcatctctgctgctgagctccgtcatgtgatgaccaacctcggggagaaactcaccgatgaagaggtcgatgagatgattcgtgaggctgatgttgatggagatggccaaataaactacgaggagttcgttaaggtgatgatggccaagtgagtgatcatcacattatggccacaagaacctaaatgaagaagtgttgattaaaaggaaatgaccaaaaaaacagaggtaaggggaaggacaagggtttgggctgtataacagtgatgtagtagtccttgtcctttcttcttcctacatttatatttgacggtttttgaatccaaccttaaaatgtcaattagtggcaattcctgctactaatggatgtagtggaactgaaccttcttagtttgtctgtaattttttccaagaaataaagggttgtaatgttaatgtcacttcgcattctaccgctcattttttttttttgaaagatgacgaatattgtgatatttgacatgcatcgtagtttatttgaaaagtcaatgtgtgatatggattctcctaagatatggatgagaatgagtagaactaattattccttggtctattagtgaatttatttctcccaacgtattgagaaaaaaaaaaaaaaaaaaaaaaaaaaaaaaaaaaa

SEQ ID NO: 2884 - DNA, 1084 bp, Glycine max
cccacgcgtccgtacggctgcgagaagacgacggaacactacggtcgcgaggcgacgacggcccccgaaccattcaaacgcacactctctctcaccaaagccttcctagaacgaaaaaaaaaagaagagcaattttccctcaccaaagaagaagaagcaaacaatggccgatcaacttaccgatgaacagatctccgagttcaaggaagccttcagcttgttcgacaaggacggcgatggttgcatcacaaccaaggagcttggaactgttatgcgttcattggggcaaaacccaactgaggcagagctccaggacatgatcaatgaagtggatgctgatgggaatggtaccattgacttccctgagttcctaaatctcatggccaggaagatgaaggacactgattctgaggaggagctgaaagaggcattccgggttttcgacaaggaccagaatgggttcatctctgctgctgagctccgccatgtgatgaccaacctcggggagaagctcaccgatgaagaggttgatgagatgattcgcgaggccgatgttgatggcgatggccaaataaactacgaggagttcgttaaggtgatgatggccaagtgatcatcacattatggccacaaaaacctaaatgaagaaatgttgattaaaaggaaacgacaaaaaaaggggtaggaggaaggccaagggtttgggtggtataacagtgatgtagtagtccttgacctttcttcttcctacatttttatttgatggtttttgaatccaaccttaaaatgtcaattagtggcaagtcctgctactaggctgtagtggaactgaaccttcttagtttgtcttgtaattttatccaaaaaaagggttgtaatgttaatgtctcttcactttctgccactcctcatttttttaaagatgatgaatattgtgatgatatttgacatgcatcttagtttacttgaaaagccattgtgtgatatggattctcctaagatatggatgtgaatgagtagaactaattattccttggtcttttagtgcggccatttctccaagcattgagaaagatgtttaact

SEQ ID NO: 2885 - DNA, 918 bp, Glycine max
gtcaattttatttatggtaaagaagttggtggcatcgatataagaaaggcaagtttggtcggaataagattcaaaacgctgtttttttgcagtttcttcgattctctctttctctttcttcagaaaaattaaacccattcaaagaaagaaagaaagagcgatcatttccaatcacaatggcagatcaactcaccgatgaacagatctcggagttcaaggaagccttcagtttgttcgataaggatggcgatggttgcatcacaacaaaggagcttgggactgttatgcgttcgttgggtcagaatccaacagaggctgagctccaagacatgatcaatgaagtagatgctgatgggaatggcaccattgacttccctgagttcttgaacctcatggctagaaagatgaaggacactgattctgaggaggagctgaaagaggcgttccgagtgtttgacaaggaccagaatgggttcatttctgctgctgagctccgccatgtgatgaccaaccttggggagaagctcactgatgaagaggttgatgagatgattcgagaggctgatgtcgatggcgacggccaaataaactacgaggagtttgttaaggtcatgatggccaagtgatggtagtacaccatctccactaaattctgaactgatggaaaaaaatgacaaggttgaacttgtgatatagtacacctagtccttgcctaatgtcattactgtcttatttctagatttttatttgatgtttttgaattcaatctaaacgacatttagtggaaagctctgctgctaatagtaattgtggtggaatggtgtctttctagtttctgttgtgacttgtgtctcaagtgcttgatgtttattcaactcagctttcttctgctccccctaggaaaaaaaaaaaaaaaaa

SEQ ID NO: 2886 - DNA, 1088 bp, Glycine max
gctcgagcccgatccccttcgaaaaacacattaactacccttctttcttgttccacactttcactactaccccttccttccttctcatggaaaccacccaacttgactacaacactaaaaaaacaaaccccacttccccaacgcgcttgaagctcttcggtttcagcgtacaccacgaagacatcatggacgaagacgaggtggcgcatgatgacgtggcagactccaccaccaaggtcacttcttccacttccccttcttccccgtctgactcgccggactcctccgtcgccggtgccggaccaccttcctccgccgaccggaaatacgagtgccaatactgctgccgagagttcgcaaattcacaagcacttggcggacaccagaacgcgcacaagaaggagcgtcagcagctgaagcgggcgcagttacaggcctcccgaaacgccgccgtttcgttcgttcggaatccgatgatctccgccttcgcccctccgccgcaccttctggctccgccggggaccgtggtggtcccggcggcacctccctcgtgggtgtacgtgccaccacgtgccgcgcctcctcccttccacgtgtcagtgtcgcacggttgtgcgttcccgtcggcgcctggcaacagcaacaacaacggcttcagcagcagtagtagtaataatagtaataacgtgaccataacaacgggtgtgaaatctgcgggtgctgggatgtttccctatgttggcgttgtaggagattcttcgtcattagctttgtcaacggtgcaggttcaggcccgggcccaccacgctaggattgatgggccctctttgagtaggttttccaaaggtgacagtgggcccaaatttgatgatgcatggggcttggacttgcaccttagtcttgcgccagctgcgccctcatctctcggctcggcttgaaattctgtgactgtgagtctaatagtagtctctttgttcaggcttgacgcgccgtttaaaggcatatcatggctgtttcagcttcatatagtgtacattttcatattcccttcctattttttcaagcgaattatttatttcccttagtac

SEQ ID NO: 2887 - DNA, 2443 bp, Glycine max
  misc_feature (21)..(21): n is a, c, g, or t
  misc_feature (64)..(64): n is a, c, g, or t
  misc_feature (2287)..(2287): n is a, c, g, or t
  misc_feature (2338)..(2338): n is a, c, g, or t
  misc_feature (2386)..(2386): n is a, c, g, or t
tcgagtcagctacgtaggccnccccccagaaaacactagccaccttagtcaccctgtgtgttanaagtgaggacaagggtaaagacacaaatcatgataaggttgacctttctctttctggtggtgcaaatatcaatgataaatctgattctgtggagtttggaggggctgtacggaaggctttgtctgagggggaatctccagttgtggctaatttatctgatacccttgatgctgcatggacaggtgaaggtcatcctacaaattcatcactcaaagaaaatggttgtctacctcccgatgcagcagctgtggctgttcattcacctgtggtcagctacgtaggcccccccccccagttacatcaaaatcaaattctgatatttatagtgctaatataggtgggattgaggcaggatgcactaattactctaaattgctttccaaaggacttgatactaaatggaaaggaataccttttgcaaatgtctttggttcattcaacaaaacttcttccttcaatactgagaagcttgttgagtacaacccagttcacattttatcatttcgagagctggagcgccagacaggtgctagattgcttcttccagccagcactaatgataccatagtgcctgtctacgatgatgaacccactagtgttatagcgtatgtgcttgtgtcaatggattatcatatgcagatgttagaatatgatagacctaaagagagtggagacagttcaatttcattgccactctttgattcaacaagtctactttctctcaactcttttgatgagacaattactaatacctacagaagtcttggctcttttgatgagaatgtgttacccacttctgggtctcggagtttgccggctggggatccattctcatacacaaaggatttgcatgcaagggtttcttttactgatgatggctcccttggaaaagtgaaatatactgtaacttgctactatgcaaaaagatttgaggctttaagaagaacttgttgcccttctgagttagattttgtgcggtcccttagtcgttgtaagaagtggggagctcagggaggaaagagcaatgttttctttgcaaaaaccctggacgatagatttatcatcaaacaggttacaaaaacagagcttgagtcgtttactaagtggcccccggcttattttaagtatctatctgagtcaatcagtacagggagtccaacttgtcttgcagagatcttgggcatttatcaggtaacatcaaagcacctcaaaggagggaaggaaacaaagatggatgttttggttatggaaaaccttctttacaggcgtaacattagacgactttatgacctcaaaggttcttcccgatcacggtacaatccagatacaagtgggagcaataaagtgctgctggatcagaatctcattgaagctatgccaacctctccaatatttgttgggaacaaggcaaagcggttgcttgagagggccgtgtggaatgacactgccttccttgcatcaatatatgtgatggactactcattgctggttggcgtggatgaggaaaagcatgagctggttttaggtatcattgattttatgaggcagtatacatgggacaaacaccttgaaacttgggtgaagacctcaggcatccttggtggacccaagaacacttctccaactgtgatatcaccacagcagtacaagaaacggtttaggaaagccatgagcttatattttcttatggtgccagatcaatggtcccctccagagttacaccccagtgggtcccaatctgacatttgtgacgaaaatgcgtgaggcatgggactcatttcattgatgtggtcaaagtttgaatcttgtaaatgttaccattccagcatacatcattgacacgggtctctccttccttatgcccttaatatttgtctcctgcataatgcagctgctgttgatttgtgtcccttaagcaatggaggtgcacctcctgttaccagagattgttgaaagggtaactaagtgtacagcgattctcctcctctttcttttttatacatttttttatatcatgtatttaatctcttgctttcataatctgtcgtaaatttgatttaaagttcacaacctattattgaattgcacaccgcgtttctttttctacgcatgtgaaaggcgttgataaattcttacctcactgttatatgacccgtgtgaaagtatatatttgaaaattgtttctttctaaaaaaaaaaaaaaaacaaaaaaaattcctgcangccttcctgcacacagttgtatcactagctctacagcggccgacatcgagntgtagctccagctattgtgccctatattcgagcttacttcaacctggnctactcatgtcatagcggattcctgtgcgaattgatatccgctcacattccagccga

SEQ ID NO: 2888 - DNA, 1473 bp, Glycine max
gaacaattaaaacttttttttttgtatgttttgattgttaatcaatatgtaactacatcagtctatatatataggcctcggcttcctaggcccccccactttcatatctaagatatacatttcatataccttgtgtttgtatagcatatattcctagttgatattatctatagatggagccaattgaacaaggaagccaacctgaaaaggaaaaatggaagggcaaggccacaacagaagtaaaaggagccaaagcagaacaagtttggcctcttttggaggatttctttggccttgacaagtggttccccaccctctctacatgcattccagttgaaggtatctctggccaacctgggtgtgttcgcttctgcgctggtttcaagacccctgtggatgatggcaaacaaactgtgaattggactaagcagaaactgctatccattgacccaactcaacgggtttttagctattcgatcgtggatgggaatgtaggatttcactcctacgtttcaactttgaaggtgctgccaatggctgaggggtgtgagattgagtggctatatgaagttgaacctgttgaagggtggaaactggagcatcttgattccttcatagacacgggcttgcaggtcatggctcagaggatgcaagcagctttgaagacaatggaggaagcagtattcatggcttaaaagtaaggacaaaacttatatactgttgctttggtgttgtttgtattgttgcaggatgatcacattctttaacacacccttctttaacatattttaaaaattataaaaatagaagagacggtcattaaatgaattgtgaaattcaacaaattttataattttctataaatttcagtcaataataagatatatgttaaaagagggtgttaaagaatttattaaccttcatcttattctttaattatagttgaagttttattttgataatccatgtaatctctgttgcaaacctttattacaccgattatcaaaatgaaattttaattttgattggagaagaagacaaccaacccttacaaaagtatatctaagttttgtcctgaagcaattaaaggagtgttagtgcaataaattctaataataagaaataacctaaaataattatatttttaataaattttaattattaataaagaatgtgtgaaaaaatatgttagtaatatttgtcaagggattatcatttaccaatatatggcaatggagccttttcagtttatcaagtacttttattgctgagaaaaaaaagtactttaattgatgtgtttgcgatttcagtgtatcattagtatgtacttactagtagaaaaactgaagatatgctgttgcattgtgttgtagcaattaaataaaaatttcagttcaaagttaaaaaaaaaaaaaaaaaaacatcaacacttgatttactctccaaaaaaaaaaaaaaagggcggccgccgac

SEQ ID NO: 2889 - DNA, 1207 bp, Glycine max
gcgaagtccacaacagttgatagttgagttgattgcatctgcatctgcttgtgttcgacatcgaaacagaacaggaacctcaaacctttgtgttgagaatcttagccatgggcagcaacggtttgaggtacgagatcgaacaaaacgcttacataaaactcgtccttcactccctcaaacacccaacctccgccgtcaacggcgtcttgatcggtcgcatctccgcttccaacgacgtcgtcgagatcgccgatgccgtccctctcttccactctcacatcccccttcttccccaattggagatatctctcatcatgatagaggaatatttttctgctaaagggttgaacatagtgggctattttcacgcgaatgagagatctgatgacagtgagcttggtagtgtggcgaagaatattggtgaccacatttgccgctactttccccaagccgccgttctattgttagataacaagaagctcgatgctttgaaaaagagcaaggaccgtagtgccataatgcagctttatgttagggatacatctaagaactggaagttggttcagtcagatgggaacaatcgattttctctcaaagagccatcagcaaatctagtcttgttggactatattgcatccgagaagtggaatgacgttgtagattttgatgaccatcttgatgacataagcaaggattggctaaatccagggcttttcaactgatcccagcccttttgtctccgtttttgccctatttactttgcaagtggaggatattgaggcttattctggtgcatattctggatcctcatcgaagaacatttagggactatattttgacttttgaccctaggaaagttgcttcatgaagctttttcagttgtataagcaggatatttaccaccagtccctaaaggattttggttgtggagcctcttcttttctttttcttttttaccttggatgtaggtatattaaagtggagttttttttaactcttttttcgtttgctttgcttgtgagttgtgacgaactttgttactgggtagaaacaacaaaaccatcactcccgttatcttagttaatccaatggctttcttatgttttttatgtttgcaaagcattctcttttgagatttatgtatgtgatatttttattcataagaaaaaataaaattgtgctatatatgtcaaaaaaaaaaaaaaaa

SEQ ID NO: 2890 - DNA, 1103 bp, Glycine max
ccacgacagttggtggtagctgattgcatctgcatctgtttgtgttcgacagaacaggaacctcaaacctttgtgtcgagaatcttagccatgggtagcaacggtttgaggtacgaaatcgcacaaaccgcttacatcaaattcatccttcactccctcaaacacccaacctccgccgtcaacggcgtcttgatcggtcgcatctccgcttccaacgacgtcgtcgagatcgccgatgccgtccctctcttccactctcacatccctcttcttccccagttggagatatctctcatcatgatagaggaatatttttctgctaaagggttgaacatagtgggctattttcacgcgaatgagagatccgatgacaatgagcttggtggtgtggcgaagaatattggtgaccacatatgccgctactttcccgaagccgccgttctattgttagataacaagaagcttgatgctttgaaaaagagcaaggaccgtagtgccataatgcagctttatgttagggatacatctaagaactggaagttggttcagtcagatgggaacaatcgattctctctcaaagagccatcagcaaatctagtcttgttggactatattgcatctgagaagtggaatgacattgtagattttgatgaccatctcgatgacataagcaaggattgggtaaacccagggcttttcaactgatcccagcccctttgtctccatttttgccctatttactttgcaagtggaggatattgaggcttattatggtgcatatgctggattctcaatgatgaacatttagggactatattttgaccctaggaaagttgcttcatgaagctttttcagttgtataagcaggatatttaccaccagtccgtaaaggattttggttgcagagcctctccttttttttccctccttggatgtaggtatatttaagtggatttttttaaactttctttttgctttgtttgtgagttgtgacgaactttgttacttggtagaaacaaccaaaccatcacggccattatctttgttaatccaatggttttcttatgtttttatggttgcaacgcataaaaaaaaaacccccc

SEQ ID NO: 2891 - DNA, 2208 bp, Glycine max
tagcataactgaacgggccacgggggaaggagtgagtagtagatccaatcgtgtgcggcaatgcctcaccgtaacaaccctgcgcctctcccccttgtcgtcaccctaaactgcgtcgaggactgttccctcgaattcgaatccctcgccggcgtcgccaccgtcgaacatgttcccctcagccgcctctccgacggcaagatcgagtccgccgccgccgtgctcctccactccctcgcctacctcccccgcgccgcccagcgccgcctccgctcctaccacctcatcctctgccttgggtccgccgaccgcgccgtcgactccgccctcgccgctgacctcggcctccgcctcgtccacgtcgacacctcgcgcgccgaggagatcgcggacactgtcatggcgctcttcctcggcctcctacgccgcacgcacctcctctcccgccacgcgctctccgcctccggctggctcggctccgttcagccgctctgccgcggcatgcgccgctgccgcggcctcgttctcggcatcgtcggaatctcctcttccgctaggtccttggccactcgcagcttggccttcaaaatgagcgtgctgtatttcgatgctcgcgcggaaaaaggaaaagtaaagttccctcctgcagcacgaagaatggatactcttaatgatttactagctgcaagtgaccttatatcactccattgtgctttaacaaatgaaacaatgcagattattaatgctgaactgtcttcaacatgtaaaacctggagcttttattgtaaatacgggcagtagtcaacttttggatgattgtgctgtaaagcagctcttgattgatggaaccttagctggatgtgctttggatggggcagaagggcctcaatggatggaagcatgggtgaaggagatgcctaacgtgttgatacttccccgaagtgcagattacagtgaagaggtttggatggaaataagggagaaagctatatctatactgcaaacattcttcattgatggaattataccaaagaatgccatttcagatgtggaagaagagagtgaggttgacaatgaaagtgaactatctgatcagcaatacaacgaaaatgctctccagattattgttagagagcaaacagatgatgttcatgtaagtcctgacaatttccaaaagaaagtaagtactcaaatgaaagagtcttcgtcccagcatcaggtttcaagtttgtctcagagtacctctgctagatctgaaggaaggcgcagcaggtcaggtaaaaaggccaaaaaaaggcatacccgtcacaagtcccaacaaaaacatgaagatccttctgcactggagaaagaaggcacatctcagagagatgatactgctatgagtggcactgaccaagctttgagctctagctctgaagactcaagaagtagaaaaactccaatagaatctatgcaagaacccactggtgctcaattcataaagtcaactgtgagacttagtggaaactgtactgaactattgaaagatggatatattatagctctgtatgcaagagaccgctctgcacttcatgtctctaggcaaagagttaaaggtggaggttggatcatggattccatgtcaaatgtgtcaaaaagagaccctgctgcgcagttcctcatcatcttcagaagcaaggacacaattggattgcgatcccttgctgctggtggaaaattgttgcagatcaatagaagaatggagtttgtatttgctagtcatagttttgatgtttgggagaactggactctagaaggttccttacaggaatgcagactggtgaactgtagaaacccatcagctgttttggatgtacgcgttgagattttggcaactgtaggcgaagatggcgttactcgttggcttgaatagagtgattgtaggtctgtaatactcaaaaaggaggagcttgtaaatcactccagtcccgtgacttaatgatctttcaaatgtttctttgtgaaagattggaatgtattcatagtgtagagcataatttttatttttttcatttttttgcttctttttctttattactaattgaggaactttccattggagtgatgaacttggccctcgtgtgatgatattttggctttgccttgtaacacctattatcaagcttctgaaaatcgaaagtattgaatcaaggtagtgattgactc

SEQ ID NO: 2892 - DNA, 1930 bp, Glycine max
acactattattgaaatatagaagcctctttccttcttcttctttttcttcttccttcatagcaaaagccatggccacgagacccgagagtgaaaaagaccctccacaaccaccttcacgtggctttctggccacagtacaagaaatcacaagaatctatagttcactgccacctagaccttctattgaagaagtagaagctgccacgtccactgtggacaccctcaacaacgaggagcaaatcaaactcaacgaaatctcaatgcaacaacaacctcctcacgatgatgtccctcaagacctcttctctgtcctgcaacaactcaaaaagactatggttctgttccacactcatcaacagaggagagatgcgctttatcttcttgagcttgaaaatatgtttcaaaccttcggtgatctcattcagagggcttctgaattagtttctggagatacccagaagcaaaaacttcccactatacccgaggaacacgcggtgatcactgaggaaagtgaaactctggtgaaggaagaggaaggaagacacaagaatgttttccatgtggtaaagccttccttgtctgcaggggatggaagcactgagaaattaagtctaatgaaagtggctactgttatagaaagttgtgctggtagtggagctacaatccttgagcttagagggaaattggtggatcagatggagtggttgcctgtgtcaattgggaaattatctgatgtcactgaaatggacctatctgaaaacagactcatggctcttccaacaaccattgtgggtcttaaggccttaacaaagcttgatcttcactcaaaccaacttataaaccttcctcactcatttggtgaattgataaaccttgttgatctcgacctccacgccaacaaattgaaatcacttcctgctacttttggaaacttgacaaacctcactgatcttgatttgagctcaaatgggttcacagatttaccagagacaattgggaatttgagcagcttgaagcgattgaatgttgaaacgaacgagcttgaggaactgccttacacaattggcaattgctcatcactatccgtgctaaagttggatttgaatcagctcaaggcccttcctgaggcaattgggaagcttgaatgcttggagattctcactttgcactataatagagttaagaggttgccttccacaatggataatctatgcaatttgaaggaacttgatgttagctttaatgaacttgagtttgtaccggagagcctgtgttttgcaactaatttgaagaaattgaacttgggaaagaacttcgcggacctaagagccttgccagcatcaattggaaatcttgaaatgcttgaggagttggacataagtgatgatcaaataaaagctctaccagagtctttcaggttcttgtcaaagttgagagtttttagggctgatgagaccccccttgatttgccaccaagagaattggtcaagttgggttctcaggaagttgtgcagtatatggctgattttgtcaccaagagggatgcaaaacttgtgccatcaaagaagaaaaagaaggggttttggttctggttttgctccatattttgcccccaactgaaatgatgcttggacaaaatctctgttaacttatgtttcttgtggttgtatgtcgtttatccgttgcatatgtttggaaaaccttgtttttcctaataaaatgatctgtaatcttggatttgccttgtaactagtgtttataattttaattttctgttaaacatgtgtatatgagtgttcgtaacatagaccttctggctgatcttgtcaactgtaactgaaatgaaatatatggtaatacatacgccgttcttgatcacttatatgatgtgtgttgctgtaaatctctttatatctgtctttgattcct

SEQ ID NO: 2893 - DNA, 1025 bp, Glycine max
actcttttttctttctacttgcaacttgcaccttctccttctcaatcttgtaattctatttcctccaccataatgctgcgcaagcttgtgtcagggccacgcaagaacaagcctggcacagttcccgttcacctcaacgtctatgatctcaccccaatcaacggctatgcctattggcttggccttggagtctaccattctggggttcaagttcatggattggaatatggttttggtgcgcacgagcacgacacaacggggattttcgaagtccaacccaaacactgccctgggttcactttcagaaagtcaattttcatcggaacaacagatctgggtccgaaggatgttcgagcattcatggagaagctggctcaggattactccggcaacacctatcatctcatttccaagaattgcaaccatttctgtaacgatgtttgtctcaaattgaccggaaagtcaatccctcgttgggtcaaccggcttgctcgacttggtcttctgtgcaactgtgttctcccacctggcctaaatgacacaaaggtttcacaagctgcatcagacagggttcaagaaggtgaaaagaggaaaataagaagccagtcctgcaggtacgagggttcctccaatccttcatcgtcgcaacgttcagcaattaaaagtagtagtagccaaaggcattgccatcctccatcttcatctttgattaatgctgcttcagcttcaaccttaacagtgaagtaaaaagctttgacagaaactcaggttctgaaatataggggtttagaattatgtaagcaacccaagataagcaaaaggaagaaaaatggttgctttgttttgtctctgttcgttgtaaaatgctttctttagtaaatgggaagttcctttgtttctacattttttggactatgtattcttgaatcttgattaatgttacaatagtcgatgtagcatttagccgtgtatttgaaaatttaatggggtgtttgggagaaaggagccaaaaaaatattagagat

SEQ ID NO: 2894 - DNA, 865 bp, Glycine max
ctcgagccgtgcaattcatccttcgtggccccctagtaccaaggacattcaactcataggtgacatgggcaatattgtagctgccactagggaccttgaggattctttccggagtatatccttctcaaaatcaattgacaattcaactgagtttagcagctctagattctccgacatcatggggattggcaatgaagatgaggagggaaaggtaagaccactagttcgcatgcgccacgcgccaaggtggcatgaacagctgcaatgttggtgcctcaactttagaggaagggtcactgttgcctctgtcaagaattttcagctgattgctgcgacaccaccaccagccattgttactacaggaacaggacctacaccatctcagccaacacaatcttcttctgaccctgacaagatcattcttcagtttggcaaggttggcaaggatatgtttacaatggactatcgataccccctctctgcatttcaggcttttgccatatgcttgactagctttgatacaaaactggcttgtgaatagttacaagagatatgtgtgggaagaaaagtaggatttaatctccattttagatatctgtaggaatgttgaaagcttcatcaagtcattgttatcctcatggttaaactgtaaagtacggaacaatctctgcccagtgtatcttttttcttttgctatagccctttttcttttgaacattttccttttttcttgccattgctcttttcttttgaacagtcaatttagtatgctttaaagtttgaactatctttgtcaaactttgatgatgtagacttccatactttgtacaaaagatgtaatgaaaatttagtagcattcaattcc

SEQ ID NO: 2895 - DNA, 1856 bp, Glycine max
tttttcgtcttacgcgtccgctttgagttagagagagaaagagagttgtgaagcacaggatctaaaaacgtgttatctgacaagactttggaacatcacgctcctcacttttcaaaggtttcagttgtgacatcctccaagtgacaagagtggaacattcattcctttagtggcactttggttatatattaaattctgggctgtgagtatattagaacaaatgtccttccgcagtatagttcgtgaagtaagggatggatttggaagcctatcaaggaggagttttgaggtaaggcttcctggccataacaggggcaagtcacgtagtttggtccacgagttgcaggatcagccaccagttatacagaacagccggtgggctagccttcctcctgagcttcttcgcgatgttattaatagattggaagcaagcgagagtacatggcctggtcgtaagcatgtggttgcgtgtgctgccgtgtgcaagtcctggagagaaatgtgcaaagaaattgtcagcagtcctgaattctgtgggaagattactttccctgtttccttgaaacagcctgggcatagggatggacccatccagtgtttcatcaagagagacaaatctaagctgacataccacctcttccttggccttagccctgccttgcttgttgaaaatggaaagtttcttctctctgcaaaacggacaagaagaacaacttgcacagagtatgttatatcaatggatgcagataacatatcgagatctagtagtacttatattggaaaactgaggtctaattttcttggcaccaagtttataatttatgatacgcaacctccctacaacaatgctatgctgtctccacctggccgcagccgtaggttttcaaaaaaggtttctccaaaggtccctagcggcagctacaatattgcccaggtcacctatgagttgaatgtccttggtactagggggccacgaaggatgaattgcacaatgtactcaattcctgcatcatccatggagcctaatggcgttgtcccaggccagccagagctccttccccgtgcccttgaggattctttccggagtatatccttctcaaaatcaatcgacaattcaaccgagtttagcagctctaggttctctgacataatgggaactggcattgaagacgaggagggaaaggtgagaccactagttctcaagaacaagtctccaaggtggcatgaacagctgcaatgttggtgcctcaactttagaggaagggtcactgttgcctctgtcaagaattttcagctgattgcctcaacaccgccagcagccgttgctcctacaggaacaggacctacaccatctcagccaacacagtcttcttctgaccctgacaagattattcttcagtttggcaaggttggcaaggatatgtttacaatggactatcgataccccctttctgcatttcaggcttttgccatatgcttgactagttttgacacaaaactggcttgtgaatagtttcaagagatatgtggtaagaaaaataggatttaatctccattttagatatctgtaggatgttgaagctttcattaagtcattgttctccccatgtaaagtatgcaacaatctctgcccagtgcaccttttttcttttgcccattgccctttttcttttgaacatgttccttttttcttgccattgctcttttctttcggacagtcaatttagtatgctttaaagtttgaactatctttgtcaaactttgatgatgtagacttccatactttgtataaagatgtaatgaaaatttagtagcattcaattccaatttgctctaatgcaaagaatcttaatttc

SEQ ID NO: 2896 - DNA, 700 bp, Glycine max
  misc_feature (15)..(15): n is a, c, g, or t
  misc_feature (27)..(27): n is a, c, g, or t
tcgagtcagctacgntaggcccccccnatatttctggcgggcaaagaagaggagcagggaaaggataggcctttagttctcaagaacaaatctccaagatggcacgagcagctgcagtgttggtgcctcaactttaggggaagggtgactgttgcgtccgtcaagaattttcagctgattgctgcaacgcagccacctgcaactggtgctcctatgccatcatcgcagcctgctcagtctgatcatgacaagatcattcttcagtttggcaaggttggcaaggatatatttactatggactatagatatcccctatctgcttttcaggcttttgccatttgcttgactagttttgacacaaaactggcttgtgaatagtgacaatgagaggtatggtacaaagacaatagcattctatctccatttatgtattcactgcgaggtgaagctgcatggagtcattttacaccaaatggtttaactgtaaaggacagaacaacctttgctcaatgtgttttttcttatatccttttccttttatgttagtcttcaacaaactatctgtcaaacatgtgttgcttacccgcagtgtaattggcttcttccaatggtaggctcccctgaaccaaaaaacacattagtatgctttgttgcttcatcattttgcttcatgaaatataaattggtcattaagatgtat

SEQ ID NO: 2897 - DNA, 967 bp, Glycine max
gagcacttcctttacccaacgattccatttactgctgctactaccgcccaaaagttatcttccgcaaattccaccctttcgattcacattctctctctcaaacctgctttctcaaacacccatgtggagagggtgaggagcagaagaaacccttcaaatggaaaaactctgaaattagggttttggtttcccccaaagggagagaaggaaaaaagaaagaaggaaggagggaggggatgatgaaacggctgttgggtggccccgggacgattagcgggttcctgttgaggttcggccaatgcgccttcggtgccgcttcgattgctattatggtcacttcctttggcttctctagctacaccgctttctgctatttaattgcatcaatgggacttcaagtgctctggagctttggactcgcatgccttgatatttatgctttgaggagaaagagagacctacaaaatccaattcttgtcagcctgtttgttgttggtgattgggtaacagcgactttgtcacttgctgccgcatgctcatcagctggaatcgtagtattatatgcaagagacctgactgtatgtgcgactagtaagcgtctcacgtgcaacaggtaccaggtttctgtagccatggcttttctcacctgggttctcacagcgatgtcatcgcatgtgatgttctggatcttggcctcagtctagcttgacgtattttctttgctagacacaagagaccaacatagatatcaccgtatctttgatagctcttgtaaattttgatgtatcattacctgtcatgacatgtgggcaaaatattccctcttgtcccttctcaaaactttgattgattttccatttttcaatcttgccgcgcacgcctttctaagtctagatatagattctggttaaatgtaagccttggacatgatctgtaaacttccctattgtagccaagatgttctctt

SEQ ID NO: 2898 - DNA, 1095 bp, Glycine max
agcgggtcagctacgtgggccccccccccggcgaaattctcccatctgcttctcactgatctccattcccattccatggcttccactgaatcatcccctttcaagaaaattcagattcaaagggatgacactacatttgacgcatatgtggttggaaaagaggatgctcctggaattgttgtgattcaggagtggtggggtgtggattacgaaattaagaaccatgccgtgaagatttctcagcttggtagtgggtttaaagctcttattccagatttatacagaggaaaggttggtctggatgttgctgaagctcagcatttgatggatggtcttgattggcaaggtgctgtgaaggatattgctgcttcggttaactggcttaaagcaaatggctcaaagaaggctggtgtaactggattttgtatgggaggtgctctctctattgccagttctgtcttggttcaagaggttgacgcttctgtagcattctatggagttcctgcttctcaacttgctgaccctgcacaagccaaggctcctgttcaggctcattttggagagctggacaattttgttggcttttcagatgttacagcggccaaggcattggaagagaagctgaaggcatccggaattccacatgaggtacatatctatcctggcaatgcacatgcattcatgaacaggtcaactgaaggaatccagaggaggaagaacatgggaatgcctgatgaagatgaagctgcagttcagcttgcttggtctcgctttgagacatggatgacccgttatctgtctagttagataatttcctagctagctcaattccgaagtcacatgctgcatgtgtattccaccttttaagtggttatattgaacccgttttaatggccccacaaactgtggagaccctgctgcttgctacacttcatttatttcctgaagtttggatgcatgtgtgaaatttgagttggaaataatattgaaatatttgtggcttttcttcaattaagtaaattatttgtgctaaaaaaaaaaaaaaaaaaaaaacacctgttccggactcaagcatgcgtgcgtgcgacgtcatag

SEQ ID NO: 2899 - DNA, 1723 bp, Glycine max
  misc_feature (165)..(169): n is a, c, g, or t
  misc_feature (199)..(203): n is a, c, g, or t
  misc_feature (1669)..(1669): n is a, c, g, or t
ctaatcaattctgacaacaggaaattacttggatgagacatccttcactgaaacacggataggcaagagttaagttatcttcaggctcactagacactactccaaagttttgtagcttttcatagtgaggaacaagcatattcctatttgctaggccaactatannnnngaactctatttgaacaaaaccactaagcannnnngcctataaccttttcttcacctttctgttcctgtaaggagctaatctgcattttagcttttatttgtttttttttttttttatcaaatatcaagtttccattatatttacattaacatacttgtctggaaagacaggtctttcagtctccaatgccacataaaactaattttggaatgctaaaattaaaaatacattttgatgttagttttcttcatcagaatcaaaagactgtcttttccttaaagattgtatgacatccatgcacttatctttggaattacacataccagtacaagacttgactttaggaacactcaaagaactaagtggtggtgtacccgtccccttgtttatttccctgagcacagaacgggctgttgctgcagctgcagtgtctgctattgctgaagcaactcttgaatcacttggaagctcgttactgctttgtccaactgtttgttcttgagtcttggtcagattcttagaaacatcagctaattgatttgaacctgattttggcttggtgcccacagcctcagcaactgttgctttagcttttgctgcttcatatttttgaatatcataaataagctctttctgcagctgcttatcagctaccaatatgtcatcaatctcattcttgtagtcctttagaataatgcggaggcactccataagagaacctatgaggggactattcttggtttccaacagacgtttcaactctatgaagatggggactgtattttggataaggcctttcttgactgcctgagttatagcctttcttctagctgcagatccattttctcccccttcctcctctacatctgctgactcagatgatgcacgagtggatgaaatgcgtatctctttacagccgagaatttgaaaagcatcctgtagaacagactgtccagttgcatcttctatattgagcataccatcagaagctgcggctagaatttctgcacataacttggcaaaggttgctagaagatgctcaggagccatttgttttagtaaagaaacataaatgtgcattcttttagaccttgactcttcatcagtacctctgatggaaaagatttggctttcctttcgtgatccttgagactcacgatgcccattatggacatgacagtcgttcagaacaaaaacagcctcaacaaaactattgtatgctaaaagaggagacttgactttcaaaatatttccaaagagaaaatccgctaactgccttatcttttctgattcgtcaacaagtgacaaaaggaaccgaagaaatagcactggggggggggcctacgtagctgacggcagcaatctggaaagcaatatgaatgtttgccttctcacaagttcacaaggatctaagagacaccttgtgatccttgttatgtaactgtataacttccatgaaaaagaagtaagaatagcaaggagaatatgtactgacattcnatttatatattttgcatattgtaaatgggggggggccctacgtagctgactcga

SEQ ID NO: 2900 - DNA, 1159 bp, Glycine max
  misc_feature (728)..(728): n is a, c, g, or t
tttttttttttttttttttttttttttaaaactgacaagaacgtatcttgctcttttacttgggataaaacttgagatacagaatacatgaagcatcaacagactaaattttcccactgtcctctctctggttttttgtttggggaggaggggagaattaagcatcaaccaaagctagcggcaagtataattctcatgaaaaaagaaaacaagtttgatcaattttttgatacaaaatttaaattgattgaagaataaatttacttttatcacagccattgacgacatccagggagttagaaatggtgttgtttctataacacattggaggatgttctacaaaaattcttcagctgtatttagataatctaatatttcagactttacttcctgtgacagtggagctgatggccctgcctttgagtaatagtttgccaaagatctgattactttttccaaaataacatatgattcttcttgagcaacagtctgatttcccctccaactgcccaaatactcccgaattgactcctttgctgagtccgcagtccgtctaaatttggcattatcatcggtgccttcgtttaaagattcacgcagtgttttcactacttcccttgctgaccttaagtaagcctttggcaacacctttccagactttgttttctcattaggatcaaatagggatttgatggccccaataacccctttatcttcttcctctttgncgccagacttctcttcagcccataccattgatggtgataaaccacatgttaaggtaaccaatgaagggccaacactgattaagagatgcctgcgacttgatgaagcttccaggcgaggcagtgcaatattagatctggattgcagtttatctattatgttgcagaagttgtcaataaatgaaggacctactattacttggtgtatcaattatcatgctgttgtccactctcaaattagatatgatattgttattgattcgactttctgtttccttgactagaataagtcgtcatcatctcaaaataaccaatcagaaaagaatcatgtaatccctttagtatgacaaatagtgatacaggaacctcaaggaatatgaaaacagcaaatatactagagcagcaaagaagttccataataatttctcatacaa

SEQ ID NO: 2901 - DNA, 879 bp, Glycine max
cccacgcgtccgtacggccgcccgctcacggcggcgggcgaagaataccgtcatcgactaagaaagacattggaggagctagtgtggcttagtcgctaaatttgttacgataaagaaattaattcagcaacaaatacaatgggttctcttatggcaggatgggactctctgatcttggatcctgaatcagctacaatagagaggaatcgatcactcaccaaagaagaaattaatgcttactggagagtaaagaaggagacagagttagaacacctcagagctatgtccaaactatctgagactattcaggcccgaaaatttgaggattcagagaattctcataagtcaagtaccgtgaccttggccagcataaaggagtccttaggcatggacgttgaccagaaaagtttagagcaacttatcaagaaaaatggctggtggaccaaaagcagctgggcatttctgaatgaaccgccggtgatagaagctgcttccaacgagtatgcgtcacagtttcacgtggccaacttggggtcaacgaaatttaaccccggagatggaattagtgcttgatatatgactttttctatctcacgtcgccctgtatctatatatatctccacgagtattcagtatagttgctatctatatgtgtaatggcttctattttgtcacttataattctgcaaaagaactgtatttctggtttgtttgaaaagggatgaaaaaatcccaacagatttttaagagagaatattcaactagtttgactttgtcgttaaggaaagcatgcagtacgtttcgtttgtctgctttctaatcctaagatgtagagctattatttgctacgtagcattgattaactcctactattcttct

SEQ ID NO: 2902 - DNA, 1178 bp, Glycine max
  misc_feature (1043)..(1043): n is a, c, g, or t
  misc_feature (1051)..(1052): n is a, c, g, or t
  misc_feature (1064)..(1064): n is a, c, g, or t
gcaccagataatttaattgctgaagagtgaggaccacataggattcatcattttccaaacgagcatcttcgtagtttcttaagtcaagagaagaagtgaagtgctgcttcaatggcttcaagtcaggaagaggtgatccttttgggggttattggaagcccatttctgcacagggtgcagattgctctcaaattgaagggagttgaatacaaatatttggaagatgatttgaacaacaagagtgatttgctcctcaagtataacccagtttataaaatgattccagtgtttgttcacaatgaaaagcccatatccgagtcccttgtgattgttgagtacatcgatgacacatggaaaaacaaccccatcttgccttctgatccttaccatagagccttggctcgtttctgggccaagttcattgatgacaagtgcgtggctctagcagcgaaatctgtttttattgttgatgagaaagagaaagagaaggcaaaagaagaattatttgaggctctgaattatcttgagaatgagttgaagggaaagttttttggtggagatgagtttggctttgtggatattgctgctgtgatcatacctataattcaagagatagcagggttgcaattgttcccaagtgagaaattcccaaagctctccaaatggagccaagacttttacaaccattcacttgttaaccaagttatgcctcctaaggaccaactttttgcctatttcaaggctcgggctcaaagcctcgctgctaaaagaaagaattaacaaagactcagaattcccaaggagattttaatattgtagaaagtgaaagctacttactatctatgtttagttttcgttttgttcaacaatctatgtttagttttcgttttgttcaacaatctatgtttagttattgcggttatattttcatttcaaaatgaattaagcgatataggatttcgccatgtaaaaaaaataaaaatccaaggttgttgacattttcgctatttcaaaaaaaaaaaatataaaataaagtgtgtgcngcgctccnngggggggtgggnctctttgggggtgcccgtgcaaaataaccacttactgtttgttttcccccctcctgggccccctgtatccactgtgagatggaaacaccgtgggttccccaataattcccttgc

SEQ ID NO: 2903 - DNA, 1958 bp, Glycine max
agattgttctactcaacaatatctacgctaaattcatcatcgtgatgatgtttctgtttcttctgaaaaaggtatcacacataaatctagagaagtgttgacccattctcatctgcaactacaaacactctctgtccttgacagacagctgttccaaacccaacatcattcacctgcttcagctacgtaggcccccccccctttctcccacctctctcatatcttcagatccatcactctctttgcagaaaaaaaaggctttgatatttggaaatgtctgaagtgagaaacaaagtggatttcatccagttgcttggacctgacatgtcaatcaagattctcacccatttggatgacccttgtgatcttattcgggtttcttctgtttccagttcttggcaccgatttgttattgaacatggcctctgcaagcaactttgcttgaaaatgtttcctgaaatatctggtgttgctcatataattgagcttgacaacattattgaaccactaagcaacactcttggcagttatgtaagttgggagtctcataagagaaatcatagagtctatgcatttttggcttctggtcttactcctatgaggaaaaattgcatctcaaaagccattagtgcatccagcactgataactaccctgaagaaagcattctacatacgttggagcctggggatagaactgaatatagagcatcatactggtcaagcaaaggggaaagcgatccttctgttcctgagactttagtttatgagctagcttcaaaattatgtcttgttacggagatttatgtccatccattccaagcatattttcagcatggcttccctatatattctgctaaggctgtccgattcagaatgggccattcgaaacacccaatggaattagagagtcctgtggacaacatggctgctaatcacgtcttgggcaataatcaattcatatggacatatacatcacctgaatttccaatgcttcaagaaaaccgcttgcaaaaattcaagctacctgaacctgttctgtgcattggaggtgtactgctagttgagctgttgggtagagttcaaaagcaagaaatggatgaattattctatatatgcatctctcatgttcaagttatgggacgactgctttttccggaatttgatgtcaaaattcatcattggtcaggaaagtgtaccttgaaatactgccctcaaacagattgttatatgtcttctccaacatcatcaccgagaagcaactcgagtaatccgtcacgcctgcggaccataacctcaagcataatgcagaggggtgtgagacgttgggagcaatttctcttgggtgcattgcttggtactggtcctgttgtagttgataatgaagatcaatgaaaaaaaaaaatgtaagtaataaagtacttccattctcaaatggaagatattggtcccaatatctgtatagcatggaatatgttgagcacaataataagtagggggaagaggcaaagtttcatctttatttgtttctttctgttacataagtcttgtcttcatggctagttattaaggataggttgtacacaaattttctggcggctcgaattgataacgaaatttgtattgatgataagaaggatgatggagtacttctaccacgtattctacataatcacgtgttccaacctggtggcaactgatacagacaatcctcttgtttgaacctttaaaatatgccattcagattgggtccctatgatgaaatatgtgcatatgcaaaataattgtaagtatcatcatcatgttgttcctgtctttggtcatattggtagggattggttacttagaatttaatcttataatcatttaatgctatgtaaccaattggaggtctataaatctctctcctttgtaactgattgccttcccccgtcgttataatatattctattttgttgacc

SEQ ID NO: 2904 - DNA, 845 bp, Glycine max
  misc_feature (775)..(776): n is a, c, g, or t
  misc_feature (836)..(841): n is a, c, g, or t
tggacatatacttcacctgaatttccaatgtttcaagaaaaccgcttgcaaaaattcaagctacctgaacctgttctgtgcattggaggtgtactgctagttgagctgttgggtagagttcaaaaacaagaaatggatgaattattctacatatgcatctcccatgttcaagccatgggacgatcaatttcgccagaatttgacgtcaaaattcatcatccgtcagggaagtgtaccttgaaatactgccctcaaatagattgttatgtgtcttcttcaacatcatcacagagaagtgactcaagcaatccgtcgcgcttgcgaacaataacctcaaacataatgcagaggggtgtgagacgttgggagcaatttctcttgagtgcgctgcttggtactgctactgatcctgttgtagttgataatgatgatcaatgaaaaataaatgtaagtaattaagtacctcaattctcaaatgaaagacattggtccaaaaatctgtatagcatggaatatgttgagcacaataataagtagggggcagaggcaaagtttcatctttatttctttgttacataagtcttgccttcttggctagttgttaaggataggttgtacacaaattttctggcggcttgaactaataacgaaatttgtattgatgataagaatgatgatggaacacttcttccacatattctaatcaatcatgtgttccaacctggtggcatctgatgcaggcaatcatttgtttgaacctttaaaatacgccatnntaggtgcgagtatattttggagaataaaatgtgtatatgcaaaataatcggttgagatcnnnnnnaaaa

SEQ ID NO: 2905 - DNA, 698 bp, Glycine max
  misc_feature (683)..(683): n is a, c, g, or t
ttctttacggctgcgagaagaagcagccggggagaattagggtgagaacaaaattgcgaagaaccctaattgattgattgattgattgattcccatggcgtcccgaagaggtggagtctcactcccagaaagaccaagcaacaactcaggctccgtcctggcgaagatctcgcgctcctccatcgtcacccgcggcaaggaagccgccgtcgacgccgcattcgtcgccaagaagctcctccgcagcaccggcaaggccgcgtggatcgccggcaccaccttcctcgtcctcgtcgtccctctgatcgtcgagatggaccgcgagcagcagctcaacgacctcgagctccagcaggccagcctcctcggcacccccgcccccaaatgaaaatttgaggttttctctcagatcagatttcttgcttttagggtttacggttgcaataattttttttaactgttctggattttgattaaaaccttactttgaggagttttgtgtattcctacgatttaccatatgtcattagttgttaaaacgcgggttgctgagtgtaatttacctgctgcttagtagaatgattctatttcagtatgcgttatttctattttgtgatgaacttgttacttgaaaatgggcttcatatcctaaattgaatgatatttagctacaattatgatcnaaaaaaaaaaaaaaa

SEQ ID NO: 2906 - DNA, 1922 bp, Glycine max
ctgtctccaattaagtattgcagaagcaaaaaatggagccattattttcttcagcagcagcaatatgtgtggtgactgtgttggtagctgtgattcccatatgggcactgaagatgctgaactcgctgtggcttaggccaaagaggtttgaaaggcttcttagagcgcaaggttttcatggtgacccatactcactttctcatcacaactccaaccaaacccttttgcaacaacaccagctcaattcccaaccttttcctctatccgatgatgttgctcctcgtgtatcctccttgttacatcacactatcgacaaatatggcaagaaatccttcttttgggaaggtagaacaccaaaggtgatcattacggacccaaatcaactcaaagaagtcttcaacaacattcatgacttccagaagccaaagtttagtgacaatgtcaagttcttgttcgctggcctgttaaattatgagggtgacaagtgggctaaacatcgaagaattatgaacccagcatttcactcagaaaaattgaaaaatatgctaccagcattttctcaaagctgccatgatatgattagcatgtggaagggaatgttgtcatcagatggaaaatgtgagattgacatttggcctttccttcagaatttaactcgtgatgtaatttctcaaacagcatttggaagcagctatgcagaaggagaaaaattttttcgaaatctgagaatgcaggggtatcttttaatggcaggaaagtacaagaacataccaatattgcggcatctacgtacaactaccaccaagaggatggaagcaattgaaagagagatacgagattcaattgagggtatcataaaaaaacgagagaaagccatggagaatggtgaaacctctaatgaagatttattaagcatacttttggaatcaaatcacaaggaaatccagggacatggaaacagtagggctgttggaatgaccaagcaagaagtaattgaggaatgcaagctattttacctggcagggcaagagaccacttcatctctgctggtttggacaatggtcttattggctaggtatccagaatggcaagcacgagcaagggacgaagtttttcaagtttttggaaaccaaaatccaaacattgatgggttaagtaagcttaaaattgtgaccatgattttatacgaggttctcaggctatatcctccaacaactttctttagtcgcgcacctcaaaaggatgtgaaacttggaaatctatcactacctgcaggaatacgcattaccatgccaatattatttattcatcatgatggtgatatctggggtgatgatgcaaaggagttcaaacctgaaaggttttctgaaggaattgctaaggcaacaaaaggccaaatttcgttttatccatttggatggggtcctagaatatgcattggccaaaactttgccttaatggaagcaaagatagtgttatcattgcttctgcaacatttctcatttgagctttctccggtctatgaacatgctccaacggttgtgcttagtttgcagccaaaacgtggggcacacatcgttttgcataaactatgatatgattcatatattggaattagtcatcggcttgcgggataaggctacgcatatctcacttggtttagtgtgttatacattatatttcctttatatagtatcaatcatgtacttgtgtgtggaatgaaaactatctttaattaaggatcttgcaagttgtaatgcaggtgtatttgaatatgtagtatatggtatattgaaaactatcttttgagtttggtcactggttacggaggaataaaagggaaggatttctctcctctccatctcatctatatattttatagtgatttgataaatttgcctttttaatagttttttcatgcc

SEQ ID NO: 2907 - DNA, 2638 bp, Glycine max
  misc_feature (8)..(8): n is a, c, g, or t
  misc_feature (2621)..(2621): n is a, c, g, or t
ctgcaggnaaaaaaaaaaaaaaagaagacatccggccaactgcattagtggaaccgcggaaaaaaaaacatgcatctcgccatcttcagtgacgacaccaacgtggacagctatgtcgccagttcttctggcgacattcatgcagaaacagacccccccttgttaaaagtttgaaaacaaacccccattggtaaataatttttaaaactaaccctccacaataaatttgcctaataataagagatttaataaactagattaaaatctgatttgaaattggtttgattttcaaaaccggtttatttggttctgcacccgtttattcaaaaatcaatgataaaatttatgataatatatatatatatatatatatatatatataaaactggttaaattaaaattaattacaatattaaccattaatttatagctgatagtattatgcagaacccaaaatgtttaagttgtgtctgtaacctgctagtgcttttttgcactttgtttctttctcaggaatggatatattgcaagagaaaagagaaatgcttcgatactaaagtcttgatacccaaaaaacatgcgcatacaaaaaaaaaaaatctcaaacaacggccatgctcggcaaattaacatcaccactcacaagggctatgaataaaatgtagatttacagaccacatctctttgtatttcatggcaaaacaaaattcaaaatttgtaagatcgccaccaatactaaagtctaaataaagaaaacatgcccaaggcaaattcaagccatcatgttgagatacaaacatggccaaagcaaaccattaattttagtcttcatccatgccaccagcaggttgctctctccttggaccaccagctggttttgccataataatctggtccacacgtagtacagtgcatgcagcatctgcagcatatttaagagcaaataacttagtcacatggagatcccaaatgctcaaggttgagacatccttacatacgccttcttccaaatcaatgccaactttggcatttccagatgcatgttctgcatacagagaagatatgatctccattgcattcaacccagcattctcagccaaagttctaggaatcatttcaaaactttcagcaaattttgctatagcatactgatccaaccctgtctccttgaaggagaagtctttcacccttttagctaactcaatttcagttgctgcagctccaggtacaaagcggctatccctgcacatggccttgtaagtgttcactccatcatccactgctctttcaagatcatctagtatactatcagtacttcctcgtaaaacaacagtagccacagaatttccaccctcttcatttttcacaatggtcaccctgacaccaccaatttcctgaactgaaacagaatctacatatccaagatcatctgggtttggttggccaagttttagcatggcaacagaaccagttgtccggcaaaatcgacgtagttcaaactttgagctgattttcagaaccataagcttgtaacgctcacagaaatgcaacgccatctctcctactgctcctccactgacaatcactttggcaccagaatctgctactgccttgatgagctcctctactttagcctcttcggtttttgaataattttctagctgctcagctgtatgtatgaggacagttcctttagtctcagttgcagatgtatcaacaccaccagcaaacacagcaaccttcgccttttctgcgggggggcccctcccgacggctccacttttcagaaccaatcctcgaacgacagtaccgttatgcaagccccctccccaagagctttgcaacacgaacgttgtccacattaaagtttgcagggtttttgggacacacttggatgcatgcatcagcaacaagcgaacataaggtatcttcttggccaaattgcttgctggcaacagctgctttcattctagaaacaacctgttccttatcacgaacatccatactctctgaaccattctcaaccagttcatccaatatttgaacagtcttgttgatcgctttagtgtatccactgatgatctcgctcggatgcaaacccatcctgataagttcctcagcaccctgcaggagttccccagcaaatgaaatagttaaattagctccatccccaatctcctcttgttgagccttcccagccaaaaccaaaaccttggcagcaggatgctgaacttcaagttcattcacaattgtcccagcatcgttcgtgacaaaaagcttgtccaagtgatttataaccatcttattcatcccattgggaccgagggaagttcgagtgatagtggaaagttgtttgcaggcgtcgatgttcttgagaaccgcttcatcgaggccagaaaggtgcttatggccttccttgagcatggactgaatcccatagggttgaatgttgaaacccatgttcttgcaatttgagaaaaccctaaccctaaaaccctcgaaatggcaagttctcgcttcgactttgaaaattttatgcccacactgtaatgtcactaccccgccactatctcactaaaccctaataacgcaagtgaggtgagacagagcgcggggtcgangcgggaattccggaccg

SEQ ID NO: 2908 - DNA, 847 bp, Glycine max
ttttttttttttttttttgaaatctcaaacaaaggccatgctcagcaaattaacatcactcacaataacgctatgaataaaatgtaaatttacagaccacatctcttagtatttcatagcaaaacaaaattcaaaatttgttaagatcgccaccactactaaaaagtctaaatcaagaaaacatgcctaaggcaaattcaagccatcatgctgagatacaaacatgaccaaagcaaaccatcaattcccacaataattttagtcttcatccataccaccagcaggctgttctctccttggaccaccagctggttttgccataataatctggtccacacgtagtacagtgcatgcagcatctgcagcatatttaagagcaaataacttagtcacatggagatcccaaatgctcaaggttgagacatccttacatatgccttcttccaaatcaatgccaactttggcatttccagatgcatgttctgcatacagagaagatatgatctccattgcatttaggccagcattctcagccaaagttctaggaatcatttcaaaactttcagcaaattttgcaatagcatactgatccaaccctgtctccttgaaggaaaagtctttcacccttttagctaactcaatttcagtagctgcagctccaggtacaaagcggctatccctgcccattgccttgtaagtgttcactccatcatccactgctctttcaagatcatctagtatactatcagtacttcctcgtaaaacaacagtggctacagaatttccaccctcttcatttttcacaatggtcaccctgacaccaccaatttcctgaactaaaacggaa

SEQ ID NO: 2909 - DNA, 1207 bp, Glycine max
  misc_feature (62)..(62): n is a, c, g, or t
aaagtagtctgtatcgaaatcatccacatggctattgctgttcaacgcaaccaatccaaaancatttctcttttccattgattcgtatatatccgcgtcattcatttttctctgaccctcaaacacaacaaaggtcaatccaatcacaacaactttatccaattgcctcgtttctaccaatagcccaacacaaccaactcttttttatttatttccaccaattcttttcttttttttgtttttcattctgcttcatcggataagcataagacaccatcttattcatatgatgaggggaagaaggagacatcaagatgagcaatctcgtgctttgtacgacctctcctctctcgttctcaacctccttcgctcgcctctgacgttctccgacgaggttccgccagcgtcacggcgtccgggccaggctcagatatccccggcgggattcgcgtcgttgctgctgggaatatccctggcgttgatgctgtgtggatctgtgacgttcttcatcgggttcgtgttgatgccgtgggttctgggattggtcatgctcttctacgtcgccggaatcctctccaccctctccgtcttcggccgctccattctctgctacgccacctccccaccctcgccgcgtaaggacattcccgcatggaagcttatgtgaagtgaccaaatgaagaatgaaaatgagttgtacgatggtgcatgtgggggttttgtgctgcctatagatgcaggaatcgtagttaaatgggttttaagctactgaagtgaactatgtggatatggcttcttgtgcattagaaatagccaagtaaaattctgaagaactacttactaccttggtattgagattgaggggttgttctgttcccagcttccttcttccttccgttatcaattattttattcaactctatcgcaccttgctaaaattcttaagcttaggctgttgaatttccttttgttcaattatagaaagagaaggaaaatatattgatttgactcctgagaaacaggggttgtaccggatcaagaaaaatgttttggaatcggatggttgtttgttgtgcctaattgtctatagcagctgatattatttattcacatatcatttctgctgttgagttgagcgtggtagatgaatgatgaggattcttattgtggcccatatgctatggattaatgccttgtcgctagtgtc

SEQ ID NO: 2910 - DNA, 1348 bp, Glycine max
ccacgcgtccgggcagatagtctagctaatcacggtttatccttgttatatcaagttaattaaggtttttaatgttctgatcgttgttgttcgtgcatggcattgggtgtaacttagcattatttagcacaccagaactgaaaatggtaacgtgaatgataaagtagtctcttctctctctatctatcctgtttggcattcctacccaaatcacttttctattttccattcattcatacatatccgcgtcaacatgtcattcattttttgttccttattgtcagaaccaaaatcatttctctgaccctcaatccaatcacaacaaccttatccaattgcctcgtttctaccaatacaacacaaccaactcccggccgctcgtgccgccattttttctttatttcatcggaaaaaacaaaagatacgatcttatgatgaggggaagaacaagacatgaagaagatgagcaatctcgagctttgtaccagctctccgcgctcgttctcaacctccttcgctcgcctctgtcgtcgttgacgttctctgacgaggttccgccgttggcggcgtcacggcgtcccgggctgggtcagatatcgccggcgggattcgcctccttgctgttgggaatatcgctggcgttgatgctgtgtggatcggtgacgttcttcatcgggttcgtgttgatgccatgggttctgggattggtcatgctcttctacgtcgccggaatcctctccagcctctccgtcttcggccgctccattctctgctacgccaccgctccaccctcgccacgtaaggacattcccgcatggaagcttatgtgaagtgaccagatggaagaatgaaaatgaggagtacgatggtgtggggttttgtgctgtctattggtgcaggaatcgtggttaactgagttttattaagctactgaagtgaactatgtgcatatggcttctatgtgcatcagaaatagccaagtaaaattctgaagaactacttactaccttggtattcgggggttgttcccagcttcttccttctgttatcaattattttatttaactttattcgcaccttgctaaattcttaagcttaggctggtgaatttccttttgttcagttatagaaagagaaggaaaatatgatttgactcctgagaaacaggggttgtaccggatcaagaaaaatgttttgaaatcggatggttgttgtgtctaattgtctatagcagctgatattatttattaacataccatttctgctgttgagggtagttgatgaatgatgaggattcttattggagccctcatgttatggattcccgccttgctctctactctagtgt

SEQ ID NO: 2911 - DNA, 747 bp, Glycine max
  misc_feature (659)..(659): n is a, c, g, or t
  misc_feature (668)..(668): n is a, c, g, or t
  misc_feature (689)..(689): n is a, c, g, or t
  misc_feature (704)..(704): n is a, c, g, or t
  misc_feature (740)..(741): n is a, c, g, or t
tcgtacggctgcgagaagacgacagaaggggacaccagaaagtgccagaattctaatcctttttgcctaacctttatgtgtgtgtgtgtggcatcattttccaaccccacaattcaaaatccattaaagaaagacttacttatagaaccctctctcactctcacccttaaggattcttctctctaagaagttctgagatatcaagcagaaaaaagaagcaaagaaagatgataatggtggtggttatgacagagatattaggagagtacacagcagtgctcacaagggtcacagaacgcctccttccgcgccacggcataagttttggtggtctaaggaggaaccttcgttttgcttcttccacaacctattcttcagattcaacttcttttctggtttacttttaaatttttaatcatatttgtcagaatagaaactgtgtttagttctttcgtgttttaggttaggatatttgtattttttattaattcgtgagaattgaaaacagtgtcaaaagatttataataacttgcacattttattcaatcaactcttgatggataggatatttgttattgataataagttggtctgtgaggactacttagaaaataagcttgtagatctgtgatttggtattatgtaaaaatttgtataanataccctgnagttggcaaaaaaaaaaaaanattctgacccggggnccctatttaacgcgcccgggggacccttttccttannggtatt

SEQ ID NO: 2912 - DNA, 1123 bp, Glycine max
  misc_feature (16)..(16): n is a, c, g, or t
tccggaatttcccggngtcgacccacgccgtccgatcaacactacagaggactgaggagtacgcaagataagagctttactctatattcggatgtcccggggcgaccgccccccccccatatggcattacattcgccgcggcttttatcactcacccgaagggccttttcttcttctccttcttcctttcaaggaggggtttctatggttcaaggagcttccagaggaattggcctcgaatttgttaaacagattttagaatacgatgataaagagcatgttattgctacctgccgtaatcccagtgcatcaactgggcttatccatctgaaagataaatttgcagaccgccttaaaattttgtcgttggacttgactgttgaaacttcaattgaggcatctgcattgtcaataaaagagacatatggccgtctaaaccttcttattaatgcatctggcattctttcaatacctgaagtaatgcatccagaaacaacattgaacaaagtggagaaatcatctttaatgcttgcgtatgaggttaatgcagtgggtcctatcttagttatcaagcatatgtggcctcttctaaaagtaggaggaggccatgggactggaagaagtgctgcagttgtggctagtttgagtgcaagggttgcttctattggggacaaccgtcttgggggttggcactcttatcgatcttcaaaggcttctcttaatcaattatcgaagactgcctccctggaatttgcaagaaggaaggatccagttgtatgcattttactgcatcctggtacagttgacacagatctctctaagccatttcaaagaaatgtccccccagacaagctcttcaccaaagagttctcagttcagaagctactaagcatcattaacaatgtgaagatccatgacaatggcaagttctttgcctgggatggacaagaaattccttggtaaccctgtcacaattcatgtaagaaatatatcaataataaatttacatggaagtgacagatttgtgtggcacattcagcatgtcctgttggtgattttgaatatttcattataaacttacatggaagaaatgagatcataaaataattaggacttataaaaa

SEQ ID NO: 2913 - DNA, 1517 bp, Glycine max
aagatgcttattgaatagagtgcacatttgtaatgtactactaattagaacatgaaaaagcattgttctaacacgataatcctgtgaaggcgttaactccaaagatccaatttcactatatacggccgggccgggactcccgcggcgcacatagctgagagagaaaggaaaggttaactaagaagcaatacttcaatggccacccttgttgttcataaccaaacttcttctgctcaagatgctgaggctctccaacaggctttcaaaggatggggggctgatgacaaggccattatagcaatactgggtcacagaaatgttcatcagaggcaagaaatcagaaaagcttatgaggagatttaccaagaggatctcatcaaacgccttgagtccgagatctctggtgactttgagagagctatgtaccggtggatgttgcagcctgcggatcgtgatgctgttttggtgaatgtggcaatcaagaatggcaccaaagactaccatgtgattgcagagattgcttgtgtcctatcagctgaagagctcttggcagtgaggcgggcctaccaccgccgctacaagtgttccttggaggaagatgtggcagctaacaccaccggcaatcttcgccagcttttggttggattggtgacctcatataggtatgagggtgatgagatcaatgtaaaattttcacaaactgaagctaatgttcttcatgaatctgtcaaggagaagaaaggcaacagtgaagaagtcatcaggatccttactacaagaagcaaaactcaacttgtggcaactttcaaccgctacagagatgaacatggaatttccatcagtaagaaattgttggatcaaacatctgatgacttccacaaggtgttgcacactgctattcgctgcatcaatgaccataagaagtactatgagaaggttttgcgcaatgcagtcaagaagtttggaactgacgaggatggactaagccgtgtgattgttacaagggctgagaaggatctgaaggacatcaaagagctctactacaagagaaacagtgttcaccttgaggatgaagtgtccaaggaaacttctggggactacaagaagttcctcctcactctcttggggaaataagactaagttaagaacttgctctaagggcatcttagtaatgggtttttgttaattatgtcattggtttctggtttgtgcgatttcattatgttagttttccagtaagagtttgttatatctggttaagtttttgagacaacaagaactcgtgtcttgtttgagggcatgcgtgccatttcttagggttgtgttggtacttggcatgctcttattagaggacctctatgctgcgtgtttcctttggattatgctattacctcacctggtttgcttttaatgaaaggttgataacaaatttatatgtaaaaaaaaaaaaaaaattaaattctaatcagcagaggcaccggtagcaagttattctatacaaaaaaaaaaaaaaaaaa

SEQ ID NO: 2914 - DNA, 800 bp, Glycine max
tcgcggtatcatcagtgagtgacagtaacattgggttgtgatttgtgagggaagaaggggtagaaagaatcaggagaaggaaataatcatcaaccatggcagggagattgacgaacgcagcatcgaggatcttaggcggaaacggcgtcgtttaccgatccgtagcttcctctcttcgcctccgctccggcatgggcctccccgtcggcaaacactatgttcccgacaaaccccttcccatgaatgaggaactcctgtgggacaacggcactgcatttcccgaaccgtgtatagatcgtattgctgacactgtcggaaagtatgaagcattggcctggctgtgtgggggattgagttttttcgcgtcgctgggattgttggctgtgtggaatgacaaagcctccaagacaccgtttgcacccaaagtatatccatatgacaatctgcgagtggagcttggtggtgaaccataggtagatccaaggcaacgatcggatgagaagttcttgtttgatgtattgttcttctacgtttatttgtgcttttgtgtagttcaaaataagggatcatggaggacttgctgaaaccatctaaaggaatagaagagccgaatctggttgttcttttgatcatgctaatgcttatggtgactattgtgaggagtgagtcagtattatgcccagcatgtgtttggatatgcatttaccgaattgattttggatcaatgagtttataaaattggtgttaatatactcaatcactgattttggcagtgacagttaaaaaaaaaaaggggggcc

SEQ ID NO: 2915 - DNA, 855 bp, Glycine max
aaagaaaaaacaaacgcggcataacgtttgcattgtcgtctcatcttagcctttacgtgtcgaaaccaaacacatgcaccaaccgcactatatatatctcacaccacaccttcaaactttcataatgcactgccccggcatatcctcgtcagtgcttactacttaatttccacttctaattaacaaagttaagcaagcattgacttggtacctataagtagtaatggctgtggctttgacgattgtgttgagcttgctctcggttctctcttctgcatcttgtgcacgaatggtgggggggaagacggaggtccccgacgtgagaacaaacagggaagtgcaagagcttggaaggttcgcggtggaggagtacaaccgcggtttgaaacagtggaagaacaatgggagtgaacagttgaacttttcggaggtggtggaggcgcagcaacaagtggtgtcaggaatgaagtactacttgaagatctcagctactcataaaggggttcacaaaatgttcacctctgttgtggtggtcaagccatggcttcattccaagcaactccttcattttgcgcctgcagcaccatccagtaaagatttttgagatgcatgcatgctagctatttggagctaattaattatataataattaataaccatggcggtatttgtaattgcaagtgagctttttgattttcttctactaatgttttcctctactttttgtaatgggtatatctgtgggcagaacaacaaaaatcaactacgagttgaaatcttacttaccagccatatgtaccaaagaaagtgaataataactatatatatgctatagttttgttctaaaaaaaaaaa

SEQ ID NO: 2916 - DNA, 783 bp, Glycine max
  misc_feature (767)..(768): n is a, c, g, or t
  misc_feature (780)..(780): n is a, c, g, or t
aatatcctcgtccctgcttagtgcttaatttctactttctacttctagctaacaaagttaagtaaactttcgcttcagtactttatatatatataatggctgtggctttgacgattctggtgaccctgctctcggttctctcttctgcatcgtgtgcacgaatggttggggggaagacggagatccctgaagtgagaaaaaacaggcaagtgcaagagcttggaaggttcgcggtggaggagtataaccttggtttaaagctgttgaagaacaacaacgtcgacaatgggagagaacagttgaacttttcagaggtggtggaggcgcagcaacaagtggtgtcagggatgaagtactacttgaagatctctgctactcataatggtgttcacgaaatgttcacctctgtggtggtggtcaagccatggcttcattccaagcagctcctccattttgcgcctgcatcatcatccaccaccaccaccaccaccaccatgcatccagtagtacgtaaagataattgagttgcatgcgtacgtggcttgctttaatttggagctaattatatgataataataaccatattaaggttaatttcttgactggatacatgcatggcggtatttgtaattgcaagtgagctttttaattttcttctaataaattttaatttcctctaaaaaacaaaaaaaaaatctgggggggagaacaagaaaaatcaactacgagtagaaatctacttaccaaccatatgtaccaaagaaagnnaataataactanatg

SEQ ID NO: 2917 - DNA, 1329 bp, Glycine max
gaagaaagagtgtatgtgtgtgtcaacgtgctaacataaatacaactgcttctctttctctttctctttctctgtctcttttctttcaggagagaggtgggttttgcgtgtggccagatgcgagacaactttgcttagggaaaggtcttctatatggatttatgcgattattttcaataccattaaaaacattgcgtggagctagtcggtcgctgagagtaaatcaattttgcagtgtagtgaatctatcgtcctcattgcagatagaattggttccatgccttagggacaattatgcatatcttttacacgatgtggatacggggacagttggtgttgttgatccttctgaagctgcacctatcatagatgcgttgagcaagaaagatttaaatttgacttacataatgaacaccaaccaccatcctgatcatactggtggaaatgcagagttgaaagaaaggtatggggcaaaggtaattggttcagaaatagacaaggaaagaatccctggtattgatatctatttgagtgatggtgataactggatgttcgcaggccatgaagtgcatatattggccacacctggtcacaccgaaggtcatgtaagcttctactttccgggttctggggcaatttttaccggagacactttgttcagcttatcatgtggcaagctcttagaaggaacccccaaacagatgttatcttctcttaaaaggatcatgtctttgcctgatgatacaagtatttactgtggtcatgaatatacatcgagtaattcaaagtttgccttgtctatagaacctgaaaacaaggaacttcaatcctatgctgcccatgtagctaaccttagaaataagggcttgcccacgattccaactacggtgaaagtggaaaaggcttgcaatccatttcttcgcacatggagcatggaaatccggcaaaaactaaacattgcaaccacagcagatgatgcagaagccctgggtgttattcagcaagcaaaggataatttttagaattttttaattaaatattaaaattcttaatatacttattctgtatagattaggttaatgaatccatcaaatggaataatatttacttggtgttgtcgtaatataattttccaattttctttgggttcatttgagatgtaaattagatttcagttttgttggcatgatgggagtcaaaatcatgatggtgcgtggaagaagctcatcactcagacactcccttcgtgttagcatatatatgcatatgttgagaattattgagaaagttgtattttgatccattgcacttctgtgatatgatgatttt

SEQ ID NO: 2918 - DNA, 1333 bp, Glycine max
  misc_feature (945)..(949): n is a, c, g, or t
ttttttaattttttttttcttgctttttttttttttttttgatcagcaaagataaaactatatatatattagagaagtaccagaggtactaaatacagagttagacaccataaatatggctcctcaatcacgcagcataagtctgattaggaaccaaaatatgggaagaaaatacatgtgatatgatcccaaaaaacacccctactactgcaaaaaatgatgtttgaagttactggaccattgattgaaatgaatagtaaaatccttctccaaattatgaagccaagtccacattaagaaagtggcgtcttcaaccaattggtttccatcaaaagtcgctccagagaacagaattcggtttcgaagctgccaagtagaccaagtgatagccaaccaccagtatggccacctcctattccttctaccatcttcttgcaaaaatgagtactgcatgaacagctgtttggtactcaaaggcatagcacctttgagatttatccaggacatagagtcccaccatataggtgggatctcactgcagtggataaaatggtgggaagcatcctcctccatccttccacaaaagggacaattcaaatcaggaatctgcacttgtctagcctgcaagtttgattttgtaggtaacctgtccctaaggagcctccaagcaaagaccgctatcttacttggaatcctaattttccataacacccggaaacaatcctctaaattctcctctgcaaccccttcccataacacttcataagcactttgagtagagtaaatacccgactgatctgctacccacacccacctatcagccccatgagtgagaataacttgaccatcaacttcagagaggaaagtgatggccaaatcaacttcactatcaaacagcggtcttctccaaataaaacgccactcccaagtggagttaatatgctnnnnnacttgaccaattagctgctgctgttgggaagaaatcagatatagcctaggatacttttcagctagagattgatcatgacaaatccatctatcttcccaaaattttaccttgtccccagcttctaccttccatttgaattgctgttgaagacttataccatggtgagagtgctgaattgctcttttgaaatccctccaccaaatggactgcagtgttggctcttccttcttcaagtaaacccctccagtccccatatttagcctccaaaactgcaacccaaagagacccttggtgctgcataaggttccacatccatttaccgagcagggccaaattaaaagtctgaatatctttgatgcctagaaggaataaagctcacaaatc

SEQ ID NO: 2919 - DNA, 1501 bp, Glycine max
ctcgagccgattcggctcggggagaaaactttgcctagaagacccaagctcgtgtctaagcgctacggtttatgtgatgtcttcgtctattcccaattccaaattcaagaaattttttaaacttgacatatctgctatcaccttttccgtttcttgcgattcgacgatggccgatcaaaagctttcagaaccggcgcttaaacgtgagcagcttgatgaattcgtgagtagtctatattttgaacaacgaattcttgaactccgacttcttcaagacctcgagaacaatgatgaatgtaggaaaaatgggagcctgaaaaggttaaatgaccagagtgatgtctgtggatttagaagttgcttcaaaaatcattatgattcgcttccgaatcagaggtgcttgaggaatcgagaagaagtgattcaggagacgatggaaatggagttggaaaatatgatggaactgggcaccctcaagggcaagaaaacatattcttttaagaatggtacaagaagtgcgttgaaccttgagaacaccacaagatcctttctagataacaataaatcaaatgataataactggaatggcgaaatgactttacccctgctagtagacaagtccaccgtctgtatgttaaacaaggatgaggaagtagacgagcccctcagtccgggcaaacacatgaaaactgcacaaagtgttttatcacttttgatagcgactattgcgcttctttggattctcaccgacctatgcagcctgttatcaattatcaagcttcagccagaacatggccccctccccattcggttttctttgcttgaacctgttggtttcatggtgtttgtttgggctgttgcagcaatgattgttattggtgcaccattttctcgtttggtgagtgccattcttttattttggggtatttggctgcttgtcagatcttctcaatcactcactacactatgccttccaatattgggaatccttctgatggtgtggcatctctgctcaaggaaaagcagctgccaaataaagggtaatgaacaaggaagtgaagctcccaaaattaaaccaatgcgtttcactcttgctgtctaacatgcactttcccgattgctagtgtttctgttttagtttgtcagtaattaataggtgttctactttcagggcagtgctctgaggtaatgctgttcgattttacttctcagtctactacagtgtgtatttggtaccaaacttttatgctaaaataatccaaggcgtgtgttttggacaattataattgttgtaacttttaatttcacatttttatattttcttggcaaaattgtgtttttgtccaccattttgttttcaatttcggattttgtctcccggacttgctggaacataagaaatcgttacatgaaagacgaacttgctggaacataagaaattgcccaactggtacaaagagaagagtccaagttagaaaaaacttacaacataaaccaactc

SEQ ID NO: 2920 - DNA, 1478 bp, Glycine max
  misc_feature (1454)..(1454): n is a, c, g, or t
  misc_feature (1461)..(1461): n is a, c, g, or t
  misc_feature (1465)..(1465): n is a, c, g, or t
acgatcgcagaaatcagctacgtaggccccccccccaaaaaataatgatgagaaaacaagaaagataagaagcggatgagaattgagtgaggaaagcgagtcttcttggaaacttttttctttcattttccgttagtgttgtggctatggagtcggcattgatatttctgggaacgggagtttcgggaacggttccctccatgaggtgcctcatcgacccttcagatcctccatgtctcgtctgcactcaatctctctccctcccacctcacctaaaccctaactacaggtgcaatacctctctgttaatcgattattactctcaaagcgacgccactcacaaatatatattgatcgacgctggcaagaccttcagggagactgtacttaggtggtttgttttccatcacattccaagaatagattctattcttttgactcatgaacatgctgatgcagtccttggattggatgatatacgagctgtgcagccgtttagtcccactaatgatattgatcccacccccatttacttaactcggcattcaatggatagcatggaaaaggtgtttccttatttggttcagaaaaaacacaaagaagggcaagaaatacgaagggtagctcagtgttgctggaacataattgctgatgattgtaatctgccattttctgcatcaggcttaaaatttattcctttgccagtaatgcatggagaggattatatctgtttgggtttcctttttggtgagaaagatagggtggcttatatatctgatgtttcacggattccagctagtacagagtatgtcatttcaaaaagtggggctggacagttggatcttcttatattggatacactgaaaaagactggatcgcataatgttcacttttgtcttccacaggctcttgaaactgtgaagaggttatgtccaaagcaaaccctattgattggaatgactcacgagtttgatcaccacaaggacaatgagtttttaatggactggtccagaagggaaggactattggtgcagcttgcacacgatggattgagagtgcccataaacttatagtaaggtaatactcatggacctgaatatgagtctcatcaaaagtagcacatacagactatgaactcttcactatgatcagtagaatgcatttgcgtttgaggtctcacccttcttcgagggtgcacttcctaaattatcacatttctgaatactgttagcttttgtttttgttttctttttcttcaaacaattttcctgatctccttaaacaaggtcaccttaagttatacttggccatagacatgtaatactttgtctcctcccccaataccttttcctgtggatcatgtttgtatttcaatgaaaaattgattctcgtgttcttgcagggtaaaaaaaaaaaaaaaaaactcggggccccgtcccccattccccctaaantgatccntttncaatccctggcct

SEQ ID NO: 2921 - DNA, 737 bp, Glycine max
aaacaaacaaaacagccaccgccataccaagaagaagaagaagaagaaagtggttgaagagtttggtggcaaacatggcgatgcgcgacctcgtttcgggcgctgcggcatgtggcgactcttcttcttcttcctccgcaaaccctctcgcttccctcgccaacgcccttattggctcttcctccaaaactccggagaggttgaaggagattcccacatccactcccactgaccctacatcccaattttactccacagctctccccgccaatcagcttcccggctccgaattcgataagcctctattgaatttaaactcccaggcttcggagtttttgcataggttccgtggctccactggccttgaggagacatgggatgagatacagcgtgatggggcggctgcccaaatgcgccaactgccaccggggattcaacagccgccgttggatgggacaccgcagagagttctatcaaacattttgcattcatttcttgatagcagccgtggtggagtgccttttcatcctgctccacttccgatgttgggtttatctgaaggtgataaacaatgcatacgtgaccgcagcagcataatggccaggcatctctttgcggataaaagcgaagaatttattgatgcccaagtaaatgcgcttctatgctctctagatattgacagcagtgtccgtggtaggggacctatgccctgaagatttcggggagctgagggatac

SEQ ID NO: 2922 - DNA, 1060 bp, Glycine max
atgagtcatgcaccggccgcaatacactcaattgccttctacaatcttccgtttcataccatataatggagattggacatctaatcgttttagctttattatgtgtaactctcaagggagctgatgcgtcgcaatccgcgaaagattattggcactccgtttttccaaacactcgtctgcccaagcctctctgggatctagtgttgccttcccctaaaacaaatatgcctattaaagtcgaagaagagaagcagtattggactcttttttttgagcatgaccttcatcctcgcaagataatgcacttgggcctccacaagcacaatgatacaaaaaattccacaataagctcatgggctagaacaacaagtcaaccttttggagcatggttacacgcaaaagtagaagagagatataatcttgacgaggtttgtgggaaaacagctgctaaaggagaagaaaagttttgtgcaacatccttgcaatcaatgatgggtttcgccatttcgaaacttgggaagaatattaaggcgatttcaagttcctttgcccaagatcacgatcaatatgttgttgaggaagtgaacaaaattggagaaaaagctgttatgtgtcatagactcaactttgaaaatgttgtgttttattgccaccaaatcaatgcaacaacaacttatatggttcctttggtagcatctgatggaactaaagctaaggcactaactatttgccaccatgatacaagaggcatggatcctattgtggtttatgaagttctcaaagttaagactggaaccgtgcctgtttgtcattttgttggcaacaaggctattgcttgggtacccaatctagtcactagtgaatcttgtgtggtctagttgctatatattttgttgtacactagttttcatttatgtttagttttttttaaaattgtacacactggttgaggacttacatgttggaacttgacttatgttaaagtgatgtctatgtatggagtatcttccatgtatttcaaataaatggttttttttctttaccaaaaaaaaaaaaaaaa

SEQ ID NO: 2923 - DNA, 1366 bp, Glycine max
  misc_feature (21)..(21): n is a, c, g, or t
  misc_feature (1307)..(1308): n is a, c, g, or t
tcgagtcagctacgtaggccncccccccccgaaatattcaacacaaatttaactatctatttcgtataacatttcatttcacttcacttagggtggtgcatttgcaaccctttaatttcctcacaaaaatggaggaacgtagtttgtactcactagtgtttcttgtgcttgctttggctattgtgaacaaagtgcatgggcaagggacgcgtgtagggttctattcgagtacatgcccacgcgctgagtccattgttaagtccacagttacaacccatgttaattctgatagtactttggctgctgggttgcttcggatgcacttccatgattgctttgtgcaaggttgtgacgcttctgttctcattgccggttctggcactgagagaacagcatttgcaaaccttggtttacgaggatttgaggttattgatgatgcaaagaaacagctcgaggctgcatgccccggtgttgtgtcttgcgctgatatccttgctcttgctgctcgtgattccgttgttctgagtggtggactgagttatcaagtgcttactggacgcagagatggacgcatatcacaggcttccgacgtgagtaacttgcctgctccttttgactctgttgatgttcagaaacaaaagttcacagcaaagggcctcaacactcaagacctcgtcacccttgttggtgcacataccattggtactacagcttgccagttcttcagtaacagattgtacaacttcaccgcgaatggtcctgacccttccatcgacccttcatttctttcccaactacaatcactatgccctcaaaacggtgacggttcaaaacgagtagcgctagatacgggtagtcaaaccaaatttgatttatcttactatagtaatttgaggaattctcgtggaattctgcaatctgatcaagcactatggagtgatgcttccacaaagacaactgttcagaggtacttgggcttaataagagggttacttggattaacattcaacgtggaatttgggaagtctatggtgaaaatgggcaacattgagttgaaaaccggtaccgatggtgaaattcgcaagatatgttctgccatcaactagattgccacttcaaacaatgaataattaaattgcttgtagaattggctttatttgtatctgttggcatttgccattgaagtgtatcatgtacattttgcttcttttggtggggccagacgaaatattttcatcttgaaagtgtataagttacagaaaatgtaatagaattaattaataaatatatttttcttgttttcggcnnaaaaaaaaaaaaaaaaaaaaaaaaaaaaaaaaaaaaaaaaaaaaaaaaaaaaaaaaaa

SEQ ID NO: 2924 - DNA, 1389 bp, Glycine max
actgcatcatgctccattgtctctcttgaggttgcagacttagaaagagagagagagagagaatgggtctcatctcaatgcaatttaggttctgaaaaccaaagcttttcataggaaaagttgtgctaagatgccagggaaacctgacactgatgattggcgtgtagagcgtggggagcagattcagtttcagtcttccatttactctcatcatcagccttggtggcgcggagtgggggaaaatgcctccaaatcatcttcagatgatcagttaaatggttcaatcgtgaatggcggaggtgttcccaaagaataccaaaacatcaaacatgccatgttgtcaaccccatttaccatggagaaacatcttgctccaaatccccagatggaacttgttggtcattcagttgttttaacatctccttattcagatgcacagtatggtcaaatcttgactacttacgggcaacaagttatgataaatcctcagttgtatggaatgcatcatgctagaatgcctttgccacttgaaatggaagaggagcctgtttatgtcaatgcgaagcagtatcatggtattttgaggcgaagacagtcacgtgctaaggctgagattgaaaagaaagtaatcaaaaacaggaagccatacctccatgaatcccgtcaccttcatgcaatgagaagggcaagaggcaacggtggtcgctttctcaacacaaagaagcttgaaaataacaattctaattccacttcagacaaaggcaacaatactcgtgcaaacgcctcaacaaactcgcctaacactcaacttttgttcaccaacaatttgaatctaggctcatcaaatgtttcacaagccacagttcagcacatgcacacagagcagagtttcactataggttaccataatggaaatggtcttacagcactataccgttcacaagcaaatgggaaaaaggagggaaactgctttggtaaagagagggaccctaatggggatttcaaataacacttccctcagccatacagcaagagttaggtgaagatgaagggctttatctcatccaacttgtgatgctgtatagaaggcaattcattcttggcttagttaagtggtgagaccagtgacatggtgtacactatggccttgtttggtctctcccttgcttttgtttctctctacaagtccatatgtaaaatggataacagaaagaaaaagaaaaatcactttggtttgagaactttttaaagtttatattaactgtgttaaggttcataaaactgtagactgatttgtgtgacatgctccacagaaccttaaattttcctctattttgtcctatatctccttgcacatttgttattctaaattggtgcatatattctaat

SEQ ID NO: 2925 - DNA, 1458 bp, Glycine max
tcatgcgtccggcgagaagacgacagaggggggtctctcttgaggttgcagacttagaaagagagagagagagagaatgggtctcatctcaatgcaatttaggttctgaaaaccaaagcttttcataggaaaagttgtgctaagatgccagggaaacctgacactgatgattggcgtgtagagcgtggggagcagattcagtttcagtcttccatttactctcatcatcagccttggtggcgcggagtgggggaaaatgcctccaaatcatcttcagctgatcagttaaatggttcaatcgtgaatggtatcacgcggtctgagaccaatgataagtcaggcggaggtgttgccaaagaataccaaaacatcaaacatgccgtgttgtcaaccccatttaccatggacaaacatcttgctccaaatccccagatggaacttgttggtcattcagttgttttaacatctccttattcagatgcacagcatggtcaaatcttgactacttacgggcaacaagttatgataaaccctcaattgtacggaatgtatcatgctagaatgcctttgccacctgaaatggaagaggagcctgtttatgtcaatgcaaagcagtatcatggtattttgaggcgaagacagtcacgtgctaaggctgagcttgaaaagaaagtaatcaaaaacaggaagccatacctccatgaatcccgtcaccttcatgccatgagaagggctagaggcaatggtggtcgctttctcaacaaaaagaagctcgaaaattacaattctgatgccacttcagacattgggcaaaatactggtgcaaacccctcaacaaactcacctaacactcaacatttgttcaccaacaatgagaatctaggctcatcaaatgcgtcacaagccacggttcaggacatgcacagagtggagagtttcaatattggttaccataatggaaatggtcttgcagaactgtaccattcacaagcaaatggaaaaaaggagggaaactgctttggtaaagagagggaccctaataatggggctttcaaatgacacttcgcccagccatacagcaacagttaggtgaagatgaagggtttttatctcatccaacttgtgatgctgtattgaaggcaattcattcttggcttagttaagtggtgagaccagtgacatggagtacactctgccttgtttggtctctccccttgcatttgtttctctttacaagtccatatgtaaaaatggataacggaaagaaaaagaaaaatcacttttgtttgagaacttttttaagtttgtttttaactgtgtgaaggtttcataaaattgtggactgacttgtgtgacatatgctccacaaaaccttaaaactttcgtctattttgtcctatatctccttgcacattattaatctaaattggtgcatattttctatagtaaaaaaaaaaa

SEQ ID NO: 2926 - DNA, 2045 bp, Glycine max
gctttacacaacggtggaaccgccacacacacaccctttctctctctgtctgtgtgagtttgtttcattttttgcgttatacctctcttaaagtgttcccgccagagagagagagagagggggcaaggcaccgggaaaagtgccactaattgtgatgccgaatcccgaggctcaccacccctcccggtcccgggcccggccctccacgtcagccgcggcccgccccccggcccgggcccgcgtctccctccgccagcttctgcgcgtggcatcagtcgcgagcggcatccagttcgggtgggccttacagctctctctgctgacgccctacgttcagcagctggggatcccccaccaatgggccagcatcatctggctctgcggcccagtctccggcctcttcgtgcagcccctcgtcggccacatgagcgaccgctgcaccagccgctacggccgccgcaggcccttcatcctcgtcggcgccgtcgccatcgtcgccgctgttctcgtcatcgcttacgccgccgacatcggctggctcctcggcgacaccgcggactaccgccctgccgccatcaccgtcttcatcgtcggcttctggatcctcgacgtcgccaacaacgtcacgcaaggtccctgccgtgccttgctcggtgatctcactagcaaggatcctcgaaggacacgtgttgcaaatgcttattactcactgtttatggccattggtaacattcttggctatgcaactggatcatatagtggttggtacaagatttttacttttgccctttcccctgcttgcacaattagttgtgcaaatctcaagtctgctttctttcttgacattgctttcattgcggtcacaacatatatcagcatcatggcagctcatgaagtgcctctaaattcaagtgaggcagcccatgctgaagcaggggcaggggagtcaggtagtgcagaagaagctttcatgtgggaattatttgggacattcaaatattttacaacccctgtatggataattctgtctgttactgctctgacatggattgggtggttcccatttactctctttgatactgattggatgggtcgagagatttatggtggtgatccaaatcaaggccttgtttatgatactggagttagaatgggagcacttggtttgttgcttaattcagttgttcttgcattaacatcattgttcatggagaggctatgcaggaagaggggagctggttttgtgtggggaatctcaaatatcatgatgaccgtttgctttcttgcaatgctagtagtaacctatgtggcaaataacatgggctatataggcaaagatttaccaccaactggcattgtgatagctgcgttgattatctttaccattcttgggtttccactggcaatcacttatagtgttccatatgccttaatttccacacatattgagtcattgggactcggccaagggttatcaatgggtgtcctaaatctggcaatagtggtcccacagataatagtgtcactgggaagtggaccatgggatcagctatttggtggaggaaactccccagcctttgctgtggcagctgtttcagcccttatcagtggactcatagctgtgttggctattcctcgatctggtgctcaaaaggctcgaagccatgtatgaggtatcatgttctgtctgcttttggcatttatttctttcgaagaaggatggtgaaaatgaacaggtagcatggatttgtatatagttatttttttattgtatccttttttcctgagcaaaaatttcaatctcccaattgtttccgaataaatgaatgaatgcttgaatgtactttaatattattggtcataatttaaagtgaatgacctgattttttagtgtcaaaaaaaaaaaaaaaaagctttgggaacaatttttgtgtatgatcctgatgagtgagttgtctgtttaaaacagtgaggttggttggctatgtaaatcatgacacccttcaacaagctgtaggaaaaggatgaataatactcttgatgtc

SEQ ID NO: 2927 - DNA, 1595 bp, Glycine max
tcgagccgctacgtaggcccccccccattgataagattcttacctctgtaggaaaaatcaaactcacatacttaccggatgagtctgtttcttaccgaggacaagctttattagtgtctgagtcagtcttctggtgcaagcaaagcaaccagctagcgtggtctttgggtgggtggtgtgtggaaattggatattgatgagaacgcagactctacacacctccccatactccatactccatacccttttcaagtttgaattaatcccttcttgttttgtcccctaaacaccaaacccttccagctgtcaagattttctccgtattatactaatcaaattaaatatcatcatacattaaaaaatcattcagcgcatttaaaccatcgtgccccaccccatttgtactatactactatgtaacaattacaattacaatgtgattcttttttacacaataaagccacgagtatggcaacaaaatgcaagtcatatagtacttaatttgactcggtaaattaaaattttaaaagaaatcttgcaagactagctagctagcatcacctaagttctacatatagcccagctaggattgagctatactcaactcaacacatcattctctctttccctctctatctctatctctctttctctgtctcttttctggttgaagtttgaaagacaaatacaccatggcagatatcctgagtgaagaacagattgttgattttaaagaggcctttggcttgtttgacaaagatggagatggttgcattactgtggaagaacttgccactgtcattcggtcattggatcagaaccccactgaagaagagctccaagatatgataagcgaagtcgatgcagatggcaatggaaccattgaatttgacgagttcttgagcttgatggccaagaaagtcaaagacactgatgcagaggaggagctcaaagaagctttcaaggtttttgacaaagatcaaaatggctacatatcagctagtgagttgagacacgtaatgatcaatctaggggaaaaactaaccgatgaagaggtggagcagatgattaaagaagcagatttggacggtgatggccaagttaactatgaggaattcgtcaagatgatgatgaccgttcgatgaaacactctcacctaattaattggattggacacagatttgttattcaaaattcattggcttccaacctcccaagaaataagtgttctttctttattattgtttgttgtattgtactattattctacttgtacttagtaatgaccaagcagtagattggcacccccattccatttgatccattccaaaattaaattactattcttgtaattttagttcagtacattttctatcctccgagagtaagaaacccaaggagcatatctaccattaattatgcatgacttttaccaagtgccatagttctcatactttaatcaaatggtggctggtgggtgtgttccatggattaagaaaatttctgaatcacggacttggaaaatggacctgcacataaatttaatgctacattaaatttataataaaaagattgattcttgttttccatgatct

SEQ ID NO: 2928 - DNA, 1123 bp, Glycine max
  misc_feature (1044)..(1044): n is a, c, g, or t
  misc_feature (1059)..(1059): n is a, c, g, or t
  misc_feature (1062)..(1062): n is a, c, g, or t
  misc_feature (1068)..(1068): n is a, c, g, or t
  misc_feature (1070)..(1070): n is a, c, g, or t
  misc_feature (1078)..(1078): n is a, c, g, or t
  misc_feature (1081)..(1082): n is a, c, g, or t
  misc_feature (1087)..(1087): n is a, c, g, or t
  misc_feature (1090)..(1090): n is a, c, g, or t
  misc_feature (1100)..(1101): n is a, c, g, or t
  misc_feature (1105)..(1105): n is a, c, g, or t
  misc_feature (1107)..(1107): n is a, c, g, or t
  misc_feature (1109)..(1109): n is a, c, g, or t
  misc_feature (1119)..(1119): n is a, c, g, or t
  misc_feature (1122)..(1122): n is a, c, g, or t
aaaaatcaccggagtatttgtttgcttcctggcgatcccttgcaaccctagtcttcgaattgccccatatcacaaaccacattaaaaaaagactaccacgtattcttctctctccgtctctctctctctctctctctcttcacagtgccaatggcggatccaatcgcgaaggttctgatcgcgtttgcgctcttagcttccctcttgctgtgttcgcacgcttcctccgacgttcccttcatcgttgctcacaagaaggcctccctcaacagactcaagtccggcgccgaaagggtctccgtcaccatcgacatcttcaaccaaggaacctcgacggcctatgatgtaagcttatcagacgatagctggccaagtgatgcttttgatgtaatcagcggtagcacttcaaagtcatgggaaaggcttgatgctggtggcatcctttctcacacatttgagctggaggcaaaatcaaagggagtatttgccggtgaaccagctgtcataaagttccgtgttcccacaaagtctgctttgcaggaggcatattcaactcccatattgcctttggacgttctttctgatagacctcctgagaagaagtttgaatgggctaagaggttgctggctaagtatggatctctaatctcagtgatctccatcatggtcctgttcgtatacttggtagcttcaccatcaaaatccagtgcaaagggaagcaagaagaagcgttaatcattggcaaattagtgcatttgcaatcagacactttggaggctagatcatgatattttctgatggtggtcagtttttacatagttgttggacctttttgaatgaatggttaaatgagttagtgagagaacaaattaatttcttgacggcatagcctaaacagttgtttttggttctcactggacggaatgtatcttttagctagcaaaagtatattttcttaattacctgatctcagctattttggattgaatgccatatattctgacgacctcttaagatctaaaaaaaaaaaaaaaaaaaattccngcgcccggggaaccnctnattttnancggccccnccnnggggnacncccccttttnntccntnanggggggtaantcnc

SEQ ID NO: 2929 - DNA, 1088 bp, Glycine max
ccacgcgtccgaaatcaccgtagtatttgttaccgctcgccaagccgccgcaaccctagtcttcgatcgaattgccccagatcacaaaccacattaaaaaaagactcccacgttctcttctctctccgtctctctctctctctcttcatttctcattgactctctctttctctctctctctgcacagtgccaatggcggatccaatcgcgaaggctctgatcgcgtttgcgctcttagcttcccttttgctgtgcttgcaagcttcctccgatgtccccttcatcgtcgctcacaaaaaggcctccctcaacagactcaagtccggcgccgaaagggtctccgtcaccatcgacatctacaaccaaggaacctcgacggcctatgatgtaagcttatcagacgatagctggccaagtgatgcttttgatgtaatcagtggtagcacatcaaagtcatgggaaaggcttgatgctggtggcatcatttctcacacatttgagctggaggcaaaatcaaagggagtatttgctggtgaaccagctgtcataaagttccgtgttcccacaaaggctgctttgcaggaggcatattcaactcccatattgcctttggatgttctttctgatagacctcccgagaagaagtttgaatgggctaagaggttgctggctaagtatggatctctaatctcggtgatctccatcatggtcctgttcatatacttggtagcttcaccatcaaaatccagcgcaaagggaagcaagaagaagcgttaatcattggcaaattagagcatttgcaatcagacactttggaggctagatcatgatattctgatggtggtcagtttttacatagttggacttttttgaatgaatggttaaatgagttagtgagagaacaaattaatttcttgacggcatagcctaaacagttgtttctggttctcactggacggaatgtatcttttagctagcaaaagtatatttcttaattacctgatctctctgccattttggattgaataccatattttctggtgaactcttaagtttgatttcctttgtaaattatttgccgcctcatc

SEQ ID NO: 2930 - DNA, 887 bp, Glycine max
acgaaacaaaacgcactttacatcaccatagtttaattacgctcgttcgaattttcttgtccgcgccagacatggctgatacccaaccgcgaccaaacgacgccgttccttcgaaggagcgcctcggcacacgatgctgtcactgcctctgccaaacattctggatccttttggttctcataatcaccatcgtcatgcttgcgattcttgtcctgtacatcatcatcacaccacgctccttcaggttcaccctgattgacgcgaacctcacacaatttgattacaccgccaacaacagcactctctactacgacctcgttctcaacatcaccgcgcacaaccccaacaagaggctcaagatctactacgacgtcgttcgggcccacgcgctttaccggcgcgtggagttctccgccgccgacgtcaacatgccctggaacggctaccttcaggacaagaagggcacgaacttcttcggcgctgttttctcgggacaacgtgtgatggggctgaatagagaccaaatcgcggaagataaaaaagatgggatgttccctattgaccttaagattcattttactatgaggttcaggcttgatgattttcagttaggtcactactatcccagaggcacgtgtgagctcaaggtacctttgacttctaataatggaaataaggtggcttcttttcaccctgccatgtgcgaaatcgacttctgaatctctaagtacatattttgatcttgtctactgaattcgtgaatgtaaatttgtaattcatgatactatattttagtggcagatgattttttttagaataatagtataaaattgtgttaattttaaggttaaatatattttttatctttaataaaaaaaaaaaaaaaa

SEQ ID NO: 2931 - DNA, 2147 bp, Glycine max
gaatctccttcctcttcgcatcatgttctggcctgtattttttataatgaaatctagtacaataaagttttcctgattttatgctgtgtcctgtcgttagtaatgtctgttttagtacacaccttaattatcaagaacatggcttccaaaagttttaagaaactagccggtccggtttcccgcggccacccacacgtccgcttatcagcatagtttagatttatttacactatttcctgcaacttcttctatgctgctagtcaattacttaactttaggagagttgtcgtagacatcttcctttttaatttaataagcatgttacatgcaaaccaaaattatgtagttaccaaacaaacataattttgaattcaagtaggtgccatatagttcctttgattgtagttggctgtagactgtacagggaattcaattgcactgaactccatgaataccaattgagttggatgcttggataaaaatggctgttcaaaactctctccaaataactagaagtggtagtggtggttatgacgatgacgggcgtgctaaaaggactggaactttatggagtgctgtggctcatatcatcacagccattatcggtgctggtgttctgtctttagcttggagtacttcccaattgggatggattgcaggaccagtttgcttgcttttttgtgcaattgtcacctatgtttcttcattcctcctttccgattgttacagaactctggatcctgtaactgtgaaaagaaactactcttacatggatgctgttagagtctatcttggcaataagaggacatggttggctggttcccttcaatatttgagcttgtatggggttagtactgcttatgtaattaccacagcaacctgtttgagagccatattgaaatcaaattgttatcacaaggaagggcatcaggctccttgtaaatatggggatgcagtatatatgatgctgtttggactagttcagatcataatgtcattcataccagatctccacaacatggcatgggtttcaattgttgcggccataatgtcctttacatactcatctattggacttggacttggcatcacaacagtaatagaaaatggaagaattatgggtagtttaacaggagtaccggcttcaaatattgctgacaagttatggttagtcttccaaggaattggtgatattgcctttgcctatccatacacagtcatcctccttgagatacaggacactctagagtctcctccaccagaaaacaagaccatgaaaaaggcctccatgattgctatcctcattacaacattcttctacctctgctgtggatgctttggatatgcggcttttggaaatcaaacaccaggaaacctcttgacagggtttggattttacgagccttactggctcattgactttgcgaatgcttgcattgttcttcacttggtaggaggatatcagatttacagtcagccgatctatggagctgttgacagatggtgttcaaaaagataccccaacagtggatttgtgaataatttctaccaattgaaactgcctcggttgccagcttttcagctaaacatgttcaggatatgttttagaacaacctatgtggtttccacgactggactcgctatcctatttccttacttcaatcaagttataggagtgttaggagccttaggcttttggccattggctatatatttccctgtagagatgtactttgtgcagaggaaaattgaagcttggtctagaaaatggattgtccttaggaccttcagctttatttgctttctggtgtcattagtggccctcattggatcacttgaaggaatcataagtgagaaactaagctaatgaagggtgcttcatttgtttgagtttattgtcttgttgccatatcttccatgtaattcagtttcgcattaattctattactatttactattgagagttaataaaggggataccaattatgtggggatgtgtcaaaatgaaggtggtgttgagcatggtatagttctgtttggtgaagaactccctttaaaggtgtaatgctacataaacaactctctatgcacataaacttgtattgatactggattattagatttagctaaaaaattgtgcaaggtca

SEQ ID NO: 2932 - DNA, 721 bp, Glycine max
agtaagggtttagttatttacgttactcccagatcgcaattggccaattccaccaaagctcctcacgctcacactcactcatttgcaaagaaagagagagaaatggcactgagggcagccgtgctccgccacgttcgtgtgccactccaagccgctccaaaactgcagccatggcgtgccatgtcatcacacggcgacgatcatctctccaaagaggaggtcgtcgaaagagtcctcgccgtcgtcaaagatttccccaaagtcgatccttccagggtgagtccagatgtacatttccagaaggatttgggtttggatagcttggacaatgtggaaattgtaatggcactagaagaggagttcaagctagagatcccagacaatgaagctgataaaattgactcttgtcatcttgctattgagtacatttctaaccatcccatggctggttaactaatgtgtcctttttcctatttggcttcatgttgaacttaaacacagtgcaaccttgaaccttccccttactttcactggatgtttctggaatctggtgttgttggtatgttttcctttttccatttaaattggagtaaaggggctggttgtttagaataatgtgaattgttcagagaagagtttgtcaatgaaaaactgggtttctggaaaaaaaaaaaaaaaaaaaaaaaaaaaaaaaaaaaaaaaaaaaaaaaaaaaaaaaaaa

SEQ ID NO: 2933 - DNA, 1882 bp, Glycine max
cggcggccgcccttggttttttttttttttttttttttttggtgaaaggaagataactttaatttctctactagcatttatccatgcaaagtgaactgatgaactaacatagctactattaattaatcaaatactacagtgataaaacaacccaaaaacaaaaccaaatttcaagcattccaatcaagattacattacaaacttaataacaaaatgatatttaaaaaaaatagaaagaattccacaaggatgctcactattcagcatccaaattatcatattgccaagggttgaattctggtctgatgtcaggcacttcaatgcactcagaactatcaacggcagcacaatgttgggtatatttaccgttgtattggtaaacttccaagtcaccccaaggggtaggagttacttcatctgttaaatcaaaccatctaggagtgaacttatggcccttggcctctcggtttctcttctcagctctttgcctctcctccaaactgctcttctcataaccagatgtggataggtcacccttctcaagggccattctatcaggacgtagacgagagtcagatgccaacaacttcttgggagcagtgtcaaagctgttaatcttgtgtgcaaaatgcgtgtactggaacttgtccttcttcggggtatcagcaactctccaaatctctttcaactcagtgcctggaagtggttctccctctgagtcacaaacttgataattcatagcctcattccattttccagtcatcagtatcttaggctcgtcagcagaattatacacgtacccatccacttcatatctaccagctccaaaccagccacatggttgaaaatacagcaccactttgtcccctgtagtcagatttgtcaggatcatctctcctggtgaatcaatccaagttcgtccaaaaatcaagttgctaacttttgtaggaggaggcaccaaatcaaggaccacaccatctcttttgagggtaacacgcgttcttccaacaggatatacatcaactgagttgccgagaaatttggttttcaattttgatgtaacatcataagtgaaatgttcagtttcagcatgcccagcactcattggagggtgatgactgacctgctctgatataaatgtaatgccaccatggttaaccatttcataagtctcaccaagaattggattgaatggcttccacgttcgttgataggcatagtagacagatataaagaatgatgaagcatatactagtctcatgtatggatcctcagtcttgtccgccatatctaacaggtaagagtactccataagctcagccattttctgaagcattgtcattggttcaaaaatgataactggaagtgtcaccattgatgtgatatcagagccaacatacttttgcatcattttccagtaactatctcgctcctcttgtttccatcgtccctttcttgcttcctcttcagcatcttcagttcctccatctggattaacaacctccagcccctcgtagcccaccaaaccattaacggatttggacatggcactaccgaaattggacaagctggaagcaatagaagcaaaaaagccacccccaccaccagaagaagcagcatcagcaacttgcttgggatcctttggagccatggcaatgaaatcaaatcaaagatggaaacccaattgagaaaagagaaggtttttgaaaataaattcgtagccaacccgatctaatgaggcaaatcaaatgggtatactacacttaaatatgggtttattattgcttaggatgaataatgaatatacccaagtaataataataatattattattataatacatagagaacagcgaagaaagcagggattttggttggcggtt

SEQ ID NO: 2934 - DNA, 1553 bp, Glycine max
gcggggaagcccattaattagttgaacacattataactcctgtttctttattaattctctctttcaaatatatggcagaagatgcttcaattattccaacacacacaaaagcttggtactactctgaacatggtagtccaggtgatgttctcaaattagatcctaattggcccttaccccaacaactcaaagatgaccaagtgctcatcaaggtcatcgctgcatccattaatcccgttgattacaagaggatgcacggcgagttcaaggacactgaccctcatctgcctattgtgccgggttatgatgttgctggcatagtagtgaaagtgggaggagaagtaaaaaaatttaaggttggagatgaagtatatggtgatatcaacgagcaaggcttgtcgaaccttaagattcatggcactttgtcagagtatactattgcagaagagagactattggctcataaaccatccaatctaagcttcattgaagctgctagcattcctttagcacttgagactgctaacgaaggttttgaacatgctcacttctctgctggcaaatctatccttgttttgggaggagctggtggagttggaaactatgttattcagctagctaaacaagtttataaggcgtctaagatagcagcaactgctagcaccggcaaacttgaacttttaagggagttgggcgttgacttgcctattgattacacaaaggagaactttgaagaccttccagaaaaatacgatctagtgtatgatgtagtagggcaaggtgatagagcatttaaggccgttaaggaagatgggaaagttgtgacaatagtaccacctggacatccaccagctatgttttttgtgctcacctcaaagggatctatcttagagaatttaagaccttactttgagagtggtaagttgaagcctatactcgatgccaagactccagtgccattttctcaggttattgaagccatttcctacttagaaacttcaagagccacaggaaaagtggtcgtttatcccataccctaaccacaatatattattaactcatcatataattataattaataatgaacattaattttaaagtgtgtactaagataattgatcaattaattaaggtttgtgtcaaacaaagtcccttgtactactatgctttatgtttatgtatacaaagaaaccttgctgctgaaaataaagattgatatatggttgcaatgtgatcaaatatatcttattggtagacgatatgtaaatattcttgtaagcattctatgagttttgatgcatgttctagtttgagtgaattccggcaactgatcaactcatctatttttatttttttttatcaattagccaataaaagtgaataaataaataaaaaggattggtaattgatgtatctgaaaaccatgatctaggccgcccccgcccagttgaaattctaggttgaaacggacaagacctggtttttactctcagaggcagtttgtatactttatatttttcatttttataccatattttatatatatatttttc

SEQ ID NO: 2935 - DNA, 3087 bp, Glycine max
  misc_feature (127)..(127): n is a, c, g, or t
tgttttcacccttctgtattatggtctgtgatcctttgaggctttacattataatatttctaactagctattgttttaatccatgatagaatcgtcaaagtttctctcagctttctggtgatgctanaactcttgcagtcaaggaatcttctgggcgatcaactggcaaaggaagaggaaaaggggaagcaaaacttgcaacaaggggtattggcgttgatgccagtcctagaacaggagcatccagtatacaggaaacatataaatacttctgcacccgctttgtccgtctaaatggaatcttgtttacacgcacaaggtgtatttcttaacatttctttgtacttgcgctgatgattcatgtgtttttctgacccttttcccctttgtttctcaaataacttgatagccttgagacttttgctgaagttcttgctgttgtaagctctgggctgcgtgagcttctgtcttccggtcaagatgaagagctgtctgctgcgtcggccccccccccccccgcacttgtcatcgtcagaattgtctgcattctagtattcacagtttataatgtgaacaaggaatctgaaggtcaaacttattcagaaattgtacagcgtgctgttctgcttcagaatgcatttacagcagcttttgaattgatgggttacctaatagagagatgtgcacagctgcgtgatccttcttctagttatcttttgccaggcattttggtttttgttgagtggttggctttttatccagatcttgctgcaggcaatgatgtggatgaaaatcaggcaaatttgagatcagaattttggaatcgttgtgtatccttcttgaataagctgctttcagttgggcctatgtctattgatgatgacgaagaggagacttgctttaataacatgagcaggtatgaggaaggggaaactgaaaaccgacatgctttgtgggaggactccgagttaaggggatttattccacttcttcctgcacaaaccatcctggatttttcaaggaagcattccattgtaagtgatggtgataaggaaagaaaagctcggatcaaaaggattttagctgctgggaaggctttagcaaatgttgttaaggttgataaacaaatgatctattttgattcaaaggtgaagaaatttgtaattggtgttgagcctcaaactgcagatgattttggtttttccacctattcaggcatgtcgaatgcaaaagagttagtgcaagaaaatcctgcacagaaatcgaagatggaaattgttcagtcaaaccaacaccagcatatggaaggagatgatgacgatgaggttattgttttcaaacctgtagtggctgagacacgagctgatgtgattgcctcatcatgggcaccccatgtgggtttggaaccttttccaaaagcatctggaggggatttaatatttcatgttaattctacttctaatcctctaagtaacctaagtcatcaaactttatctgttcctggtggtggtatggtgcctcaacacctgcaaccagttcagccacatacatcaaggtggttagaggaggaaatttctcttgctaacaatttaaaaggtcttgggttatttgagaatggacatgtgatgaaacctggtctacaagaagcggttggcttctccaaccatgtttcacttccttttcctatccaacaatctataggtgctgatactaatggcatgttttatggtttctcaaaagctttggagtctgcagtaccatccaaagttgataccattgcatcttctggagtagttactgataatttagctgtaaaaacgtcagctttgccagttggttcaagaaaagccccagtcagtcgacctactaggcaccttggacctcctcctggtttcagtcatgttcctcccaaacaaggtattgaatccaccgtttcagattcaattagtgggaacccaattatggatgattatagttggttggatggctatcatttgcattcatcaacaaaaggattaggctccaatggtcctcttaactactctcagtcaaattctcagcaagtcagtaacaacggcttgagtcctactgccagctttccctttcctggaaaacaagttcctcctgtgcctcttcaagtggagaaacagaatggttggcaagattatcaaacttatgatcttttaaaatcacatcatggtcagcagcttcagccacaacagctcacaactggaaaccagcagttttctcctctgcccgagcaatttcaaggacagtcaatgtggacaggtcgttactttgtgtgatgtcagtatgagagtatagatggcatattgcgaatgtgctgcatccttttgctactcaatcaaactccagcttagctgcctcgtcattgaatgttgttggagtttctttggccttggcttgttgcaggcacttgctactacaaaagatttatggtgagcttgtcagctcggacaaaggaagataaacatgcatctttaccgttcaaagttcgtatgaagtaaatgccttgtctggttggttggggtggataggtggtgataaataaaatgactattcagttgtcttggagcttatatcttctgggattggtggtgtcacaatggtttgttcacacttctctagtggaaatgtcataatgatgcacctgtaaaaattgttgttactatcatttggttgcaagtgatacatagtgctagcccttttttatgctgcaatgcttcagactatatatagttgggaaaggttggtaaagataagaagtgggtgtcaaagttggataatggggtatgaaattattgacgttatggggctcacttgttgagcacatgtgtttagttgttgcgtcttcgttaaggttcttatcttattatatgttgtgtatgacgagtggtatatgtggtttattttctaatttttctaagtcgaggggttgactcgaacttcaaaataaattggtggattgttgaatgcaaatccatcttggtctgtatgagtacaatgatttatctacccataatcggatttaccataaaaaaaaaaaaaaaaaaaaaaagggcggcc

SEQ ID NO: 2936 - DNA, 1049 bp, Glycine max
ccaatttgacacaggactataaattcctttttcatggaagcaagaattgggagtttcattttcgttcaattatttctccccttttcttaaaatcgaattgaatcgaatccttcacaagtcaagagttagcacacccaaaagaacgcgtttcagctggccacactgttgatttggctgacacatagtaaagaatcatattaatgtcgtcaagaacattgaggagaagactctatcatggggatgttgatggcaaaaggcaggagcatttggagacttcgggattggattctttgagtgagcccttgctggcagacgatgattatattgagaataagaagatatgtactcttgaagatctatgggatgatgagaagaagaaggcgcagtttcattggacattcatattctcaaaccttattgtgcaatgggctcagtggttagcaaatttggtattaggatctggatctattcttgggcgtcttttatcttttccttctgctgcactaaatatgcaaaacaataggatgtttcctccatctctaagccctctgcaggaagaaagactaagaaatctacgacaacggcttgaagttccctttgatggttctaaagcagagcaccaagacgcacttaaacaattgtggaaattggcttacccggacagggagcttccttcacttaaatcagacctttggaggggaatgggatggcaagggttctgacccttcaacagattttaggggggggaggaattattttctttaaagaatctcctcttccttgcgaaggaagaatcctgattcattccccggggattattgcttaaaacagaatggaacccgagctggagggggcaataccccatttggcaagagctgggaaaccaaaatttcctttttatgtatacccacgaaggcgtggatttttccaaggagggggttctccctcctctctttggcccgggaaatccgttttctccaaatatggccttggaaaaaatataaaggggcctttggaaaaccctttttttgggggtgccccttccaaag

SEQ ID NO: 2937 - DNA, 1319 bp, Glycine max
  misc_feature (1314)..(1314): n is a, c, g, or t
cccacgcgtccgtccacgcgtcccattcccgtgtttttcctgatccccccaattctgttgattcgcaattcaaattattcgtctcgctctcaatagagaagaaaaaaaaaactgcgtttttcaaatcggtaaattggctgacacatagtaaagaatcatattaatgtcgtcaagaacattgaggagaagactctatcatggggatgttgatggcaaaaggcaggagcatttggagacttcgggattggattctttgagtgagcccttgctggcagacgatgattatattgagaataagaagatatgtactcttgaagatctatgggatgatgagaagaagaaggcgcagtttcattggacattcatattctcaaaccttattgtgcaatgggctcagtggttagcaaatttggtattaggatctggatctattcttgggcgtcttttatcttttccttctgctgcactaaatatgcaaaacaataggatgtttcctccatctctaagccctctgcaggaagaaagactaagaaatctacgacaacggcttgaagttccctttgatggttctaaagcagagcaccaagacgcacttaaacaattgtggaaattggcttacccggacagggagcttccttcacttaaatcagacctttggaaggaaatgggatggcaaggttctgacccttcaacagattttaggggtggaggatttatttcattagagaatctcatcttctttgcgatgaagtatcctgattcattccagcgattattgcataaacaagatggaaccagagctgagtgggaatacccatttgcagtagctggaatcaatatttcttttatgttagcacagatgctggatcttcaagcagggcttccatcttctttgtccggaattcgttttctcaaattgcttgaagaagatgaaatggcatttgatatccttttttgtgttgcctttcaaatgatggatgctcagtggctagcaaagcgtgcgtcatatatggaatttaatgatgttttgagatccacaagaacgcagttagagcgtgagcttggtcttgaagacatcttcagcgtgaaagatttacctgcttacaacatgttgagatgattgacaattgcctttcagttcaacatttctcttcctttttttttttgtttcttttggcggagaatgttacatgaaatgtatctaaagcatttgtcattttatctctatatagaaacgtgaaaatcaaatatcagatcaatctttctgctgatttccatcaaacaaaaaaaaaaaaaaaaagcttatcgatacgnccgac

SEQ ID NO: 2938 - DNA, 1984 bp, Glycine max
acctatataaatagcaccccttggaatctttattatatatattccaataatgagagagaataacaatgagagggagaaaaccttcacaaatagaaaatattatacttatttttttgggtataattgggttgtgggttgagtgtttttttttctccttttttgcatttttttctctttcaataaaaaaggtctgcagcagcctagagacataggcataattggctaaactccattatcaattgtgtgattattccacatttatatttgtttctcacaaatctgattataggaaattttgcataatttcacacaactgagcttttttctaatttatcaatgtaactgattggagtgcgttttcttcttttcaacaaggaatggtttgaacaacattagtattccaagtccttcaactatgttcaagacaaagaagaccatatgggtgcctgggaggaatgaagcatccatccgcttttgtgaccaagttaatattgcaccacctgtagcagggccaatagatttgaatagagacatgcctgtcatggaaatgccattagctgcccccctctggtgttgttccactgctcggttttgtagaaggaacagaccagtattaatggttacagacagaagattcttcagaattgaagcaacacttaacactatgtatagtgctaagccagacaacaatgctatgaaggggtaactttgcaaaagtggtatggatatcatcccggagatgcgaccaataacaataggtccactagctttttccacatatgggtatatgataagttggtaaatgataagcgcaagacctgatattgaaagaacattaccaacatcatcagttgtaaagttcaaaccccccagcctttgaggactcacagcccatatcgagaaaacctcttgatacgcaatatcatgaagtgcgaaaacacaataaacaatgaccgatgacattaagggccaattcaggaggaggttttccttcttttggattatcttgtctttaccagccacattgcctccattttttaaagtttcagcattgtctatggattcatttctacatttgtggttgtgaagtgtttccggaatccagatacagccaataactactacaaatgcaactgcagatattataaagttgggcaagaagtaaggaaacttatcccagaaggaatcctttggaaatatatgtgggtacttctctacgggctgagctaaatagcctcccaatgctgggccaatgattaaacctatgccccaagctgcactgacagttgagagtcctagagcttggtgttcttcccgaaaaagttcagtggcataggccttcactggtccaagcaaaccatttaaacttcccagaagaaatctcatgataactgccatccaaaaacttgtgctaaggccaaatagtgtgttgaaaatgacaactacaataatccctataactataacaggctttcgaccgtagcgatcagctataataccccataatacagatgtcaaacatctgccaaacatgaatgcagaaccaacataaccagcataagaactaatgtcagcttctgttttcgcaatattaaaatcccttaccatgaaataaaggaatggaaagagagacgatataggcagcgcagcacacaacaccaccatccatatgatgaaaagatttgtaacgggtacaccctttccctcactcaactctttggcttgatccactttgcaaccagggcagttctcgtggtacttcctctccaacaatggctgcttaacattttcctcttccatgtttgtgagagaaccccaccacttgtttcactcaggtccctctttttttacaagtatcattcaaacccagaaaatggagagaaaacaaaacgtccacacaatcaaaggagaagaagctctcgtcgggggggggggcctacgtagctgaataaatacacctgaacaacacaagccaaggtgtaat

SEQ ID NO: 2939 - DNA, 1431 bp, Glycine max
gcgtacggctgcgagaagacgacagaagggggggaattgggagtttcattttcattaatttttatttctccccttttctcaatgcttttcttaatgttgaatccttcacaaatcgtcaagagttagcccacccagaacaacaacgcgtttcagctggccacacacattcttaatttttttggctggcctatagtaaaaactcatatcaatgtcctcaagaacgttgaggagaagactccatcatggggatgttgatggcaaaaggcaggagcatttggagacttcgggattagattcgttgagtgagcccttgctggcagatgatgattatattgagaataagaagatatgtactcttgaagatctatgggatgatgagaggaagaaggcccagtttcattggacattcatattctcaaacctcattgcacaatgggcacagtggttagcaaatgttgtactaggatctggatctattcttgggcgtcttctatcttttccttctgctgctttaaacatgcaaaacaataggatgcttcctccatctctaagccctctgcaggaagacaggctaagaaacctacggcaacggcttgaagtcccctttgatggttctaaagcagagcaccaagatgcacttaaattattgtggaaattggcttaccctgacagggagcttccttcgcttaaatcagacctttggaaggaaatgggatggcaaggttcagacccttcaacagattttaggggtggaggatttatttcattagagaatctcatcttctttgcgatgaagtatcctgattcattccagcgattattgcataaacaagatggaaccagagctgagtgggaatatccatttgcagtagctggaatcaatatttcttttatgttagcacagatgctggatcttcaagcagggcttccatcttcttcgtctggaattcattttctcaaattgcttgaagaggatgaaatggcatttgatatccttttttgtgtagcctttcaaatgatggatgctcagtggctagccaagcgtgcgacatatatggaatttaatgatgttttgaagtccacaagaacgcagttagagcgtgagcttgctcttgaagacatttccagcgtgaaagatttacctgcttacaacatgttgagatgatttgacgattgcctttcagttcaacatttctctttgttttgttttttttctcttttggcagagaatgttacatgaaatgtatctataaagcatttgtcattttatctctataaagaaacgtgaaaatcaagtgatagtgggatcgcaaatatcagatcaatcttttctgctgatttccatcagctttgtatttaagcgtgtcttagcatttaggaaattcttcataaaatttgtcgtcgcaataattaccataaaaaaaaagaaaa

SEQ ID NO: 2940 - DNA, 982 bp, Glycine max
ttacgtcagctacgtaggcccccccccccagccacgtacgcaactgaaaaggaaaaccctaagagatgaagagaactcctatcttgttccctctcttctttcttctttgtgccttcacctcatatctaccttcagccaccgctgatgatgatcatgtgtacgacactgacggcgataagcttcaatacggtgtcaattatttcgtgttgccagtgataagaggaaatggcggtggaatacaagtagcaaaagcaggaaacgaaacttgccctctgactgtggtgcaatctggcaacgagctctctgaggggttaccgataaagattgcatctcgatcagcaggagtcgctttcatcacccaaggccagcttttcaagagcattcagttcggtgtgtttccatccacactcagaccagggtgtcccccaagtccaattccttctaagtgggacccaccttccaagtggactatcgttgagggtctaccagaaagaggactcgctgttaagcttgttggttaccaaaatagagtgtctggttggttcagtattgtgaaagttgctgatgatgcttcttcttcttctgtgggctataagcttgtgttctgtctatggccagaagaagaggtgatgattcacttatgtaagaatgttgggattcgtaccgatggtaagggaatcaggcgcttggtgctgtctgagaacactcctttagtcgttcagtttcagaaatttcgatctgcactggccctgaataatcatgtgctttctgccagtgagtgagagacatgctttggttgtagtaacattggtgtcttactaaataaaataatcaaagtttatgctttttgcaaatgttttaatttctgacatattatatgtagtgatttcgtctcaaatgttatgtgcctggatgattaatattattaattgtataagtgatcgataaggacttatgttttttaataaatattttagaattt

SEQ ID NO: 2941 - DNA, 836 bp, Glycine max
gaaatacaaaaaaaaaaaaaaaaacttcggttattcacaaacgaagaaccaaaaactaaccctcttttttttttcctacaattttaatataacaaatggatttcattccctccattttctccttcaaacgcagaacctctctctagccgtttccaaattcctccgttttctttttttctttttcttttcattttccactaaaaaaaataaataaaggaaagaaaaagaaaaaaagaagcgagatgaggtttttcttcgagttcgtgtcttgttgcggcctgccgacgcagcgttcgccggagccagtggttccagcgaaggaggaagagaggtcactggttccggcgacggccgtcgccgttgtgccctcccgtaagaagatgaggatgggctcggcggagtggaggccgtcgctggggtcaatctcggaggatgttacgccgccggcgccggcgctgagggatagagagagtccccggaaaggtgaggtggcctccgctggaagggacgcgaagaagaggagcgccggtggtggcggaactgccaaggttcggcaccggagtttcagcaacgcttattacgggtcagcaccttccatgccgacgatgataccaacattctctccgacgccatttatgttctaaagtctaaacattagacttgaatttataatagcaaatgtgtatatatacgtactacttgaattggggttaaaaaaaaagcactgtacaagtgtcattttgcattgtgaatgcaactgtagccttttttttttatcactccattgtttataaatgaatacatattcttcctaaaaaaaaaacaaaaaaaaaaaa

SEQ ID NO: 2942 - DNA, 1718 bp, Glycine max
tcagctacgtaggcccccccccgtgttcgactaaccctagttcattgcactgcaacttagccacttaaacccaattcgttagcctctccacatcttcactgcttcttccatacaaatccgaaaccagacggaattcacaaaagacgttaccatgtcggacgatgagagagaggagaaggaattggatctcacttctccggaagttgtcactaagtacaagagcgccgctgagattgttaacaaggccttgcagttagttatttcggaatgtaaaccaaagacaaagattgttgacctttgcgagaaaggggattcgtatattagagagcaaactggtaacatgtacacccacgcgtccgggaagattgagagaggtgttgccttcccgacatgtgtgtctgtgaacaacactgtctgtcacttctctcctcttgccagtgatgaaacagtgttggaagacggtgatatagtgaaaattgacatggcttgtcatatagatgggttcattgctgctgtggctcacacccatgttcttcatgaggggccagttacaggacgggcagctgatgctattgcagcagcaaacaccgccgccgaagtggctttgcggcttgtaaggccaggaaggaagaacaaggatgtaactgaagcaattcaaaaggttgctgctgcgtatgattgtaaaattgttgagggtgttcttagccaccaaatgaaacagtttgtgattgatgggaataaggttgtgcttagtgtatccaatccagatacaagggttgatgatgcagagtttgaggagaatgaagtttatgcaattgatatcgtagcaagtactggagatggcaagcctaagctgttggatgagaagcagacaactatttataagagagctgttgacaagagctatcatttaaagatgaaagcatctaggttcattttcagtgaaataagccaaaagtttcccatcatgccattctcagcaagggctttggaagagaaaagagctcggttaggtttagtggaatgtgttaatcatgagctcctgcaaccttatcctgttctgcatgaaaagcctggtgatgatgttgcacatatcaaattcactgtattgctaatgcctaatggatcagatcgtgtcacatctcacccactccaggaattgcagcccaccaaaacaatagacgatcctgaaatcaaggcatggctagcattgggtacgaagacaaagaagaagggtggtggaaagaagaagaaaggtaagaagggggcagaagctgaaccaatggaggcaacaaatggtgctacaccccaagagcaagattgagacaaaaaccatagattttgctttttgatccctttcaattttggcacatttttcaccaagttgtatctgcttgattgtgaatttagtacagccttcggacacccaatgttaataggaatttgatttccttggctattgtacttgacctgaatgctgtactcctgattaagcataaatatgcttaattgttggaaaatatatcaaatttaaaaccccaattttgtgtttggaaaaatgtgttactgtgcctaggttgaaatgttgacctttttgcattggttagacactattgttttgtatatgcacgtagctggaccgattgttttgtgggagaatgaatatttatgtaatatcggcaaaacttaaaagaggaaataacacatgagattttgtg

SEQ ID NO: 2943 - DNA, 1698 bp, Glycine max
  misc_feature (1697)..(1697): n is a, c, g, or t
tacggctgcgagaagacgacagaagggggcaacgaaaatgaaaaactcctatataaggcaaagctgcctctggctgtaaccctaatagcacaggtagcaccgattggctcttcaagacttgcttctttaccatttcattcctaaaaccctattcttcttcgctcattcatcagcactgccatcagccccaacctccccacaaggtcacagggactaaagaggtgtaccaccatgtcggacgatgaaagggaggagaaggagttggatctctcttctgcagaagttgtaaccaaatacaaaaccgcggctgagatcgttaacaaggccttgaagctagttatttcagaatgtaaaccaaaggcgaagattgtggatatttgtgagaaaggggattcatacattcgagagcaaactggaaatgtgtacaagaatgtgaagaggaagattgagagaggtgttgctttccctacatgtttgtctgtaaacaacgttgtctgccatttctctccactagccagtgacgaggcagtgttggaagaaggtgatatattgaaaattgatatggcatgtcatatagatggattcattgctgccgtagctcacacccatgttcttcaggaaggtcctgttacaggaagggcagctgatgtcattgctgccgcaaatactgctgctgaggtggccttgaggcttgtcaggccaggaaagaagaacaaggatgtaagtgatgcaattcaaaaggttgctgctgcctatgactgtaaaatcgttgagggtgttcttagccaccaaatgaagcagtttgttattgatgggaataaagttgtgcttagtttgtctaatccggacacaagggttgacgaagcagagtttgaggagaatgaagtttatgcaattgatatagtaacaagcactggggacggcaagcctaagctgttggatgagaagcagacaactatctataagagggctgttgacaagagttatcacttgaagatgaaagcgtctaggttcattttcagtgaaataagccaaaagtttcctatcatgccgttctctgctagggctttggaagagaaaagagctcgacttggtttggtggaatgcgtcaaccatgagctcttgcagccatatcctgttttgcatgaaaagcctggtgatttggttgcgcacatcaaattcacagtcttgttgatgccaaatggatcggatcgaatcacaactcatccactccaagaattgcagcctacaaaaacaatagatgatcctgatattaaggcctggctagccttgggcacaaagacaaagaagaaaggtggtgggaagaagaaaaaaggtaagaaaggggacaaggcagatgagacaactgaagctgaggctatggactcaacaaacggggccactcctcaagagtgacttaactacccttccctctcctctcctctcctctccccaaacaatgaaagaagctttttcgtttcattttcgacacctcttttcaattttggtacattgttcaccaaattgtattttgcttgcttggatgtcaattttagtatagtgttccgacattgattttaataggaatttatatatgcacattttagttggggtcctttttttcaaaaaagaaaaaagacaaaccgaaccagttaaatggtttagttcttcatccaaactgtttgataataataaanc

SEQ ID NO: 2944 - DNA, 1258 bp, Glycine max
  misc_feature (1153)..(1153): n is a, c, g, or t
  misc_feature (1204)..(1204): n is a, c, g, or t
atcctatcgagtcagctacgtaggcccccccccgtgttcgactaaccctagttcattgcactgcaacttagccacttaaacccaattcgttagcctctccacatcttcactgcttcttccatacaaatccgaaaccagacggaattcacaaaagacgttaccatgtcggacgatgagagagaggagaaggaattggatctcacttctccggaagttgtcactaagtacaagagcgccgctgagattgttaacaaggccttgcagttagttatttcggaatgtaaaccaaagacaaagattgttgacctttgcgagaaaggggattcgtatattagagagcaaactggtaacatgtacaagaatgtgaagaggaagattgagagaggtgttgccttcccgacatgtgtgtctgtgaacaacactgtctgtcacttctctcctcttgccagtgatgaaacagtgttggaagacggtgatatagtgaaaattgacatggcttgtcatatagatgggttcattgctgctgtggctcacacccatgttcttcatgaggggccagttacaggacgggcagctgatgctattgcagcagcaaacaccgccgccgaagtggccttgcggcttgtaaggccaggaaggaagaacaaggatgtaactgaagcaattcaaaaggttgctgctgcgtatgattgtaaaattgttgagggtgttcttagccaccaaatgaaacagtttgtgattgatgggaataaggttgtgcttagtgtatccaatccagatacaagggttgatgatgcagagtttgaggagaatgaagtttatgcaattgatatcgtagcaagtactggagatggcaaggtaatttggttttattaatatatttactgatatgatgcatcttcctaatcctttgcttagtaaaattccaatctcttgcagcctaagctgttggatgagaagcagacaactatttataagagagctgttgacaagagctatcatttaaagatgaaagcatctaggttcattttcagtgaaataagccaaaagtttcccatcatgccattctcagcaagggctttggaagagaaaagagctcggttaggtttagtggaatgtgttaatcatgagctcctgcaaccttatcctgttntgcatgaaaagcctggtgatgatgttgcacatatcaaattcactgtattgntaatgcccaatggatcagatcgtgtcacatctcacccactccaggaattgcagc

SEQ ID NO: 2945 - DNA, 1554 bp, Glycine max
tcgagtcagctacgtaggccccccccccccagttgcacaggagcaccgtttggctctacaagtctttccttttctatttaattcctaaaatcccattcttcttcgctcattcctctgcactgccatcatccccaacttcctcacaaggttacaaggactaaagagttgtgccaccatgtcggacgatgaaagggaggagaaagagttggatctctcttctgccgaagttgtcaccaaatacaaaaccgctgctgagatcgttaacaaggccttgaagctagttatttcagaatgtaaaccaaaggcgaagattgtggatatttgtgagaaaggggattcatacattagagagcaaactggaaatgtgtacaagaatgtgaagaggaagattgagagaggtgttgctttcccaacatgtttatcaatcaacaacgttgtctgccatttctctccactagccagtgatgaggccgtgttggaagaaggtgatatattgaaaattgatatggcatgccatatagatgggttcattgctgtggtagctcacacccatgttcttcaggaaggtcctgttactggaagggcagctgatgtcattgctgctgctaatactgctgctgaggtggccttgaggcttgtcaggccgggaaagaagaacaaggatgtaagtgatgcaattcaaaaggttgctgctgcctatgactgtaaaattgttgagggtgttcttagccaccaaatgaagcagtttgttattgatgggaataaagttgtgcttagtttgtctaatccagacacaagggttgacgaagcagagtttgaggagaacgaagtttatgcaattgatatagtaacaagcactggggatggcaagcctaagctgttggatgagaagcagacaactatttataagagggctgttgacaagagttatcacttgaagatgaaagcgtctaggttcattttcagtgaaataagccaaaaatttccaatcatgccattctctgctagggctttggaagagaaaagagctcgacttggtttggtggaatgcgtcaaccatgagctcttgcagccatatcctgttttgcatgaaaagcctggtgattttgttgcacatatcaaattcacagtcttgttgatgccaaatggatcggatcgaatcacaactcatccactccaagaattgcagcccacaaaaacaatagatgatcctgatattaaggcctggctagccttgggcacaaagacaaagaagaaaggtggtggaaagaagaaaaaaggtaagaaaggggagaaggcagatgagtcagctgaagctgagcctatggactcaacaaacgaggccactcctcaagagtgacttaactctcctcccctctcctctcccccaaacaatgaaagaagttttttcatttcattttcgataccccttttcaattttggtacactgttcaccaaattgtattttgcttggatatcaattttagtatagtgttccgacattgattctaatagcaattttcatatgctcatttcaaaaaaaaaaaaaaaaaa

SEQ ID NO: 2946 - DNA, 1636 bp, Glycine max
attcacttctgatttgattcttttccccactttcagaacatcaacaaagtagagagagagaaccaaaaaaaaaaaactactactcaacaaaaagagctagagagaagataccccttaaatcctaatttctacctcaaagaaagtactcttcaaacattttgtattcactgaagaaggatctttgcacttgcacctgcagccatctaccatggttaagtcagaacacaagatcaaaaccgaaccatcatcaaaggcaatgcggttatcttcaccctcatcatcaacatcagattgcaagaagaagaagtacaagggagtgagaatgaggagctggggatcatgggtttctgagattagagcaccaaatcagaaaacaagaatatggttaggctcttattcaaccccagaagctgcagctagagcctatgatgctgcacttctatgccttaaaggctcctcagcaaatctcaatttccctttaagctcttcacaacaatacattcctggagatgctgtcatgtcccccaaatcaatccaaagagttgctgcggccgccgcaaatagtttcatcgacaatgccaccactcccccttccccacctccggcttcgaccccatcatcatcatcattggcctcatccccctcattggtttcttctccctcggatcaaatcgatgacgacgccttgctgatatcgtctttccaagcctacactagttgtggtcaagcaaatcaatcaatggctgtgaatgtgatggagccttggtacacctttggtgatggtcttcaatcccccaagtatgctgatcagatgctaagtggtgatttcttccatgtcgattcttcccatctgcttgatgatctatacgaagaaagtgacattcgtttgtggagcttctgctgagaaaaaaaatcaattcaagccacctacaatatttcttcttttctcaaaaattcaattcgtttgtcttcagtggtatagcttaagatgttactgactgtgaccaaattaaaatttgtataccctatgctacataaatggtgcattttagatgaaattcatatagagataagacaattttcggcctctcatgtgaatttctaagagtttgaaattatgtatcatcgatacaaatcttggtatgtcaatgtcatgaatggtttcccatgtgtcacagaatataagggagaaaaaaaaatgtagtcaccaaaatccttaggtataagcaattcgtttcactgtttttggaatgtaactatgggaggagacttttgctattgtgagtatctttggaaggcctttgttgcatgggaaggtatcagagatgcttatttccaattcagtgagaatagggaaccatgtacagagcgtggtaacttgaaaccattggaaaaattgcatcttttctaagccttgtctgctctcccgcgtgcccaaagaacaaagagtgttcccttgttttgatgtttaagtttggtattttataccctattctattcttcttttagatggaaataaatcctggttaattttcaaaaaaaaaaaaaaaattagtgatcggttttgtactgccccggagctgaaaccctttccctccctcagttttgggttagattttggtaatgcttttaatta

SEQ ID NO: 2947 - DNA, 875 bp, Glycine max
gatctcctcctcctttacctataaaccaattaaactccacttcctcacaacaactctctttagtatatatattaatctatttctcttgtgtcatgggggctggtgtttcttcaactaataaagctgaaaaggacggaggagggtctatttcttcgtcatcaagagattcaagacccggtcttggtgacatcccagagagttgcatctcctccttgttcatgaatcttgatccacccgatatttgcaaattagcaagagtgaatagggcctttcatcgagcttcctcagctgattttgtatgggaatcgaagttgccaccgagctacaagtttcttgctaataaagttcttggtgaagaaaatattgctactatgactaagaaagagatttatgcaaaactttgcctacccaatcgttttgacggtggcaccaaagaagtttggttggacaaatgtagtgggcaagtttgtttgttcatgtcatccaagtccttgaagattacaggaatagatgatagaagatactggaattatattccaactgaagaatccaggttagggatgaataggtattttaattcgatgtttctattgacttggcatttgaaactctctctcttctgtttgatcttgtttttatgatgaaacatattgaaaattgaggttttgaaatgtttctggcccaaatctgatgccctgacttacggaaccatttcaacttgtctgacttttcctagacttgcatgtgtttacagaaaattattagctcgccgaaaagcatttattctcatattttacttgaagaatttaacgtagaaatgttgtttaaatatattgtgagtaattcatgtgagacggcaccatgattcatagagg

SEQ ID NO: 2948 - DNA, 1433 bp, Glycine max
tcccatcgcgttatagatgattattatagagatggtaaaaaagggggtaagcaatgagccatggaaattttgctgttcccaatttgtttcggatctgtgttgacaaaccctaaccctgaggagtatgagtggttattgagattgaggaattgacgaaaaggaaaggaaagggggagatgtacctgaagaaaccgctatggagtgaaacagggaaagacgatggtggaagtgcaaagacagaagaagaggatcatggtgatggtgcagtgagtgaggtcgtgaagtcactgcagcaacagagagtgtatagagaagtcactcttgcactcagaactggcctcagagacgcgcgtgccgagttctcctttctccgtgttcgcgctctccgttccattctcaagttcctgcgttccgttgcggagtccggttcaaccatcgacctctttaaccaaacccaatccattccccaactccaagtggttccggttttgtttcatcactcgctcaaagaaagtggggatgatgattacaatgagaagaagatcaaggtaggggatttgagtcatatattatttggtgttgaaccgatgaagttgacgagtccatccactgatgctgaagttgcgctcgctcttagagtcttggaagggtgttgtttgcttcaccctcagagtacggctctcgcccatcaacacaacgctattcaggttttaatgaatatattatccactcgtggagtgcttgagcaaggtgcatgcttagatgctctaatctcattgatggtggattcatcatccaatcaaatggatttcgagaaatgtagtggtattatggaagttgctgaccttctaagagacaaacaactggatgaaaatctcaggttaaaatgtggagagtttttgctgctgctcattggacatgtcaatggaagagatgcacctcctttggcaactatacatgaagatacaaggcgtcttctaggggagaaatcagcctctttgatatgggctgccagtcagttcggctcaacactagatccagagcagagactaacagctcttcagatccaggctcgcagggtccttgaatcattggacttgtactaaattttaaggatagcatctgcaactttaggcaattgtcatcattgatttgaaaaaatttgcagagaatgtgctccttttggttttcgatttttgtatgtgtattcgcctttcttagctacaataataattgctgttgcaatctggttatgcttttactatttttattttgaagttgtatgcttttcttctaaagcaactattgatgaaggaaagaaagtgtgtattcgactaagttcttaacataatttatactaatgtttgccccctggggttaccggaagggggggggggggggggggggggggggggaaaaaaaaaaaaaaaaaa

SEQ ID NO: 2949 - DNA, 1457 bp, Glycine max
gttccgggccccccctcgagtcagctacgtaggcccccccccccccccaaaaaaaaaaattcaactagagaatggagatggtaaaaaacggggtaagcaatgagccatggaaattacgcgagcaaacagtttctgagtttcttctattttctgttcccaatttgtttcggatctctgttcacgaaccctaaatctgacgttaattcaccatgatctgaacacaacgtggttcccatctgatccactgcatcgtctttctcaattgtcgaaagatgagtacaagtggttaatgagattgaggaacttgcgttgtttgagcgaaacaaagcagagatgtacctgaaggagccgctatggagtgaaacagggaaaggcgatggaagtgcaaaaacagaggattatggtgcagtgagtgaggtcgtgaagtcactgcagcaacagagagtgtatagagaagtcactctcgcgctcagaacgggactcagagacgcgcgtgcagagttctcgtttctccgtgtccgtgctctccgttccattctcaagttcctgcgttccgttgcggagtctgattcaaccattgacctctttaaccaaatccaatccattccccaactccaagtggttccggttctgtttcagcactcgctcaaagagagtggggatgaatacagcgagaatagggtaggagatttgagtcatatattcggggttgaaccgatgaagttgacgagtccatccaccgatgctgaagttgcgcttgcccttagagtcttggaagggtgttgtttgcttcaccctcatagtacggctctcgcccatcaacacaacgctattcaggttttaatgaatatattatccactcgtggagtgcttgagcaaggtgcatgcttagatgctctaatctcattgatggtggattcatcattcaatcaaatggatttcgagaaatgtagtggtattatggaagttgctgaccttctaagagaccaagaactggatgaagatctcaggttaaaatgtggagagtttttgctgctgctcattggacatgtcaatggaagagatacgcctcctttagcaactatacacgaagatacaaggcgccttcttggggagaaatcagcctccttgatatgggcagccagtcgtcagttcgattcaacactagatactgagcagaggctaacagctcttcagatccaggctcgcagggtccttgaatcattggacttgtactgaattttatggtccgtttggaagagaaaatactagatggaaaaaaaacatggatcacgatgtctgatgtcgtttcttttatttgatttgatagaaaaactgaaagaaatactaaaggaatagttgacttcatgagacaaaaattttaatttttctttctttccaaaaaaaaaaaaaaaaaatttcaaaaaaaaaaaaaaaaaaaaaaaaaaaaaaaaaaa

SEQ ID NO: 2950 - DNA, 1909 bp, Glycine max
tttttggttgttctttcgcaatcttaacccttttccgccatgcgagcgacacaaccacacgccaataatcgcacaacacaaatcaattcagcctccaattaacgcctccttttgattcggctcggttgttagagtaattggaggagggggtacaaatacaagagcgtaattgtttgtgctttcatctatgtttgggggtgttaacgctcctgctaatagtccacacttacgcaagtctgggagtagacctgttgtttatgatcttgttttgtgctgtgtgcccagatgaacatgaggtggaaaatggcatcgaggagggtttattgcatcccgtagaggcagatgattcaaagggtggtacgcccgtgagtgctgctgcaatgatgccatcgcccattttgttgtggagattcaaggtactattgttcttcatttggggcttcatctgttgcaaggttggatgggattctgtcatgagaatgagtgcagacaagcgggatttgttcctttatgaagcatttttgtattttaatcctcttcttctagcggctttgatggtttggctgtggggaatcaacttatggttttttgctcaaggtggagtcaattatgcaaaaatatttgatcttgatcaaagtcatctgactcatagagaaatatggaagtgtgctacatggatgacaattattgttccaaccagtatgacagcatatatttatctttattctcatggagaagtctcctatgctgcatcacaaccagtgctcttatatgctgctgctgtaatggttttgatattcccctttgatatcttttatttttcatctagatatttcttcttaaggactctctggcgaatagttttcccattacaggcgatatcattcacagattttttcttggctgatatcttaacttccatggctaaggtcttttctgatttggagcgttcagtatgtagaatggtccatcgacaggttgccacaattgcttggttggaagctgattctgtttgtggcagccactctgttgcaatccctttggttcttgttttgccttatcttttccgcttaaaccaatgtctccggcagtacaaagatactggagagaaaactactcttctgaatgctttgaaatattcgaccgcaatgcctgtgatttttctttctgcccttaaatatcacgtcttcactgagaggtggacaaacttttataggcctctctggcttctggcaggtgttgtgaactcatcatactccttctactgggatgtgaatcaagattgggacctaagtggcttcactcgaatattcaagtttaacaagccacatctgttctcacatatgttacacggaaggagatgggtttacttttgggtgattggaagcaatttggttttgcgttgcacgtggacatataagctgtctgcccatcttcgtcataattacctcacggtgttcttcattgctgctttggagattttccgccgcttccagtggatatttttccgtgttgaaaatgagtggaacaagatgaattccaaatcacactctcatctcttggtcaatgagatctcaaacgatgaagagaaattacttcattccattaactacagtgtataggctagataacagtatgatgcctaatgctttggcagtatcatacaaggtatatttctaatattttgacgataggggatttccattcctttttatgattccattggcttggctacccctcagtattaaatgtcattctttattcacactaaaaaaagtttattgttaccgtgctcttaagccagcatatcttgttccattctattgcaatttaatcatgtatagcatcaagccatctagttaatagcatcgtttatatatggaccagttggatccatgatatctcgagt

SEQ ID NO: 2951 - DNA, 1497 bp, Glycine max
cccacgcgtccctacggctgcgagaagacgacagaaggggggagtgaaattggaaattgcatttgaataatgatgtccatattccggcaatacaccttggacgactcattctcgcaagtgttggtgtccccgaaattcctgaaggagtaccaaatagccctgaccttcgcaagcgactacgacgacgacggcgtccccaccaacggggttttccggccaacctgggacctaaccaaggtgaccccggaatcaatcacgcgattcaaggataagaaccccgacgtggacatcaaagtcttcatcagcatcggcaaccgcggcacccagcaccccttcaaacccctcaacaaccaaacctggatccagaacgccaccatgtccctcaccagcctcatcaacaacctccacgtcgtccacggcatcgacgtcctctacgaccacatcgatgcctcccccgctgactttaccgagtgcgttggccagctcattaggaacctcaaggaaaacggcgtcgtctcccaggcttccatttctccctcgtcttatcccaaccaagaatactatccgttactctacagctctgtgcccttcttcgttgactgggtcgattaccagttccaaagcgaggatcaacctgtcttggaacccaccaccttggtgaagcgctacaatgaattaaccaaggtttatcccaaaacaaaactctttgctggctacagtgctgagaatgaggactgggccacagtttccccgttcgtgttctttttgggtgccatggaccttctcaagaagagaagtgctcctggtgtttccattcattaccataattactatgcatcagaagctcccaataataaggactgaatatgccacgccatccacccatgcctctctgctactatcatattaccttattatttacagtcatgctaccttaattactagtgtaagacccatctagggttatcaaatcagttccatatatatatatacatatatatatatatatacctatatctcataaaatataatgaataagttcttagttgttatctcacgtactttatgttgataaaatatatatgcttgctaatttgcctatatggatcggatcagcttttctcaaacttaggccccgcatatgttcttaataaacataccaatccacatctaccgccatccataaacacatgatgacacaactttgtagccatgcagcaaaaataaagagaaagaatagagacaagttgaggttaaagtttgaaagacagagaggaagagaataagaaatatagagatgacgatgaagatggcggaagggaggggcttcattaattgtctctgcatccactatattgtgacaataattaattaaatgtttagtttaaagaacacaataattaataatagcgactccatcatactatgtttggattgataaaatggaataaaataaaataatatcagattctgttgttcaaaaaaaaaaaaaaaaaa

SEQ ID NO: 2952 - DNA, 1845 bp, Glycine max
gtgcatttccctattctggacttcttatatcaagagctcttagtttctcaaacttcagtaatgcaagttactatagggagcttgagcagtctctgatggatacttttcgaaaccaaagcattccagtggattcagtttctcctagctaccccggccccccccccattgataattttgaattgactctggacgtcttcccttcgcaaaccgatcgcttcaacacaactggagttttaactattgcttttctgctaagcaaccaaatttacaaacccccagaattcttctccccttacatcttcaagggtgccaattatgaatactatggaggagaaccaaaaggatcaaagtcatcatcacatgtaggggttatagttggtgctgtagttgctgttgtggtctttgttgttctagcattctttgcagggatgtatgcccttcgccagaaaagaagagcaagaagatctgcagagttgaacccttttgcaaattgggaacagaatacgaatagtggcactgctcctcagttgaaaggagcacgatggttttcttttgatgatctaaggaaatacaccagcaacttctcagaaaccaatactattggatctggaggctatggaaaggtttatcaaggaactcttccctctggggagctggtcgccatcaaacgggctgcaaaagagtctatgcagggtgccgttgagtttaaaaccgagatcgaacttctatcaagggtccatcataagaatctcgttggtcttgttggtttctgttttgagaagggtgaacaaatgctggtgtatgagcacattccaaatggcactttgatggatagtctctcgggaaagtctggaatctggatggattggataaggaggcttaaagtagcattaggtgcagccaggggtctggcctatcttcatgaacttgctgacccacctatcatacacagggacatcaagtcaagcaatatcctacttgatcatcacctcaatgcaaaagttgcagattttggtctctctaaacttcttgttgatagtgaaaggggccatgtcactactcaagtgaaagggacaatgggttacttggatcctgaatattacatgacccagcagttgactgaaaagagtgatgtatatagctatggagtgctaatgctggaactagcaacagcaagaaggccaatagagcaaggaaagtatattgtaagagaggtactgagggtaatggacacatcaaaagatttatacaaccttcattccattctagacccaaccataatgaaagcaacaagaccaaaaggtttagaaaagtttgtgatgttggcaatgaggtgtgtcaaagaatatgcagcagagaggcctacaatggctgaggttgtaaaagagatcgagagcatgattgagctagttggattgaaccccaattctgaatcagctacaacatcagaaacttacgaggaagcaaatgcaggaaatgctcaacatccttacagggaagaagattttagctatagtggaatttttccatcaacaagggtagaaccccaataggctttggtatatttttttctttttgtaattcttttcccctcttcaaatgcaatgtctaagatctgctgtgtcaattttggattcaaatcaggcgggtgcttccaaaaaaacttgctatctttgtagaaaatggtgaaggttcaagttgaattttttaaaaattgattatttgaaggttgtacttatatctttgttcttcacatgtaaaatagtttgtgaattttgaactgctgtaatattcgaatgaatgtaagtatgatattcaactttgaattttccaaacaaaaaccac

SEQ ID NO: 2953 - DNA, 1268 bp, Glycine max
acaaatatgtcatttttccttacctcgtgcgtttcggctcacgccgcagaggtcattagagaaacagctatggaaggagaaaatggaaagaagctgaaaatattgtgcctccatggattcagaacaagtgggagttttcttaaaaagcaaatcagcaaatgggatccttctatattcactcaatttgatatggttttcccagatggtaaataccctgcaggagggaagtctgacatagaaggcatcttccctccaccttactttgagtggtttcaattcgaaaaggtagaaatactatatcctcctatcttttcatttcagatttggctgactatgtagtaattgaaatttactgaacatgtacacaaatcttgctcaggacttcacagtgtactttaacttggaagaatgcatctcatacttatgcgaatatattacagccaatggtccctttgatggcttccttggcttctcacagggtgcaactctttcagcacttttgataggttaccaggcacagggaaagttactaaaggagcatccaccaataaaatttctcatatcaatatcaggatgcaaattcagaaatcccagcatatgcgatgttgcctacaaagacaccatcaaagctaaatctgttcatttcattggggaaaaagattggctgaaacttccttctgaggatctcacatctgcatttgacaaacccctgataataaggcatccccaaggtcacaccgtaccacgattagatgaagtggctaccagtcaattgagaaaatggattaccgaagaagtcctatgtcaaccaaaagttggcatctcagtttgtgagcatgaaacagaccatgaagaaaagaagtcagagaaggggaccaagctagaaccctgtggtaccaatcaagacaaaggtgtaaacggtgttgaaataaacaagggttctgaaacagtagaggtggctcaagcctgacgataaggacttctaagaggaagcacctgaatttttaatattaaattatgtatcatgtatgattggtgattcatatggacatgttttatgatttctcgatctttaataaattattatgtattgtggatgagtggtgattcatattgatacttgctgtctaaaatgagaggggagtccttaatgtactgcacagatatattcagcattaaaataaaattcggcgtattccccttgaatcaatcgtgaatgtttcaaaccattatattttataaaatagaacatgaatcacaagttgggt

SEQ ID NO: 2954 - DNA, 1199 bp, Glycine max
tacaaatatgtcatttttccttagcttgtgcggcccgcgggaggcaatagaggtcattagagaaacagctatggaaggagaaaatggaaagaagctgaaaatactgtgcctccacggattcagaacaagtgggagttttcttaaaaagcaaatcagcaaatgggatccttctctattcattcaatttgatatggttttcccagatggtaaataccctgctggagggaagtctgacatagaaggcatcttccctccaccttactatgagtggtttcaattcgaaaaggacttcacagtgtactttaacttggaagaatgcatctcatacttatgcgattatattacagccaatggtccctttgatggcttccttggcttctcacagggtgcaactctttcagcacttttgataggttaccaggcacagggaaaggtgctaaaggagcatccacccataaaatttttcatatcaatatcaggaagcaaatttagagatcccagcatatgcgatgttgcctacaaagaccccatcaaagctaaatctgttcacttcattggggaaaaagattggctgaaactgccttcagaggatctagcgtctgcatttgacaaacccttcataataaggcatccccaaggtcacaccgtcccacgattagatgaagtggctatcagtcaattgagaaaatggattacagaagaagtcctttgtcaaccaaaagttgaggtctcagtttgtgagcgtgaaacagaccatgaagaaaagatgtcagagaagacgaccaagatagaaccatgcggtaccaatcaagacaaaggtgtaaacggtgtagaaataaacaagggttctgaaacagtagaggtggctcaagcctgaagatcaggacttctatgaggaagcacctgaatttaatttaatataacttatgtattatgtatgactggtgatccatatggacctgttttatgttgtcttgatctttaataaagtatgcattatgtatgactggtgatccatattgacctcttttgcgttgtattgttctttattaactaaaaagagtggtgagtccttaatgtactacggagatatatattcagcactaaaataaaattagacgaactacccttgaatcaatcgtgaatgtttcaaacaattatattttataaaatagaacatgaatcacaagttgggtctc

SEQ ID NO: 2955 - DNA, 1522 bp, Glycine max
tcgagtcagctacgtaggcccccccccccccgaaagtagacaacattagaagtgaaaggcaaaataagaatgatgagttgcaaagaaaatgaggaggatgacacttacctctcagctttgacactatgtttcagccgaatttttccggcaatcttgaacgctgctgttgatctgaatttgtttgatatcatagacaaggcagagagttcaactttgtcagcctctgagattgcttctttgcttccaaatccacaccctcaattggctaataggcttgaacgcatattgccggtgttggcaagttactctcttctcaattgctccattcgcaccactgaagatggtgtgagagagagactctatgctctctcaccaattggtcaatactttgcctctgacgacgatggaggctctttgggtcctctctcaagcttatttcatcgtggatattttcacgtcttgaaggacgtaaaggatgcaattatggaccctaacaacaacgaccatttccaaaatgtccacggaatgcctccttatcaatatatgaagacagacgaagaacttaataaactatttaacaaagcattggcccaaactggccctcctgcaatgaaaatgctccttaaactatacaaaggatttgagcaagtatcaacattggttgatgttggaggtggagtaggcgagaccctaaaacagattatctttgagtacccttcaatcaaaggaattaattttgatttgcctcaagtggtacaagatgcaccaccctatccagggatagaacatgttgaaggagatatgtttgaaagtgttccaaagggtgatgccattttactaaagcttgtatgtcacaattggttagacgaagactgtgtaaagtttttaaggaattgccacaaagctttgccacaacatgggaaggtgattgttatagactatataattccagaagttccggattcaagcaaaatttctatgcaaacttgtgttgctgatagtctcatgtttttagtgacaagtggaaaggaaagaactgagaaagaatttgagagcttgtgcaggaattctggattttctagatttcatgttgcatgtagagattcaccgtcggttctttcagtgatagaattttataaataaaattaggatcaatcccataataaataaggtctaaaataaaatttgataaagttatatgttggccttttttacctacatatgtggtcatattatttttgttgatgatagacttaaaatttaagctttaattactttattcttcgttgagaataaaatttatgttatagcttagaattgggacgtgttagcaattttcatattgttgaaggaacaataactaccgaatcataaaaggaaataatgtctaatctatgaagaatctattttatagatgatgattgtgtcttccttagagtttccacttcgatcatctatttttctaatgattccactcttcttttataatttgaattgatgtaatttgttcttttccggtgag

SEQ ID NO: 2956 - DNA, 1032 bp, Glycine max
aaacatccttcgttcctttccactcactagccacaaacaaaaccacttccattttatccattccaacttcccaacccaaccaacaacaaccataacacaagacagtgtcagcgcgcacgcatacatggccatcacaggcaacctcaacctcaacctagtactccccgtggcacgccccatggcgtgccccccacgcgccccaacgtccctcctcgctcgtggccgtggcgcgtcgtcgtcaccttcgctcctggtcacgcgcgccatcgacgtgaacgagttcctgggggacttcggggcgcgggaccctttccccgcggagcttgagagttccttcggggagaaagtgctgggatacagcaacaccgagcacaaaatcctcatccccaccatcactgctctcgccctctcgcagcaggagtgtgctcccgtttccccttcgcagccccccatctcgctggatgacgcccagacgctcattagaaaggttgtgggttggagacttgtgaatgaggaaggtggacttaaaattcaatgcttgtggaagttaagagattttaaatgtggggttgaactcattaacaggatctctaaggttgttgaggctttgggccatttcccaaatatctacttggagcaaccaaatcaagtcagagcagaactatggacagcttccattggaggtttaactatgaatgattttattgttgctgcaaagatagatgagataaagacatcagatcttgtcccaaggaaaagggtttgggcgtaatgccctcacgaactccataaaacattttgccacttgattttcttcaacattgaattaccactagtttgtgttatttgattaaatctgttattctttactttcattttttagtgtttcactccccatgcctgtgtacatgtgtcatatctattcttgtttcgtaagtgtaaccactttcagcatcctaaaactatattcgaaagtctaaaccagccctttttataactccaaaaaaaaaaaaaaaaaaaaaaaaaaaaaaa

SEQ ID NO: 2957 - DNA, 969 bp, Glycine max
cacgcgtccgttccattccactcgctagccacaaaccagttccatttcatccattccaactttccaacccaatcaaccacaacacactgtgtgtttgtaaaaatggccatcacaggcaaccttaacttcaacctcaacctagtacttcctgtggcacgccatatggcgtgccctccacgcgtcccgtcgtttctcttcactcgcggtcgaggcgcgtggtccccctcgcttctggtcacgcgcgccatcgacgctaacgagtttctgggggatttcggggcgcgggaccctttccccgccgagcttgaaagctcgttcggggacaaagtgctgggatacggcaacactgagcacaagattcttattcccaccattactgctctcggtctctcgcagcaggagtgtgctcccgtttcttctgcgcagccccccatctcgctggatgacgcccagactctcattagaaaggttgtgggttggagacttgtgaatgaggaaaatggacttaaaattcaatgcttgtggaaattgagagattttaaatgtggggttgaactcattaacaggatctctaaggttgtagaggctgagggccatttcccaaatatctacttggagcaaccaaatcaagtgagagcagaactatggacagcttccattggaggtttaagtatgaatgattttattgttgctgcaaagatagatcagataaagacatcagatcttgtcccaaggaaaagggtttgggcgtaatgccttaatgaacttcataaaacattttgccgcttgattttcttcaatattgaattaccactaatttgtgttatttgattaaatctattattctttactttcattttttagtgttcactccacaagcctgggtacatgtgtcatgtctattcttgtttggttagtgtattcaactttcagcatccaaaaactatattcttaagtctaaaccacccc

SEQ ID NO: 2958 - DNA, 663 bp, Glycine max
cattccgttactatataggcagggccaatccgacaccaattttattcttcctcacggagaactctggaggaatttgattgatggctgtaaactgtacttcctcaattcgaatcccaattcagaaatatggatcatttctcaagtaccccaacaaaaaattgatgtccaaacgcagctatgtcccaatgaaaaaggcatcggtactgaggatcacagcatccatcaagaacaaggtttatgaagatcactcccagggcataatctgctaccaagatgagtttggagaaatagtttgtgaagggtatgatgaagggccttgtttccaaagaattccagagacgaccaatcgtccaagagatgctcaaatcacgaagaatcttcttttacgacaaagttggattcagatagttaaaggagagaactcgaatgatggtctgcaaaaggacttgaactgtaatggctttaactcattctgctaataagcttagcaacatataatgtgtatcatcagaaattaagacttgattgtatgtgcagagggtcttgcgagttgtaacttttataatggcaatgcttttcttaattgcctttccttttcgactagttgttgtattatctgatagaaaatgaagatgacttcctatcacaaagcaataataaatt

SEQ ID NO: 2959 - DNA, 2369 bp, Glycine max
cacgcgtccggtcagaggatgacagagattgagaagtaaaatacagagggataagattcaagaaataataaacaacatacaaaaatcaacgtgtgcgcttttcttctctttccttagttttcagattctgaaatcttagtttctgcccgaaactgaaactgaatcgaaattcaatacaatgagttcctcaactacagtgaggaagttgcaggtggtgtcccctgttcctgcggacatagacattgcaaactccgttgaacccgttcatatctcccagattgccaaagacctcaaccttagtcccaatcactatgacctttacggtaaatacaaggctaaggttttgttgtcggttcttgatgagcttcaaggatcagaagatgggtattatgttgtggtcggaggcattactccgactcctctcggggaaggcaaatctactactacagtggggctctgtcaagctttaggtgcttttcttgataaaaaggtagtcacctgccttcgtcaaccatcgcaaggacctacttttggaattaaaggaggtgcagctggtggtggctatagccaagttattcccatggatgaattcaatcttcatctaacaggagatattcatgcaataactgcagcaaacaatcttctagctgctgcaattgatacccgaattttccatgagtcaacacagtcagataaggctctttttaaccggttgtgccctccaaataaagaagggaaaaggagctttagtgatgtcatgttcaggcgtcttacgaagcttggcatttcaaagaccaatccagatgatcttacaccagaagaagtaaataaatttgctaggcttgatattgacccaaattctatcacatggaggagagtaatggacatcaatgatcgattcttgagaaaaattgctattggccagggacctgacgagaaaggaatggtgagagaaacaggctttgatatttcagttgctagtgagattatggctgttttggcactgacaacatccttagctgatatgcgagagaggcttgggaaaatggttattgggaatagcaagagtggtgaccctgtaactgctgatgatctaggtgttggaggtgctttaacagttttaatgaaggatgccattcaccctacccttatgcagactctggaaggaactcctgttcttgttcatgcaggtccatttgcaaatattgctcatgggaattcttctattgtggctgataagattgcactaaagttagttggaccaggtggatttgtagttactgaagctggttttggtgctgatattggagctgaaaagtttatgaacattaagtgtcgttatagtggtttgacacctcaatgtgcgattattgtggcaactatcagagcactaaaaatgcatggtggagggcctgcagttgttgctggaagacctcttgaccatgcatatttgactgaaaatgttgccctggttgaggctggttgtgtgaacatggcacgacatatatcaaatacaaaatcttatggtgtaaatgttgtagttgccatcaacaagttttcaactgacactgaagccgagctaaatgcagttcgaagtgctgcattagctgctggagcttatgatgctgtaatttgtacccatcatgcgaatggtggcaaaggagccgttgacctgggcattgcagttcaaaaagcctgcgagaatgtgacacagccattgaagttcctgtatcctgttgacctgagtataaaagagaaaatagaggcaatagcaaagtcatatggagccagtggtgttgagtactcagaacaggctgagaagcagattgagatgtatagcaagcaaggattttcaggtcttccaatatgcatggctaagactcagtattctttctcagacaatgctgcagcaaagggagctccaagtgggtttgtcttacccataagggatgtaagagctagtataggcgctggatttatttatcctttagttggaacaatgagtacgatgccagggcttcctacaaggccatgcttctatgacattgatctggatacaacaactggaaaagtcattggtctctcttaaatcaaagtgacttgttctatcacctttcaaaagctttatggatgtcatttacatatctccctttgcgatgttcatgaacctcacagtaacattcctccttgtttgtttgcgtgcttggtgatctgtatgaatgaaataaatacgtgatttaaggagacattatatccgtttccttatatctatttctgatacgtgtaattgaattgatgcaaactcgtgaacaatacttgtcaggcacactgaaatcgtgtataaatatggagttggaagtttcgcccgc

SEQ ID NO: 2960 - DNA, 1547 bp, Glycine max
tccaactgagaaggtgattgttgagccagcctcatccagtagagggactaatgtcaatccacccattagaagttcagttcctcctcccacttttgcaaaattttttgccattgcatcccttcaacagtatacaaatagcttttctgaagaaaatcttataggaggaggcatgctgggtaatgtgtatagagcagagcttcctaatggccagttacttgctgtaaagaaactggacaagagagcctctcagctacgtaggccccccccccccattgaattgataaataatattgacaaaatacggcatgcaaatgttgttgagcttgttggatactgttcagagcatgatcaaaggcttctaatctatgagtactgcagtaatggatcactgtatgatgcactccactcagatgatgacttcaaaacaagactctcatggaattctcgtattcggatctcacttggggcagctagagccttagaatatctgcatgagcaatgtcagccacctgtagtacatagaaatttgaagtctgccaatattctccttgatgatgatctatccgtgcgggtctctgactgtggtctagctccattaatagcttcgggatcagtcagtcagctctcggggaacctgttaactgcctatggctatggagcgccagaatttgagtctggaatttacacataccaaagtgatgtgtacagctttggagtgatcatgttagaacttttgactggccgtcaatcgcacgatagggcacgagcacgaggggagcaatttctggtcagatgggcagttccccaacttcatgatatcgatgcattatcaaggatggttgatccttcattaaatggaaattacccagcaaaatcattgtcaaattttgcagacattatctctagatgccttcagtctgagccagaatttaggccagcaatgtccgaggtcgtcctatacttactaaatatgatgaggaaggagtctcagcaaactgaatcaaatgaaaaatgagaaaggtagtgacatttgtttgtgaatttatcataatgtgcagagatgagagatccacttgctgaatatcaacttgtagagatgtcatgtcgtctgaggggagcccaattagttgtctccatgcttcattattccctactaacctattcaacattcacatgccaagttctaccaagagttttgtccaatcaaaaacttaagagaatggtagtgaccaacctcatatttgtagtcttatgatatctgataatttcatagtggattaaaatatgccatattaatattgtagatacgtgccaactaacccatttgtttgataattgtttcccaagtcttgatagcaaatgtaattccgttgtggcatccttgtggtttttaggttcatccttcgtaataaaagtttgttgatcatttgtattaaatcacagacaagcattgtaatttattgattgttctttgtacactacaaaaagatgttaggataaaatcattgtattttggtctttgaaagatcaggacttattcattttag

SEQ ID NO: 2961 - DNA, 1974 bp, Glycine max
ggctcgaggaaaaagtgtctctctcacactcggtcccaccctaactaacgacttaccagtaaagagacattaattaatttgcaaaaagaagaagcattgagattgggattgggagatggagcggaagtggagcagtgaatctggtgggaatgtgatatcgtcgccatcacactcgcgtaatgggcattctcgctcctcttcgctcactatccccggaggaggaatttcaaccgtcaaaaggactcagaatgttgctgccaaagccgccgctcagcgcctcgcccaggtcatggcttctcagactgccgacgacgacgacgacgacgaagacgatctaggatttcgctacactgctcctccacctctctctctttccaggagctctgctagatctccatctcctgcgttagctcggaacctcgtagaagaatcatcaatgtatcttcgcccagcaccacctgctgctggtaataatagaccaccgctaagcctcaggactccagctcctgttctgccctttgaccctcccattcataataataataagcccaaagataaaagatttccgtttgatgctggactccttcaaccaaaagattcaggagaccagcgtgaggcttctgcacttcgtgatgaggttgatatgctgcaggaagagaatgaaagtattctagacaagctcagactcgaggaagagagatgcaaggaatcagaggccagagttagggagcttgagaagcaggttgcttcccttggagaaggtgtatctttggaagcaaaactcttgagcagaaaggaagcagcattgcgtcaaagagaggctgcgcttaaaaatgccaaagactctaaggatggagttgataaagaaatcacatctctacaggctgaaattgagaatgcaaaagttgagaccgagactgcagtgagacagttaaatggagctgaatctgaagtaaaagctcttcgatcaatgactcaaagaatgatattaactcagaaagaaatggaagaagttgttctaaagaggtgttggcttgctcgttattggggtttagctgcaaaatatggcatctgtgcagatgttgcagtttcaaagtatgaactttggtcatccttagcccctcttccgttcgaggtcgttgtttctgctggacaaaaggctaaggaggaatgctgggaaaaaggtgatgatgcaatagagaagaggagcaaacttgttcctgacttaaatgatcttactggagaaggaaatattgaaagtatgctttcagttgaaatgggactaaaggagcttgcttctttaaaggttgaggatgctattgtgcaagcattagcccaacagcgacgtccaaattctgctcgacaattagtctcagatattaaatcacctggggaccctaagtttatggaagcatttgaattgagtccagaggaatctgaggatgttcttttcaaggaggcttggctgacatatttttggagaagagccaaagctcatggtatagaggaggaaattgctgaagaacgtcttcggttttggattagtcggagtgggcattcacctacctcacatgatgccgttgatgttgagcaaggactttctgagctgaggaagttggggattgaacatcgactttgggaagcatccagaaaggaagttgatcaggactctactattgcacgaaagctgacttgacctgaaatttgtgcttaatttccttgcaaggtttgctgatttatacatatgaattgtgaatttcgtcttccttctggagactgtcaccttcccactttatgttcaaacgaggttactcttaactgttagctctaggtatagtaactgttatgatgaccgtgatgaaatttaggaactgatgaagctatcgctctcttgtttctccgcttttgataacaaaaataataacctgtcagaatattaatcataaaaaaaaaaaaaaaaaaaaaaaaaaaaaa

SEQ ID NO: 2962 - DNA, 2154 bp, Glycine max
gcgcccacgcgtccgctaaaaacgtgtatttgtattcatccatccctaggcactccaggtgtcgatttcattccatttgtaacctctctctctcccttcactacacttcattcattcattcaccagtcagaggcagaggccagagagtgtggtgtgtgtgtgtgtctctctctttctctgcttttgagtaattaaatgagagcaaaaatgacgctcaaaacagcggcggtggctgtggctatagtgtgcatttctgcctttagcatcactgtggtggctgaagatccatacaggttcttcaactggaatgttacatacggagacatttatccacttggtgttcgccaacagggaatacttatcaacggtcaattcccaggtccagacattcattctgttaccaacgacaacctcatcatcaatgtcttcaacagcttggaccagccatttctcctctcctggaacggggtacagcagagaaggaactcattcgaagatggggtattaggaacaacatgccccatcccaccaggagggaacttcacatacattcttcaagtgaaggatcaaattggaagcttctactacttcccatctcttgcatttcacaaagctgctggtggttttggaggcattaggattttgagcagacctagaattccagtccctttcgatgatcctgccggtgattacactgtcctcattggagattggtacaagctcaaccacacggatttgatgtctctgcttgatagcggtaggaagctgcctttccccaatggaatcctaatcaatggtcgtggttctaatggtgcatatttcaatgtggaacaaggaaagacctacaggcttaggatatcaaatgtggggttggaaaattcccttaactttcgcatacaaaaccacaaattgaaactggtggaagttgaaggaacacacacccttcaaactacgtactcatcccttgatgtccacgtgggccaatcttactctgttctggtaaccgcggatcaacctgctcaggactactacattgtggtctccactcgatttacctccacagttctcacctccactggagttcttcgctatagcaactctgcaggcccagtttcaggcccaccccctggtggacccaccatccaaattgattggtctttgaatcaggcccgctccatcaggaccaacctcacagcaagtgggcctaggcccaacccgcaaggctcctaccattacggtctcataaacacaaccaggaccatcatactgtcgggttcaccaggtatagtgaatggcaaacaaagatacgcaatcaatagtgtgtcttacgttgctccagacactcctcttaagctcgccgactactttaaaatccctggcgttttccgtgtcggaagcttttccgacaggcccactggcggtggcatataccttgacacatctgtgctgcaaactgactacagaacatttgtggagtttgtcttccaaaacgacgaagacatcattcagagctatcatctcgatggctactctttcttcgtggttggtatggatggaggacagtggacacctgctagcaggaacacgtacaatcttcgagacgcagtttcgcggtgcactactcaggtatatcccaagtcatggactgctatatatattgcgcttgacaacgtgggaatgtggaacttgaggtctgaattttgggcacggcagtaccttggccaacagttttacatgcgcgtttatacaacatcgacatcaatccgagatgaatatcctgttccaaagaatgcactactttgtggtagggcaagtgggagacacactcgacccctttgagctagctagcaagaaccttgttgagtatgaaaattaaagcagttaacttatctgcttctgattttgaatttatttcttttctgtttcagtaattatgctatgctccgatggacatgtgtgatttaaactacaaatgaccccagctcgaggtcacattcttttccagaaaaaaagaagaaagaaatttactattattacatattaatgtcgtaagaaggttagcatttagcactccgcaaagcaatgtgtcattcatagtttcttttcttctctaattaaaatagttggataaatgctagtccatagattttggtg

SEQ ID NO: 2963 - DNA, 1386 bp, Glycine max
aaaaaaacgtgatcagctacgtaggccccccccccaagaaaaaaaaaaaaacgaaacgtgaaaaggaaaaaggggtttgcagtgttccacccacacgcacgcagaagcagaagcagaagcgcaagcgcgtgtaaccctaattagggtttgcaagccgatttgggattcgcctttcgcgtgatcgcagcgctggatccgtaccgtgttcctccgtctacggaagcgccttttgctcgatccttcgccgatctcggaagcatgtacggtccccgaggggcaatgttgggaagcgggggggtttcggacgggtacgaggttggctcaaagagacaaagaatgatggaatccaatccatacttcgcagtgagcagcggaacaggcaacttaccttatgggtatgctggtggcttccagccccctccctttcctgtggttcgtctcagggggcttccattcaactgcactgacattgacatcttgaagttctttgctggactgaccattgtggatgtcttgctggtcaacaagagtggacggttctcgggcgaggccttcgtagtctttgcaggagcaatgcaggttgagtttgcgttacaaagagatcgccagaacatgggtcgccgatatgtggaagtgttcaggtgtaagaagcaggattattataatgctgttgctgctgagatcaagtacgaaggaatatatgataatgactaccaaggtagtagccctccaccctcccggtcgaagaggttcaatgataaagaccaaatggagtgcactgaaatattgaagatgcgcggccttccattccaagtgaccaaatctcaaattgttgaattctttaaagatttcaagctgatagaagatagggtacacattgcatgtcgccctgatgggaaatctactggagaggcatatgtggagtttgtttctgctgaggaggctaagagggcaatgtccaaggataaaatgaccataggatcaaggtatgtagagctgtttccttctacaccagatgaagctagacgggcagagtcaagatcaaggcagtaatcgtggcatttttccttgtttgttttaggtcttcaccttgttccttctggtgcctactataatgtttttgaattttagattatgtactttacttttactagttcgacttgctgttatatttgcatgtctgaaatggatgcattaattgattaatagaaagggcctttgaatatatggctcggtgctgtgaaaggtgaaaatgtgtaatatttcaaagttccttcctttcagtcatggccggcttgtctcgattttagtattgtttcagctgtgctggtcatggatactgacccttaatgacaatgcgccatttccaaaaaaaaaaaaaaaaaa

SEQ ID NO: 2964 - DNA, 1223 bp, Glycine max
  misc_feature (67)..(67): n is a, c, g, or t
cgagtcagctacgtaggcccccccccgaaacatatctcacaactaagacaggaaggggcacgcctcnatggatggcaccggaagttcttcgtaatgaaccctctgatgagaaatctgacgtttacagctttggtgggacgcgtggggaaattgcaactgaaaagataccttgggataatctcaactcaatgcaggtgattggagctgtaggattcatgaatcaacggctagagattccaaaaaatgttgatccacggtgggcttctataattgagagctgctggcatagtgatccagcttgccggccaacgttccccgaactgcttgacaagcttaaagagctgcaaaaacagtatgtcattcagttccaggctgcccgatccactgccaaggaaagcacccaaaaggagtcctagacaaccttggagctattttttctgtcacctgtgcctgtggctgtggctgatgcttgatgatttttttgcatatattttaccaaagctgctggagtagatgagttagtaccaagtacaaacagctggtcttggaaccatgtagagtagctgatcctggagtcctccaacatttgctaaggtattatgaagaacgaagaagggagatggactgataaaacttaaaagagaggtggggattgccaaacttttgatagtgattggattagtcatcttatttttctctagtggcattttaaagtttcttcaattgattggtggtgttgtgtttggagtcttgtcaatcggatcgatcaccacccgcattgtacttttctatgcaaatgtttgcgccactatttaaaagttgtacagaaggtagcgaaaagaaagggaaaaaaattcgtttgactacatagattagaatcacaaagtcagtgtggttctgtattttcagttaatgttggatctttatcattatccacttgaagcaaaaagtgcaacttagcacgtcagacagccttccattcagcatttggttggcctgtttcaattcatcttatggaacgagtgtagagaacacttccagtgtgcatggtaattttcaattgcacgggcattctatttggctaccatttttatatatattaactgaactttaaaattcttatttcctaaaggatgctataataaaaataaagtaatatataggaaataaaataagcaaaatttatttcaaatcaaaccgcccttttatttctaacgaataat

SEQ ID NO: 2965 - DNA, 1359 bp, Glycine max
ctcagctacgtaggccccccccccccgttttgttcaaggaaggaacactgtgacagtagaagcaagcaccaattggaattggaattggaattggaatgaattctcctcctcctccaagaccaagagtggagaggtcgagcggaactaggctagcagcagtttccacacaagccaaaaccaaaaccaaaaccaaaaccaaaataaaaactgtagttgtcaaagtaaaagaaaggttgagtctagtttacgccaaatgtgtcttcttattcttctccttcttgtcagacccattactataaaagaagccacactgcatccttctccatacccttttactttctttatccaataataataactccattttccctctgtcttccccccctcctctacacaaaaatatattattagcatggagaaggtgaattttgtgaagaatggagagcttagattgcctccggggttccgtttccacccgactgatgaggagctggttctgcaatacttgaagcgcaaggtcttctcctgccctttgccagcctctatcattcctgagcttcatgtttgcaagtctgatccttgggatttgccaggtgatttggagcaagagagatacttctttagcaccaaagtggccaaatatcccaacggaaatcgctccaacagagccacaaattcgggttattggaaggcaactggcttggacaaacaaattgttacttcaaaaggcaacaaccaagttgtcggaatgaagaagacacttgttttctacagaggcaagcctcctaatggatccagaactgattggatcatgcacgagtatcgcctcatccttaacgcctctcagtctcagagccatgttgttcccatggaaaattgggttctgtgtcgcatatttttgaagaggagaattggtgctaaaaatggggaggagagcaactctaaggtggttttctatgacttcctagcgcagaacaagaccgattcctcctcatcggtcgccagtggaattacacatgaatcagatgaacatgaagagagcagtagctccaacaccttcccttatactattagaagaaaaccttaacaaccttccttaaaaatttaagttcattatctagttgttgtttttaattgtctttccctttccctgtaattatcatcaatcacttgttgaaaggaagcatcctcttcccaaatgagaccggcattaagggtagtctggagagtatggtactaatactagtagtagtgtgtaatacacttctcatttcccttcaatttaacccctttttttctaaaaaaaaaaaaaaaaaaaaaaaaaaaaaaaaaaaaaaaaataaaaaaaaaaaaaaaaaa

SEQ ID NO: 2966 - DNA, 1881 bp, Glycine max
tttttcgattcacgcgtccgttcgattgttgatgatttgagatcaagaagatcttctgtaccattacttgaatttgagtctggatgttataccaactcatcttgaagtaggtgaaaactctccagtttctacagatattcaaactaatcatttggttgctgatttaaaggtattaaacaaaatttcttcctttcattcaccaatttccaacatgctggattcaaatgattggttctggaagccatttgctgacattcgacagataggcataaaggaattccagaaaagattattgccaaaatttgaatttgtaagcagctctattgctgaatatatacccacagcccatcaattaatcactgaggaaggtacaaggttgcatatccctctcaagactgacaatcatgttgtgtctgacttcgagggtgaaccctcaagcataattgcttgtgcacttgcgttattgaaagatgcatatgaggtgtcagaagttgatgatgaggatgacagaaacgaaagtggaataacttcaaactcaacagaaagtttgcatggcttgacccatggcgctaccttaacttcttcacactcattttcaagaagttcttcagattcagattctgtgcattcagcaggaagcacttcttcagaggagtcacgagcctctcgtgctacagaaaaccatagcatagagattgctatgggttatgcaaaatcacttgggagggaaaaatattcagtgatatgtcattattttaagcagttccgtgaacttagaaattggtgttgcccatctgagcttgattttattgcttctttaagccgctgtaggaattgggatgccaaaggtggaaaaagcaagtcctattttgcaaaaacacttgatgacagattcatcataaaagagattaagaagacagaacttgattcatttttggggttttcttctctgtatttcaaacacatgagagaatcatttgaatttggcagccaaacttgtcttgcaaaagtcttggggatatatcaggttactaaaagacacgtcaaaagtggaaaagaggttaaatatgaccccctcatggtgatggaaaatcttacctacaatagaaatattacacgccagtatgatcttaaaggtgctctttatgcccggtacaattctgctgccgatggtgctggagatgttctgttggatcagaactttgtgaatgacatgaactcgtccccattatatgtcagtcttaaagcaaagcgttatcttcaacgtgctgtttggaatgacacatcttttctgaattctatcaatgtgatggattactccttgcttgttggagtagattctcagaagagcgagcttgtctgtgggatcattgattatctcaggcagtatacgtgggataaacatcttgagacatggatgaagtcttcacttgttgtgccaaaaaatgtgttgccgactgtaatatctcctaaagaatacaaaaagaggttcagaaagtttatgtctacatattttttgagtgttccagatcactggtgttcccagaaatcctccaatccttgcaaactttgtggctcaggggaagatgacccttctcagcaaaagccctagcacaagagtgccaagtggtttctctgtccaaatctttttgatttaatttctcaaaagaaaaaaaaatacaaattgagaatttatgcaagtagttagcagtactgtatatagacagtcaatattgattataaacctagccccctgctattctgcgatttttagcgaatttctaaggatgctgtcatacaggtccatcctctcccagtatatgagatgagtaaatttttgtaaagcctaaggtaaatgtaaaggtttatttaatcattgaa

SEQ ID NO: 2967 - DNA, 1456 bp, Glycine max
ccggtccggattcccgggtcgacccacgctgggtctcagcgggagctcctcttatgtctgtcatcatctctaccctcttggtttttgcaattaaagctcaaaatcatggcatcagtgcgattggaaaattgcaacaaggaataaatcctccatcatggaatatgttgctctttcatggaagtcacctaggcctagttatgaaaacagggcttatcaccgggattttgtccctcactgaaggtattgcagtaggaaggacatttgcagctctcaaaaactacaaagtggatggaaataaggaaatgatggcaattgggtttatgaatgtggttggctccttcacttcctgctatgttacaacaggtgctttctctcgatcagctgttaacaataacgcaggagcaaaaacagctgtgtcgaatgtagtgatgtctgtgacagtcatggtaacactcctttttctcatgccattgtttcaatacacacctaatgtcgtgttgggcgcaatcatagtcacagcagtaattggcctcattgatctccctgctgcttgtaacatttggaaggatagacaaattcgatttcgttgtgatgctgactgctttcttaggtgttcttttcatctctgtccagggaggccttgctcttgctgtcgggttatcaactttcaagatactcttgcaaattacgaggccgaaaacagtaatgttggggaagattccaggaacagacatatatagaaatcttgatcaatacaaggaagctgtgagaatacctggatttcttattttaagcattgaggctcccatcaattttgccaacatcacatatctcaacgagagaacgttaagatggattgaagaagaagaagacaacataaaggaacaattaagccttcgattcttagtattggaaatgtcagctgtgagtgctgttgacacaagtggaatctcacttttcaaggagttgaaagcaacactggaaaagaaaggtgttgagcttgtgttggtcaatcctcttgctgaggtcatagaaaagcttaaaaaagcagatgaagctaatgatttcataagagcagataaccttttcttgacagttggagaggctgtagcttcactttcttcagcaatgaaaggccaatcatcaaccattacagaaggggcacacacaattgtgtcacataattgataaaataagactgcaaaatatataagcaaaagttaaaagaaaaagaaaaaaaaatagaagcagcaacaactacaagactagcatagaatttgcctaatggcaataccaatcattgtaaaatcctacagtttaaacaattgaagtgaaatgtgtacccttgtcatttgtgcttgtgcttactagatttgcctcacaagcatcgtagtcgtaacttgtatgggaactacttgttgcttgttaattcaatcgttgaagttgatttccaagc

SEQ ID NO: 2968 - DNA, 2188 bp, Glycine max
gaaagaaaagaaaaaaaaccgaagatgatacacagcgaaggaggggccgctaaaagcccagcttcgcgggccccccccccccccttcttcacttgcgcgatttctccgatcaaagttcctcactttctctcccttgatcgacacccaccacgcgttagagagagaaaaaaaaccccgagagatcggaaagatgggtacgcttcagtcttggagaagagcctacggtgccatcaaggataccaccaaagtgggtcttgcccatgtcaatagcgattacgcggatttggacgttgccatagtcaaagccacgaaccacgtcgagtgtccccccaaagagaggcacctcagaaagattctgtttgccacgtctgctgtgagacctagggctgatgtcgcttactgtatccatgcgctttcgcggcggttgacaaagacgcggaattggacggtggcattgaaaacactgatagtcatccataggttattgagggagggtgatcctacttttagagaagaacttctgaatttctcacaaagaggacgaattctccaactatcaaatttcaaggatgattctagcccaattgcttgggattgctctgcctgggtacgtacctatgcgttatttttggaagaaagacttgaatgctttcggattctgaagtatgatattgaagctgagcgtctacccaaacctgcccaagggcaggagaaggggtgcagcaagaccagggatttggatagtgaggagctattggagcagttgcctgctttgcagcagctgctgtatcgacttgttggttgtcggccagaaggagcagctgttagcaattatgtgatacaatatgctcttgccctggtactgaaggagagctttaagatttattgtgctattaatgatggcattatcaatcttgttgataagttttttgagatgcccagacatgaagctattaaagcccttgatgcctataaacgtgcgggtcagcaggcagcaagtctatctgatttctatgatgtttgcaaaggattggaacttgctaggaattttcagtttcctgtcttaagagagcctccacaatcttttcttacaaccatggaagagtacattaaggaggcaccacgagtggttacagttccaactgagccattgcttcagttgacttacagaccagaagaagttcttgcaattgaagatgctaaaccatctgatgaagaacaggagccaccagttcctgttgataataatgttgttgtctctgattctgaacctgcacctccaccaccaccaccgtcgtctcacaacaattttgaaactggagacttgctgggattgaatgacactgcacctgatgcatcgtccatagaggaaagaaatgctcttgccctagccatagtccccactgaaactggtactacatcagcttttaacacgactgctgctcagacaaaagattttgatccaaccggatgggagcttgccctggtcagcactccaagtactgatatttctgcagccaatgagagacaattggctggtggattggactctctcactcttaatagcttatacgatgaagcggcatatagatctcaacaaccagtatatggagcaccagccccaaatccatttgaaatgcaggatccatttgctctatcaagcagcatccctcccccgccagctgtccaattggcagcaatgcaacagcaagcaaatccatttggtccttaccaacaaccatttcagcctcagccacaaccgcagcagcagcagcatcatatgttgatgaacccagcaaatccctttggggatgcaggatttggagcatttcctgcccccaatcctgctcctcacccacagaacaacaatccatttggaagcacaggcttgttataaagaacaaattcctttttgaagatacgaggatgtatttaatcgatcaagttggttggttttgagcaaattgtaacatgagtttctcatttgttgcttgatatatagatgttttctggaatgggaggtggtgtgccttgtaaaatgcagacaacacactatgtattgatcattttatgaatatacataatggtgggatagctttctttgaacgtttcccaactcaagtaattggaacacttttacacatgttcatatatcatgtattcagtgtatggttccacattttgtatt

SEQ ID NO: 2969 - DNA, 1383 bp, Glycine max
  misc_feature (436)..(436): n is a, c, g, or t
cccacgcgtccgccctcgcttccgcccacgcgtccgcccacgcgtccgattaatgatggcattatcaatcttgttgataagttttttgagatgcccagacatgaagctgttaaagcccttgatgcctataaacgtgcgggtcagcaggcagcaagtctatctgatttctatgatgtttgcaaaggattggaacttgctaggaattttcagtttcctgtcttaagagagcctccacaatcttttcttacaaccatggaagagtacattaaggaggcgccacgagtggttacagttccaactgagccattgcttcagttgacctacagaccagaagaagttcttgcaattgaagatgccaaaccatctgatgaagaacaggagccaccagttcctgttgataataatgttgttgtctctgattctgaatctgcacctncaccaccaccaccatcggctcacaacaattttgaaactggagacttgctgggattgaatgacactgcacctgatgcatcgtccatagaggaaagaaatgctcttgcccgagccatagtccccactgaaactggcgctacatcagcttttaactcaactgcttctcaaacaaaagattttgatccaaccggatgggagcttgccctggtcagcactccaagtactgatatttctgcagccaatgagagacaattggctggtggattgcactctctcactcttaatagcttatacgatgaagcggcatatagatctgctcaacaaccagtatatggagcaccagccccaaatccatttgaagtgcaggatccatttgctctatcaagcagcatccctcccccacctgctgtccaaatggcagcaatgcaacagcaagcaaatccctttggttcttaccaacaaccatttcagcctcagccacagctgcagcagcagcagcagcttatgttgatgaacccagcaaatccctttggagatgcaggatttggagcatttcctgcctccaatcctgttcctcacccacagaacaacaatccatttggaagcactggcttgttataagaatgcctttttgaacatacaaggatgtatttaatcaatcaagttggttggttggttttgagcaaattgtaacatgagtttctcatttgttgctagatatagatgttttctggaatgggaggtgcgccttgtaaaatcgagacaacgcacgcggtgtattgatcattttatgatatacataatggtgggatagctttctttgaacatttcccaactcttttaagtaattggaacacttttacacatgttcatatatatcatgtattcagtattcaaagtatggttctacactttgtatactagtatgtgagatttcatatttgatct

SEQ ID NO: 2970 - DNA, 1082 bp, Glycine max
ttaaattttttttttttttttttttttggaaatgtaaagaggagtaatctgatctgatcactacctacagaaacttctcatatcaaaatacgtaaagagaactgaacttaggattgggcagtttacctgcttgaaactaaatatcgtatacatcaatttggtaaaaacaaaattaaaaaggatggacaattggtggatataagcaaacattagactgcctcagtcactatgctttcagctttccgctcatgccacgtttagtgggccaaatacaagtgacagaatttttcttggctgcaactgaacactgatcactccgaccacttttattgctcagctctgtttgaagcttccgtcgcctcattctgtgctctaatcgtattcctcttaatgctcgggctctccgttcaatttccaaagcttccgtgaaattccagatcctgacaacaccttcttcacctccactgacaattcgttcagctcctatatccacagagaaaagattgctcttaaatccatgcaacatcctctgtggaggctccactatgtctccacccaaatgctttacctttgaaactcttttccctagagctcgcttgctaatcctcaacagctttctcacatcaattagtgctagcttgccatcacttgatgcagaaacaagccatggaaactcaaaggcaagggaatacacagcggcagagtgaggaatccaagcagcaacatgccaagttttagactcatagccatcattaacaatctcatacatgtgaattgcaccatcttcacctccagtaaaaaggaagtcccctgtatggctccgtgccaaagcataagtattaccaacatgagcattatgaacaatggtcaccaaagccccactattagtatcccaaacatacacatctgaacctgatgtgctggcaacagtagtgttatgagggacaagtgcccagacccagtcactgtgcctcaacactgcaagtacacttcattgaaagacggtcccacactcgaacagttgtgtcccatgaaccactgtaaatccttgtcaagtctggggggggggcctacgtagctga

SEQ ID NO: 2971 - DNA, 2276 bp, Glycine max
ccacgcgtccgaaataaataagagcgcaaagagacggttgccatctttggtcacgctcaggttgagcacttgcatccaactttcttgaaaaagaccaacatcaattcttttttgggcctagggttagggtttcaattcctttctccctcaatttcaattatcaaggagtggtgaacatcaatctcctcccccgccgtgctttggacggacaacatgggaggtgatgacgctgccgctgagagtgccaccacagagcggaacgccgcaaacgaagtcaacatcaacatccgctgttccaatggttccaagttttccgttcagattggcctcgattccaccgtcagatccttcaaggaggcggttgctcacaattgtgatatatcctctgatcaacagcgcctgatttacaagggtcggatcctcaaggatgatcaacccctccaaagctacggtttggaggctgatcacactgtccatttggttcgtggtttttctccttctaacaccactggtgggactaatagtggtggtggcggtggtggaaataccacaactgccaacacgagaggtgctggtgctaatgagggtgggggtttaggagggccaggatttggagcttcaccgtttcctggacttggtggtaacaatgggatggggggcggtggcctcaatggcttatttggagcgggctttccggatcttgaacaaatgcagcaaccatttttgtcaaatcccaatttaatgagagatataatgaacacacctgctatgcagaatttaataaataatccagacatagtgcggaatcttataatgaataacccgcagatgcaagagctaatggataggaaccctgagctggcacacatacttaatgatcccagcactcttcgtcagacactcgaagctacaaggaaccctgagatcatgcgcgaaatgatgaggaatacagacagagcaatgagcaacattgaatcttctcctgagggatttaacatgctgagacgcatgtatgaaaatgttcaagaaccatttttgaatgccactacaatggctggtaacactggaaatgatgctgcagcagtcaggaaccaatccactaatccctcaactactaattctgaagcaacttcccctgtacccaatacgaacccacttcctaatccgtggtcctcaactggaactggaggaggaggccaaactaacaccagaaggtcaactactactggtggggacgcccgacagccggcacccactggcctaggagggcttggactgccagatcttgaaggcatgatgggtgggatgccagatactgctatgttgacccagttaatgcaaaacccagccatttcacaaatgatgcaaagtatcctttccaatccacagaccatgaatcagattcttggggtcaataatgagcagcgtggcatgcctgatttaaattctctaagggaggtgatgcaaaacccagagtttctacgcctgttttcctcacctgagacactgcagcaactcttgtctttccagcaaacacttctgtctcagcttggtcagcaacaatcagcacaggaaccaggtcaaacaggtggaggcactggaccattgaacaacatggggctggagatgttatcaagcatgtttggtggacttggagctggtagcctggctgttcctaacagatcaaatgagccaccggagcaattgtatgccacccaactttctcagcttcaagagatggggttctttgacacgcaagagaacataagggctcttattgctacatcagggaacgtacatgcagcagttgagcggcttttggggaaccccggacagtagcaggtggtagggacacaagactagcaattaaatcccaaacactagaatctggtgtgagatatttgtccatttagctttgattttcgtcatggagttatgttcaaacaaatctattgatttttttttcattttacatgatatccagagtttagtattatatccaatgctcaaatatccaatgattaattataccttcagctacaagaaagtacaaagccttttgtaccatatacatgtaattctaacttgcctgtttgcaaggattgggttcatagatacattcaaaagaaggggttatattggaacatgaatttagatatataattatgaactttttgtttgtcactgtagttgttaatcttgttgtggattccataacaatattaatgactcgtggccaccaaatctttataaataaactttgggttaaacaaaaa

SEQ ID NO: 2972 - DNA, 1902 bp, Glycine max
tcagctacgtaggccccccccccttgtgtctgcctcttctgaaacgccactatttctgctttctctctcattaataataatattattgccttactctttttccacaatggagttgggaagcatactccattttcttcaggacaagaacattttgatcactggagccactggctttcttgccaaagttttgttggagaagatattgagggtccaaccaaatgttaagaagctttaccttcttctaagagctgcagatgccaaatctgccactcatcgcttgaacaatgagatcatagggaaggatttgtttagggtactaaaggagaaattgggtgcaaattttaattcctttgtctcgaaaaagttgactctggtacccggggacatctctcgtgaagacttgggattggaggattccattctaagggaagagatttatgatcaaacagatgtcattattaacttagctgcaacaactaactttgatgaaaggtatgatatatcgttgggtctaaatacctttggtgttaagtatgtcatcaacttcgccaaaaaatgtaccaaactcgaggttcttgtgcatgtatcaacagcctatgtatgtggtgagggaggccgagaagggctcatattagagaaaccatatcatttgggtgattcactgaatggagtgtctggattagacattaatgcagaagagaaagttgtgcgcgacaaattaagtgagttacaacaactgggggccacagaaaaggaaattaaagaggttatgaaggacttgggcattagcagggcaaagttatatggatggccaaatacatatgtattcaccaaggcaatgggagagatgcttgtggagcaactaaaaggaaacttatccgttgtgatcattcgtcccagcattgttaccagcacattaaaagaacctttccctggttgggctgaaggtgtaagaaccattgacagtttagctgtagcttatgggaaaggaaaattaacatgcttccttggagatctaaaagcaattgttgatgcgattccagcagacatggtggtgaatgcaatacttgtggccatggtggctcatgcaaatcgtcctagtgatgatgttatatatcatattggttcctctgttagaagaccactaagatatggcaaacttcaagagtatggatttagatatttcacagcaaaaccatgcataagtaaggatggaaggccagttaaggttggaaaagttacagtactgagcaatatggatagcttcagaagatatatgttcattcgctacctgcttgtgttaaagggacttgagcttgccaatactgcattttgccagtatttccaaggaacatatcttgatctcaataggaagatccagattgtgatgcggttggtggacctttacaaaccttacttgttcttcaaagctgcatttgatgatatgaacacagagaagttgagaatggcaggaagacaaggtggggtggagacagatttgttttattttgaccccgaactgattgattgggaagattactttctgaacatccatcttcctggtatggtgaagtacatattgaagtgatattataattgaagtgatatatagagctttgaaactagtaattttattatgttcaaatttgtactagaagagtcacattatagtttgttatttgtttcttaagggcagtatgattgtgttagatagctgccaaatatgtttcaaaactttgatcaagtgtatccaatatcatatgttttaattttattttacttgtccctcagtctcttacaacaagtaccattccaaatagtactttttagcatggtttgttggataaaatcaatttttcacttttccctaaaaaaaaaaaaaaaaaaaaaaaaagggcggcc

SEQ ID NO: 2973 - DNA, 1969 bp, Glycine max
  misc_feature (1095)..(1095): n is a, c, g, or t
tcagctacgtaggccccccccccccccaccatttgcctcttgtccgagctagaagccactttggtttctttgcctttctcaatacattttcttttccatggaggtaggaagtgttcttaactttcttcaggacaggaccattttaattgttggagccactggctttctagccaaaatttttctggagaaaatattgagggttcaaccaaatgttaagaagctttttcttcttttaagagcttcggatgccaaatcagctaattatcgattgcaaaatgagatcatagcgaaggacttatttattgtgctaaaggaaaaattgggtgcaaattttaagtcctttatttcggaaaaagtgactctggtgccgggggatatttcttacgaggacttgggtttaactgattccattctaagggaagagatttgcaaccagacagatgttattgtcaatttggcagctacaactaagtttgatgaaaggtacgatttagcgttgggtctaaatatctttggagttaagcatgtcatgaagtttgctaaacaatgtgctaaactcaaaattcttcttcatgtatcaacagcttatgtatgtggtgagagaggtggactcatactagaagacccctatcactttggtgattcactaaatggagtgtctggactagacatcgaagcagaaaggacaatagtgtgtgacaaattggatgaactacgagagcaaggggctacagagcgtgaaattgaaatagctatgaagaacctgggtattagcagggcaaaggtgtatggatggccaaacacataggtatttacgaaggcagtaggagagatgcttgtggaacaattaaaaggaagcctatccgttgttattatgcgtcccaccatcgttacaagcacattaagagaacctttccctggttgggctgagggtgtaagaaccattgacagtttagctgttacttatgggaaaggaaaattaaaatgcttccttggaaatataaacggagttgtggatgtggtaccagctgacatggtggtgaatgcaatgctagtggccatggtggctcatgcaaagcagccaagtgatattgntatatcatgtgggttcctctcttagaaatccactcacatacttgaatctccaagactatggactaaaatatttcacggcaaaaccatggataaacaaggatggaacaccggtcaaggttggcagagtaactgtattaaccgacatggatagctttcagagatatatgttcattcgctacctacttccactaaagggacttgagctggccaatactgcactttgccagtattttcgaggaacttatcttgagctccacaggaagatccaggttgtgatgcggatggttgaactttacaggccttacatgttcttcgatggcgtatttgatgatatgaacacagagaagttgcgaatggcagcaaaacaaagtgggacagagacagatttgttttactttgatacgaaagaggttaattgggatgattactttatgaagacccatctccctggtattgtcaagtacattttcaagtgatatatgctatacttttaagtgatttgagaaactagtaactttattaagatcttgtttatataaactgaaaggaaaataagaaaataaaatgaattgagtttctatttaagataaaatcaatttatgtattttagcttttgaaaaaaaaagttaaaagagagaagttttgtaaaagctaaacacctaaattgattttagctttatagaagaaactgatcaattcatctaagttcaaatttgtgcagtatgcattacagtagctagcggtgttctttatttctcaacatcagtgtaatcggtattggctagctgctaattaagtttaataaagtgtaccaaataccatatattttgctttctcttgcaatcaactttgatgggcccccgttctcggacgc

SEQ ID NO: 2974 - DNA, 2086 bp, Glycine max
tcagctacgtaggcccccccccccgaaaaagtcttcacttcactatgaccaacagcttacccacagcccatctcatgggtcataattgctctatatgattgttttttctcttcttatatgaaatggctcgcattagattccactcacaccattttgcctgttttgtctgagaagccactttggtttctttgcctttctcaatacattttattttccaatggaggtaggaagtgttcttaactttcttgaggacaagaccattttaattgttggagccactggctttctcgccaaaatttttctggagaagatattgagggttcaaccaaatgttaagaagctttttcttcttttaagagcttcggatgccaaatcagctaattatcgcttgcaaaatgagatcatagcgaaggacttatttattgtgctaaaggagaaattgggtgcaaattttaagtcctttatttcggaaaaagtgactctggtgccgggggacatttcttacgaggacttgggcctgaaggattccattctaagggaagagatttgcaaccagacagatgttattgtcaatttggcagcaacaactaactttgatgaaaggtacgatatagcgttgggtctaaatatttttggagttaagcatgtgatgaactttgctaaacaatgtaccaaactcaaagttgttcttcatgtatcaacagcttatgtatgtggtgagagaggtggactaatactagaggaaccttataactttggtgattcactaaatggagtgtctggactagacatcgatgcagaaaggacaatagtgtgtgacaaattggatgaactacgagagcaaggggccacagagcgtgaaattaaaatagctatgaagaacctcggtattagcagggcaaaggtgtatggatggccaaacacatacgtatttacgaaggcagtaggagagatgcttgtggagcaattaaaaggaagactatccgttgttattatgcgtccgaccatcgttacaagcactttaagagaacctttccctggttgggttgagggtgtaagaaccattgacagtttagccgttacttatgggaaaggaaaattaacatgcttccttggaaatatcaacggagttgtggatgcggtaccagctgacatggtggtgaatgcaatgctagtggccatggtggctcatgcaaatcaacctagtgatatcatctatcatgtgggttcctctcttagaaatccactcacatacttaaatctccaagactatggattaaaatatttcacggcaaaaccatggataaacaaggatggaacaccggtcaaggttggcagagtaactgtattgactgacatggatagcttccagagatatatgttcattcgttacctgcttccattaaagggacttgagctggccaatactgcactttgccagtattttcggggaacttatcttgagctccacaggaagatccaggttgtgatgcggatggttgaactttacaggccttacatgttcttcaatggcgtatttgatgatataaacacagagaagttgcgaatagcagcaaaacaaagtggaacagagacagatttgttttactttgatacgaaagaggttaattgggaggattactttatgaagacccatctccccggtattgtcaagcacgttttcaagtgatgataaatgctatacttttaagtgatttgtgaaactagtaactctattaatatcttgtttagataaactgaaaggaaaataagaaagtaaaatgaattgagtttctcctttaagcattttagcttttgaaaaaggttaaatgagagaagttttataaaagctaaatatctaaattgatttcagcttatagaagaaaccagtcaattcatcttaccttctgccttctcccttctcctattatccaaacgggcttgagttcaaatttgtgcagtatgcattacagtagctagtgatgttctttatttctcaacatcagtggaattggtattggctagctgctaattaagtttgataaagtgtaccaaatatcatatattttaatttgctttcttttgc

SEQ ID NO: 2975 - DNA, 2707 bp, Glycine max
atatacgctacgcaggctcccgcccaacctgagcgtagttcctaacactacactcttccgccgattattcttcctctgtgccctagcttctcttccgccgctgtcaacgaccgtctcccttgccgcttccggcaccgaacgaacagtctccggccaacttcagctcttgcgtgcgaaaattctcggaatattttgaatccaggaaatcatgcacgctccagttctagttctcaaggactctttgaaacgagagtctggatctaaggtccgctatgctattattcaggcggcaaaggctgttgctgatgtagtccgaacaacattgggacctaggtccatgctaaaaatgcttcttgatgctcaaggaggaattgtggttaccaatgatgggaatgctatcttacgtgaattagaccttgctcatcctgctgcaaagtctatgattgagttaagtcgcacccaagatgaagaagtcggagatggaacgacatctgtcatcattcttgctggtgagatgcttcatgtcgccgatgcattcattgacaaaattcaccctacagttatttgccgagcatataacaaagctttggaggatgctattgctgtccttgacaaaattgcaatgcctattgatgctcaggatcgaggtataatgctggggctagtaaaaagctgcataggtaccaaattcacaggtcaatttggggatttaattgctgacttagctattgatgctactacaacagtaggtgttgagattggccaaggtttgagagatgtagatattaaaaattatattaaagttgagaaggtcccaggtgggcagctggaggattcgagagttctcaagggagtcatgataaacaaagatgtggttgcccctggcaaaatgaggagaaggattgttaacccacacatcattcttcttgattctccccttgagtataaaaagggtgaaaaccaaacaaatgccgaactgctcaaagaagaagactggagtctcttattgaagatggaagaagaatatattgaggagctatgcatgcagatattgaagtttaaaccggacttggtaatcacagagaagggtctgagtgatttggcaacccattatctcagcaagcatggagttagtgcaatcaggaggctgaggaaaactgataataatagaattgcaaaggcttgtggtgctgttattgtgaacagaccagatgaattgcaggagtctgatgttggtactggtgctgggttatttgaggttaagaaaattggagatgagtactttgcatatattgttgattgcaaagaacccaaggcttgtactgttctactaaggggtgctagtaaggatctattaaatgaagttgaaagaaacctacaggatgccatgtctgttgcaaggaacattataaaaaatcctaaacttgttcctggaggcggtgctacagagttgacggtgtcggctgccttgaaacaaaagagttcatctattgagggcatagagaagtggccttatgaagctgctgccctagcttttgaagccataccacgaactttggctcaaaattgtggagtaaatgtcatccggactatgactgctctacaaggaaaacatgcaaatggagaaaatgcatggattggtatagatggaaatactggcagtatcactgacatgaaagagcgcaagatttgggatgcctacaatgtgaaggcacaagcatttaagactgccattgaagccgcttgtatgcttctgaggattgatgatatagtgagtgggatcaagaagaagcaagcccctggagctgctccttcaaaacccaaggttgagaccgaggcagatgctgacagtgagcaaatccttcctgactgagaatctcggttcaacagacattgttttttggtagagttgatgatgtgcaaggttctttatcttccttaaatcttatcactattcttaggagttttgagtcctttattgggatgctgttttttgtgccttctctactgtttgcaagagcaaattgtgtactttgttgatgttaaagacttaattaactggcgtatgctttattgggtgttctcggtccattatcttgagattttgtgccaggttcaaactgaccagtttcaccaattctgttacgctgtttctggtttttcatcctattcattcgtgaaatgttttcttcatcttaatatctaagtttccggtaaactatggtacaacagagacttttttgttggtaatagtgttcaatttagaaaagtactgatagtcttctagctcgctagtgattactgattagtcttttagaaaactaccaaggatttaagaaatgcttgagataatgagatgggtatttgatgtgcagcattagatgattcttatgcgaagaaacgttaactgacaagtagaaatagaagttcaaatttgttcagcaatatgttcttaaagccaaggccatcgttgtacttacgcaagtactcccaagaattttatacaattatttgagggatggcataaaataggcttttttttttattgtacattttatgtaaaatttaatgtaaatttggttaaatatattttagtaggaagttgtatttttttatatattattatataatgaattattttgtataccaaaattgttattaattattttaaaagtgatatctactatagatatttaatgtagaaaaa

SEQ ID NO: 2976 - DNA, 2241 bp, Glycine max
acggccgcgggcacattttggcggaaaacctcagcgtagttcctaacactacactcttccgccgattatttctccaaaccgattattcttcttctgtgccctagcgccttttcctccgccgtcaaccaccgtatccctcccgcttccggcaccgatcgaacagtctccggccaagttcagttcttgcttgcgaaaattctcggaatattttgaatccaggaaatcatgcacgcgccagttctagttctcaaggactctttgaaacgggagtctggatctaaggtccgctatgctattattcaggcggcggaggctgttgctgatgtagtccgaacaacgttgggacctaggtccatgctaaaaatgcttcttgatgctcaaggaggaattgtggttacaaatgatgggaatgctatcttacgtgaattagaccttgctcaccctgctgcaaagtctatgattgaattaagtcgcacccaagacgaagaagttggagatggaacaacatctgtcatcattcttgctggtgagatgcttcatgtcgccgatgcattcattgacaaaattcaccctacagttatttgccgagcatatgccaaagctttggaggatgctattgctgttcttgacaaaattgcaatgcctatcaatgctcaggatcgaggtataatgctggggcttgtaaaaagctgcataggtaccaaattcacaggccgatttggggatttaattgctgacttggctattgatgctactacaacagtaggtgttgaggttggccaaggtttgagagatgtggatattaaaaattatatcaaagttgagaaggtcccaggtgggcagctagaagattcaagagttctcaagggagttatgataaacaaagatgtggttgcccctggcaaaatgaggagaaagattgttaatccacgtatcattcttcttgattgtccccttgagtataaaaagggtgaaaaccaaacaaatgctgaactgctcaaagaagaagactggagtctcttattgaagatggaagaagaatatattgaggagctatgcatgcagatattgaagtttaaaccagacttggtaatcacagagaagggtctgagtgatttggcttgccattatctcagcaagcatggagttagtgcaatcaggaggctgaggaaaactgataataatagaattgcaaaggcttgtggtgctgttattgtgaatagaccagatgaattgcaggagtctgatgttggtactggcgctgggttatttgaggttaagaaaattggagatgagtactttgcatttattgttgattgcaaagaacccaaggcttgtactgttctactaaggggtgctagtaaggatctattaaatgaagttgaaagaaacctacaggatgccatgtctgttgcaaggaacattataaaaaatccaaaacttgttcctggaggtggtgctacagagttgacagtgtcagctgccttgaaacagaagagttcatctattgagggcatagagaagtggccttatgaagctgctgccctagcttttgaagccataccacgaactttggcacaaaattgtggagtaaatgtgatccggactatgactgctctacaaggaaaacatgcaaatggagaaaatgcgtggattggtatagatggaaatactggtagtatcactgacatgaaagagtgcaagatctgggatgcctacaatgtgaaggcacaagcatttaagactgccattgaagctgcttgcatgcttctgaggattgatgatatagtgagtgggatcaagaagaaacaggcccctggagccactccttcaaaacccaaggttgagaccgaggcagatgctgacagtgagcaaatccttcccgattgagaatcttgtttcaactgacattgttttttggtagagttgatgatgtgttaggttcttaatcttccttaaattttatcactattcttagaagttgaatcctttattgggattttttttgtgtcttgtactgtttgcaagagctaattgtgtacttcgttgatgttaaagacttgattaactggcgtatgctttattgggtgttctcggttcattatcttgagattttgtgccagggtcaaactgaccagtttcaccaattctgttgagctgcttctggtttttcatcctattcattcgtgaaatgttttcttcatcttaatatataagcactccattggaacttgttccggt

SEQ ID NO: 2977 - DNA, 1040 bp, Glycine max
attcggatttcggctcgatattcatcttatctcattagttaaagcagctcataagtgcagtcaaagccaatcttgttcacgttacacgttttccatctctcttcttcctttttctcttcctttcttttagttctgttattgcaattttgccaggcctataatgcaaagttaaccaacatttgattccattctttctgtttccttcttcaaatatctttgtatcttgttttgcaagtaaaacaagaacaaccttatttgtatatattttagaaacttcattatttgacagtatattcacccatagttgaatttcaatggggaaaggaggtggttgctttccaagcaaaacaaaggcaccaatttctggagcagaaaaggatccaattattgttgaaagtctaattccaacaaatgatccaagtagcacaagccaagaggtggaagcaccagcaccagcaccagcagcagtgaaaaagctgaaaattttcattgtgttctactcaacttatggccatgtggagtcattggcaaggtccttgaagaaaggggttgattcaattgaaggcgttgaaggggtgttgtaccgcgtgctggagacgctgccaaaggaggttctggaactcatgaaggcacctgagaaggatgagacagtgccactcatatctgaagacaagttggtggaggctgatggcttgctgtttggttttccaacaaggtatggcagcatggcggcgcagatgaaggtgtttttcgattcgaccggtcagttgtggaaaaaacaaaagctggcaggggtgcctgctggcttttttgtcagccctggcactcagggtggaggccaaaaaaccccagggtaaaaaggccttttattttttgccttcattgatgcatgcataaataaaagccctgcttttcattttattttctttaatggaacttcagaattttatttatgtatataaatcaattgatagaatttaattaaaaaaaaatgaggggacaaaaaaaaaaaaaaaaaaaaaaaaaaaaaaaaaaaaaaa

SEQ ID NO: 2978 - DNA, 1600 bp, Glycine max
gttttattgtacaggtggtgatagtgacggtcgcctttcacctttttcttctgctgggactaacaccaagtacaaccgcaatgcccggctcgacccacgcgtccagtgcttcctgctccaacttctcaatctcctcaagagggaggtgtcttgtccaccgcaggtccaacaccacttgtgactcaagctgctgggctgatgcaaagctcaatagctgttactcaacagcctgtccctgtcttccgacctagtggggtgcatatatcccattaccctcctaactacattccttatagtccctatttttcaccattttatgtctcacctccagcaatccatcaatttatgggtaatggtgcatttcctcaacaaccacaggccagcactgtatatcccccacccccagctgttgctcccaccggaatgaaatatcctcttccacaattcaaacctggtgcaaatgcagcaaacccaactcaccttgtaatgccaagtgcctatggtgtatatggctcctctgcagctggttacaatcataattctgcagcagctgcagggaattcaacctccaatgaggatcttggttcctctcagttcaaggaaagcaatgtgtacatcggtggacagcagagcgaaggttcagcagtgtgggtggctgcacctggccgagacattaccagtttgcccactagcacattctacaacctccctcctcagggtcagcatgtgacttttgccccaactcaggctggccatggcacctttgcgggcatgtatcaccctgcacaagcagtgacggcagcagcagttcatccactgctacaacaatcccagacattggctggagcagttgatatggtaggacctggaggcaatgtttatcagcagcctcagcactcacaaatcaattggccgagcaactactgaggccaggagtcttcctgacagctaaaattagataattgagtcctatctggggaaattttttgagaaatgccaaaatatggttggatttctgaagacaaacaacatggcaattggctacatttgagtgtaagaagatggacaatttgccaatatgatcttctgattgcttggtttgaggacatatgaagggtaggatacctgtaaccgatatgaccattaaagttagacgaggtagaaacatatgcaggccttctcttttttactcctgctattttgtgttaccattaataccttttcatagctccaagcttttccttccctatcttttgttgaggtccttgaactctattaagagtattgttgagtgatgagaaatgtccattctttcttttttagtttgggtttatagggtttggaaggtttaggttggttggtggggaaagcttttctggtgccccttgtcttacctgtaaagtgaattttgatagcaagaaaaatcatttacttaagctgttgtattgctatgggcaaagtaaactgtcgattgttttcagctaacttatattgtttgtcatggtttacagaaaaaaaagttgggttaagacttaggaacacttgtgcaatttattctaatagtagttctgtggaattttctctcaaaaaaaaaaaaaaa

SEQ ID NO: 2979 - DNA, 1194 bp, Glycine max
aaaaaaataaatttcagtatcggtaaaatttgcctccgcatattggaaggcgcaaggacacctgccaccacaagctctccgctgcccaccgcccgccgcctctgccttggcgtgttcagccgccatcgccgtccctgcccactgcttctgctggaaagcagcaactaagctctccaccgcccttagtcttgttcttttttgaaaataattttgttgttatggactttgacgacttagaagaagcgccgataaaggccacgtctcgagtctccaagttcgcgccaaaatcatcaaagctcaaacctaaaccaaaatcagaacctgccccccccaaacctgaaccccaaccacccatctccaaaccagagcctcaggaattcgttgcagcaactgtcaaaaagaatgaagatgatggcgtcgaaacagtgccaccaactcatacgaaacccgaactcgacgccactgtcaaaatggaggaggccgaagacgaaccagaatcagttcgagacgatcccatagacgaagatatccctgaagaagacacagttgtgcgcgaaattgatgtcttcttctctccttctgtcgatgcccagactcagctatacgtctttcagtatcccttgagaccttcttggcgaccgtacgatttggatgaacaatgcgaagaggtaaggttgaagactaaaacttcacaagtggagattgatttatccattgatcttgactcggaccatattgacaaagagtttgccaccaaatacaacatcacaaagcagactttatcaactacgtggaagccatctcatgcaaatggatgtgctgttgggcttcttatgggtgataagttacacctgcatccagttcatgcagttgtgcagctccgaccaacattacaacatcttaattctggtggttcaaaacggaagaacgctgcctccactggagcaaatgctactgtcaaaattgagggctcaaatgaagagaagtctgttgctacatcaaagaagcagaataagcagacaggaccttctattattgagcaaaagagtgatggtgatgagtgctgggttcctctaaagtaccatagctgcaagagtgatatatcctctagatatttgcagcaaatggtgacacaagaaagttctcctataaacttcacaatgagagcgtatgattatgttactgcactgtgtc

SEQ ID NO: 2980 - DNA, 1006 bp, Glycine max
ggctccccccgtccgttcggctgcgagaagacgacagaagggtacggctgcgagaagacgacagaaggggactcaaaaacacactcttcaaattccaatccaaaccaacaataatgtctctcttccattgccatgcctttcaccaccgcatggccactctctcacccttctcacccttcaattccaaacccctctttgcttttctaccaaacccctctttcttaactcatcatcaacaacaacaacatccttatcctctcaccaaaaccacaaccactgacctcaacaacaataggcctctttcactctccacactgcccagaaagttgctctgcaaaccaccccaggggaaatatgtcagagaggactatctagtgaaaaagttgtcagctcaggaaatccaggagctggtgaagggagaaagaaaagtgcctcttatcattgatttctttgcaacttggtgtggaccatgcatcttaatggcacaagaacttgaaacacttgcagttgagtaccaaaacaaggcactgattgttaaggttgatacagatgaggagtacgaatttgcacgcgacatgcaggttcgtgggttgcctactgtgttctttattagccctgatccgaacaaagaagctattcgaaccgaaggacttgtccctatacagatgatgagggatatcattgacaaggatatgtgaaacaacaacaaagtgttctgatcacctgacatagtttgtgttcctggatcctgcaatatactgtctggtgtaatgctagcctatctgggacagaattgaagtgctaaccgattcatatgattttggttattgaaggttgtaaatcgtatgatatttatgtaaactttgagctcgacatactccatagtgtatcacatgtgatgtcaaatggaagagaacattgtaacccgatcatggaaaagccccggaccattcttcaaaaaataacctgttattgagtgggcccttgtggggaagaggaaattggg

SEQ ID NO: 2981 - DNA, 1092 bp, Glycine max
  misc_feature (29)..(29): n is a, c, g, or t
  misc_feature (31)..(32): n is a, c, g, or t
  misc_feature (60)..(60): n is a, c, g, or t
  misc_feature (69)..(69): n is a, c, g, or t
  misc_feature (80)..(80): n is a, c, g, or t
ccccccccccccccccccccccgcccccncnngccccccccccccccccccccccccccngccccccgntcctccccccncccgggacccgccttcgtgcggccccgggccctccgccccgggaaaaattcgaaattccaatccaatttccctatctctctctgtctctatatctgtatttctgaattttgggaatagaaaaaccctaagcaaagcaaagcggtaaggatggggaacacggagaagctgatgaaccagatcatggaattgaaattcacttcgaaatcgctgcagcgtcaatcgcgtaagtgcgagaaggaggagaaatcggagaagctgaaggtgaagaaggcgatcgagaaaggcaacatggacggcgctcgaatctacgcggagaacgcgatccgtaagcgcacggagcagatgaactacctccgcctggcctcgcgcctcgacgccgtggtcgcccgcctcgacacgcaggcgaagatgacgacgatcagcaagtcgatgggcaacatcgtgaaatcgctggagtcatcgctggccacggggaacctccagaagatgtcggagaccatggactcgttcgagaagcagttcgtgaacatggaggtccaggccgagttcatggagagcgccatggccggatccacctccctctccactcccgaaggagaggtcaacagcctcatgcagcaggttgccgacgactacggcctcgaggtctccgtcggcctcccgcagcccgccgctcacgccgtccctgccaaggaggccgacaaggtcgacgaggacgacttgtctcgccgcctggccgaactcaaggctagaggttaattactctgtaataatactatcatcgtttctcgattctcattgctgacgcagtggaacattatatactatatgtttgtgtatatttaaccgagttcggttggcacttgttatgtggactccccctttgaggggtgttatggccttcgcttcgtgttagtgtcatcgtgtgaatgcttattactacattaatagaatgcttatatttgtctttttctcccaaaaaaaaaaaaaaaagaaaagaaaaaaaagcga

SEQ ID NO: 2982 - DNA, 1324 bp, Glycine max
tttttagattttaaatttacatattatattaaagctttaaattacaaccgcctcgtgcgaattcttcctcatcaaaaactcgattcaaaacattataaattcaacttctgaaacaatttcacccaaattcaacctctcaacggcaacaacaaagtactttcgacaataaacataatttgcatcaaacttcatatcctcacagcagcaaagataaaaagcactcctcacaggagatactttcaaaacaacacaccttattcaacacaccacactcctgaaatagtttcaaaaaactcaatacctaatgaccactgctggagaaactttgaaagcaaaaaagcactccactaaacaaggttttaacagtaatctttggcattcatgtcttaacaataaaacataactctcttgacgttctccttgagtgcaggcaatggtctcacagcagcattggcaccaggtacacgcgtgctacgccctacaccgcccatcccacggcctgcaacagcaccacttgtcatagagccactatccgacgtctctggttccatgtaaaaccttgcgcggaatgcagcaaggtgagcatagtatgcaggaggcacgattgaaacagaccgggtgcaccgagcatatgtgtagcaaagattgttggtgagtgtttgcaaggcatcagcagtaaaattgttttcatcccacaacacatggtagtgagcaggacggcttgtaccctgtattccagcatggctgcagagataaaagtcaaattcggtgggatggcagattttggagtcaacaacagtgccaggcaatatgttgccactcttgtcaacagaactcttatcatgatggttgctagcaaagagccttgtgtggtgacgcttttgaaccaccacaaaagtcacaggaggctgataattgggttccagggatgcacatgcctttcgaatagcatcaagctcaaacagtagaacctgataaaactgtccctcactcacaccatccctataaaatatgatgcgttgtggcttttgtcctgtagctctcctaaaagatataagaagttccttgatcattccaccagtcactgttcctctgactggatcttgccattgtttgaaaagatcctgaatgagttcctgcctatgagcttgggcacaaactaaaccagcatactttgtaatttcaggatagtcttgcgaagccacaactgctgcaattgatggacttgaatcctctccaggatgtggatgagtcacatcagctccaaaaataattgtagccggcggagctacgtaccctgtactggttgatgcgctctcacgac

SEQ ID NO: 2983 - DNA, 1222 bp, Glycine max
tcctcctaaaaactcatgaaaccacttgtcatcaatcatttctagcaaattcgtgtcatcctcgttgccagaaacaataattcttgccgtggtcctaggatcaaggaatgattttccggtgttccacagtatcctaggctcgagctgcggttctttcctttttttttttttttttgataatgcccaaagctcagaagatgcatttcatctctgaacatatcactccagtcaattatatagaacatgatgttttaagccaattctttcagcaaggaatacaaagaaaatacaaaaagcttgctctctttgttttgattcttatttccatacaagcaaaactccaagctaacagatacattgaagaataacaaaaaagaacatcaaacagaaatacccaaagacttcttaaacttctcaacctccaaatatacggtggaataaggaaggaactctgagtaatggtctctgctcagatcgtttatagcaactgcaagtttggggatttctaagatttcttcatgggtcaaagtcctcacatacctggctggatttcctgcccaaagttcaccggttggaattcgcctccctggtggaactactgacccagcttcaaggattgactgcgtctccaccaatgaaccttccatgaggatggaatgctgcccaataatgcactctggctcaatagtgcaggacctcaacaggctgtatgctccaattgtcacgtacctctctattgaagtgtcagctggaaggcctgtgggagaggaccaagccgcgtgaagaacggagcgttcctggacgttggagcagaatccgatgctgatcttgttgagatcgccgcggaggacgcaaccgggccagacggaggctccgtcccagacggtgacttggccggcgaggaccacgttgggtgccacgtaagcatccacggcaactttggggagccactgccccaacgggattatcttcctctgcccacggtagtcccacttcacgcgatccgccgacggggtaatcgatgtcggcgcatccgtcgaaaaagcgcgttctgctgtcagcagctgaggctgcacgtggggccttgctagcgcgtgtgcgcttcttagggctctcttggagaagcgtgctagattcgccattttagaagagtgaaaccggaaaatgagagtgaggtaaggggggaatgtgtttttttctacagagacaaatagtatgtaat

SEQ ID NO: 2984 - DNA, 1298 bp, Glycine max
attatcttaaaccttcttaagtaccaccactaagcagcaaattttatatatctcatcaaaaactcgactcacccaaatttaacttctcgaaggcaacaacaaagtaagaaactttcgacaataaacatagtttgcatcaaatatcagaccctcatagcaaagataaaacactccacactggacaaccttattcaacacaccacacaccttaaatagtttcaaaaaactcaatactaatgacacagaccacaccactggagatagtttgaaagcagcaagggaaaaagcactcctccacaaaacaaggttgctaaaagtaatctttggcatgcatatcatatcttcttaacaataaaacataactctcttaacgttctctttgagtgcaggcaatggtctcacagcagcattagcaccaggtgcccgggtgctacgccctacaccaccaccaccgccgccacccatcccacggcctgcaacagcaccacttgtcatagagccactatccgaagtctcgggttccatgtaaaaccttgcacggaatgcagcaaggtgagcatagtatgcaggaggcacaattgaaacagatcgggtgcaccgagcatatgtgtagcaaagattattggtgagtgtttgcaaggcatcagcagtaaaattgttttcatcccacaacacatggtagtgagcaggacggcttgtaccctgtattccagcatggctgcagagataaaagtcaaattcggtgggatggcagattttggagtcaacaacagtaccaggcaatatgttgccactcctgtcaaaagaactcttatcgtgatggttgctggcaaagagccttgtgtggtgacgcttttgaaccaccacaaaagtcacaggaggctgatagttgggttccagggatgcacatgcctttcgaatagcatcaagctcaaacagtagaacctgataaaattgaccctcactaacaccatccctataaaatatgatgcgttgtggcttttgtcctgtagctctcctaaaagatataagaagttccttgatcattccaccagtcactgttcctctgactggatcttgccattgtttgaaaagatcctggatgagttcctgcctatgagcttgggcacaaactaaaccagcatactttgtaatttcaggatagtcttgcgaagccacaactgctgcaattgatggacttgaatcctctccaggatgtggatgagtcacatcagctccaaaaattaatgtcaaagttggagggagaaacactgtactggttgatgcgccctcacgac

SEQ ID NO: 2985 - DNA, 2808 bp, Glycine max
caaaaaggattcactaaaccaggttttacagtaatcttggccttcatgtccttaccattaaacctaactctcttgacgttctccttgagtgcaggcaattgtctcacaggtccattgtcacaggtacacgcgtgtacgccctacaccgcccatcccacggccttgcaacagcaccacttgtcatagagccactacccgacgtctcgggttccatgtacaacctggcgcggaatgcagcaaggtgagcatagtatgcaggaggcacgattgaaacaagaccgggggcaccgggccatatgtgtagcaaagattgttggtgagtgtttgcaaggcatcagcagtaaaattgttttcatcccacaacacatggtagtgagcaggacggcttgtaccctgtattccagcatggctgcagagataaaagtcaaattcggtgggatggcagattttggagtcaacaacagtgccaggcaatatgttgccactcttgtcaacagaactcttatcatgatggttgctagcaaagagccttgtgtggtgacgcttttgaaccaccacaaaagtcacaggaggctgataattgggttccagggatgcacatgcctttcgaatagcatcaagctcaaacagtagaacctgataaaactgtccctcactcacaccatccctataaaatatgatgcgttgtggcttttgtcctgtagctctcctaaaagatataagaagttccttgatcattccaccagtcactgttcctctgactggatcttgccattgtttgaaaagatcctgaatgagttcctgcctatgaacttgggcacaaactaaaccagcatactttgtaatttcaggatagtcttgcgaagccacaactgctgcaattgatgggcttgaatcctctccaggatgtggatgagtcacatcagctccaaaaataattgtaggtctgtcactgaccaagggaatgcgtcgtgagagcgcatcaaccagtacagtgtttctccctccaactttgacattaattttcaaagcaacatttgcaaggtactgcttgctcattttgaagacatgcttagttaagcaacattgtgaaacaagtcctaggtcagtctcacatatccgtttgagatcaccataaagagatccattattatcgggcaagataacgatgagcaaatcaagctctcttccttgcagtttgttcttggcatcatgataccgagttttaagaaccttttccacttgatcagggcgagcactgactggggggactactggctcaggtgtaaatgccattccagatatataacacatctgagcaagttcatagcaaaaaccacgggcaacactatcttgaacattccttgaaaagtttatgcagaaccagttgttaactgtccccccattaaccattttcttattcatcatattccattgcccaacttgaggaagacaatccttttctctgcccgtatcgtgatatttgagccatggagcaggaaggatgcgagcttcaacttgagcaagtttctcactaatcttgattccaaattctttagcataaggatcttcgtggtatgcgttgtggtgtactgtctgcatgatatcacgctccctctcaccaggacgctggcatgtaactctcagcaaattagtgatttgcctctcattaagccttttcgagtacctttgaccctccactatcttgcaaacctccattggcaaatagtttggtctctgtgcattgccaacttgcagacaaggccactgagtatgttgaatgacaaacccatatgtctcatagaagtactccacaacagatttcatggttcccctttcatctaccgggaatgtcaattctctggttgcctgtgaagtcagaccagagatacgatattttcttctcatgtttccacgatgtgtcacttcaactttgataccccggagagctttcttgatcttcacacgatcagcatcagaaagtggccgggcggatacatctctgttcagcagttgagttacgaaatcaattactggcaatggctcaataaatgcagtggaagacatatcaatgttcagtgatagccccatctgtgtaggccgaatactctggtagaaaccacgccagctttccaatccctcacctaaaggctgtcttctgcccaaatcaggtgaataaaatgatcttccgacaggacaataccttgtagtagggagttcgcgcagaacaatgtcaaggacctgcaaagcctcttgaggagcatcagtttgccttccttgtaaaaagagtcccaaatggtgaaggtctgcacgtgcagccaattttatcacaaccttgaactccctgtccctcctctggcctccagctccttcatcatcatcaacgagaacaattctgaactcctttgacataaaaggaagtggtccagcagtatagaggctcttgcgtccatcataagcagggagtctcttacccaagtgagattcccggtacagtctcaccaactgctccataacagcacggttcacccctcttgatatcacttctggagtaattgtaacatcatattgatgcagatctttgttgggtaactcagcaaagaaatgattagccttaacaacacacttggtgccatagctaccctttccaggtcgaaggggaaacctcattgatgatttacttgcaggaggaggagtaggagcaggttcagcatgaagcaccatctgccccattgactgttccaaatcaataggctctggcggcagggatgaactggcctcaggatgatgcaggctgagaactcaccc

SEQ ID NO: 2986 - DNA, 1401 bp, Glycine max
actaaaaatcaattttataagttcacgttaatctcaaatccattctacaaacgctagtccaaacaaacactttatctttatacattacagtgagacacagaaagtatctcagagactacttgaattatttccatgggaaaagggtgcatattaacttttttaacgacaaggaagaactacccatagtcccatacccttgtccacctaaacaccggttgaaagcatacttgccaagtggatcaaggttggttgtcacctggcatttaagatttctatttgtttgcaacaaatggataaaaagggggacacatcagaatctgtccaattgggacttaaaaatactaatgcctaaagctcagaagatgcatctcatctctgaacatatcactccagtcaattatatagaacacgatgttttaagccaattctttcagcaaggaatacaaagaaaatacaaaagcttgctctctttgttttaattcttatttccttacaagcaaaactccagctaacagatacattgaagaataacaaaaaagaacatcaaacagaaatacccaaagacttcttaaacttctcaacctccaaatatactgtggaatagggaaggaactctgagtaatggtctctgctcagatcatttatagcaactgccagtttggggatttctaagatttcttcatgggtcaaagtcctcacaaacctggctggatttcctgcccacagttctcctgttggaattcgccttcctggtggaactactgaccctgcttcaaggattgactgtgtctccaccaatgaaccttccatgaggatggagtgctgcccaataatgcactctggctcaatagtgcaggacctcaacaggctgtatgctccaattgtcacgtacctctctattgaagtgtcagctggaaggcctgtgggagaagaccaagcagcgtgaataacggagcgttcctgaacgttggagcagaatccgacgctgatcttgttgagatcgccgcggaggacgcaaccgggccagacggaggctccgtcccagacggtgacttggccggcgaggaccacgttgggtgctacgtaagcatccacggccactttggggagccactgccctaacgggattatcttcctctgccctcggtagtcccacttcacgcgatccgccgacggggatatcgatttcgccgcctccgtcgcaaaagcgcgttccgctgccagcagctgcggctgcacgtggtgccttgcgagcgcgtgtgcgcttcttagggctctcttggagaagtgtgctagattcgccatgagagagagagagagagagaaaccggaaaatgagaatgaggttgagaaaccgaggtagcagacaagggggaatgcgtttatgggctacagagacgg

SEQ ID NO: 2987 - DNA, 1636 bp, Glycine max
tttcatatgcattagtcttccataaagcgatgcccagagaatcttgccacaaatctttcacagttaactcacccaacttaaaaataaataagaatacgatactacaccacactccttacaaataaataccaccctctcgcgccctgcccctaactaccacttccacacaacaacaacaacacaaacctatgcttaaaacttaaaattatccatcttcaacttcacaatggtgcgtgtcaaagaagctctcgttgtcaccccttccgagcccacaccgaataccgttctctcactctcagctcttgactcccaactcttcttgcgcttcaccatcgagtatctttttatttacaggcccggcccgggcctggacccaacttccaccgcggctcgtttaaaagctgcattagccaaagcgcttgttccttattatccattcgccggaagggttcgctccaggcccgacggcccgggcctcgaggtcgtttgtcgggcccagggcgctgtcttcatcgaagcctcttctgaacgttacactgcccatgatttccaaaaggcccccaagacagtggcacaatggaggaaactattatctctctacgtcaccgacgttctcaaaggctctccaattcttgttattcagttgacgtggcttgccgacggcgctgcagctgtcggcgtcggtataaaccactgcttctgcgatggcatcggcagtgccgagtttctcaattatttctcggacttagcatcccataataataacgtgagtgtcgatcccaaacctaaacccgtctgggatcgacagctcatgaacccggacggcagaactcgggcgaacctggctatgcacgccgagtttgtccgggttccggatttgtgcgggttcatgaaccgtgtcacgagcgggctgagaccaacttgcattgtgttcgacgagaggcggatcaacgcgctgaagggcgcgtgcggaatgtcgtcgtacacgtcgttcgaggttctggcggcgcacgtgtggaggagttgggcgagggcgatggggtttcctaaaaaccagacgctgaagcttttgtttagcgtgaacgtgcggaagcgcgtgaagccgggactgccggaggggtattatgggaatgcgtttgtgttgggatgcgcgcagacaagcgcgtgggagttgggggagagaggggtcaggtacgggtcgggtctggtgaagcgtgcgaaggagagggtggacagcgagcacgtgcggagggtggttgagttggtctccgagtcgagggcgagtcctgactcggtgggggtgctgattctgtcgcagtggtcgaggctggggcttgagagggttgaactcgggatggggaagcctctgcatgtggggcccatatgctgtgataggtactgtttgtttcttccggtgaccggtgaacgggcgagtgtgaaggtcatggtggctgtccccaccaccgccgttgacaactttcaccgtttcctccgggaatcgaatttatgacccaaccacaccctactaggttacgtcacgttgacctctgtaattattcttcactagttcctgtgctttttgtttaacaaaaataaaataaaaaacaaacaaattattcctaaaaaaaaaaaaaaa

SEQ ID NO: 2988 - DNA, 1174 bp, Glycine max
aaaaaatagaaaaaccaaagcacaaaaaacacatgtcttaatagaaaagtcggcaacgattgatggtttgtcacaccaccgaagaaggcttcaggaatctacatagctttttcctcagagcgttgaaaattcccagactctctcgcttcctcaaaatttcgccctctttcattcaattctcttctctgctcttctcttctgttcccaccttctgatccatcatccctcgttttctccgaacaatggctgctggtgtcactgtcaagtccgaggttctagaatcttctccccctgaaggagtatgttccaacacggaggaaaaccacctggttcagaccaatttgtctgatgggtcacccaacaagtctgtgccagcatctggacttaatgcagtgattcctagtgcaaatcagcttaccatcttctataatgggagtgtttgtgtctatgatggaatccctgcagagaaggtgcatgaaataatgcttattgctgctgctgctgccaagtctactgaaatgaagaagattgtgacccaaactaccctcatttcacccgttccctctaggccttcttctccacatggaatcactaacaatattgcttcctcgcagaagagttccatctgcaggctccaagctgaatttccaatagcacgcaggcattcacttcaaaggtttcttgagaagcgtcgtgacaggcttgggagcaaggcaccttatccttcctcatcaaccacaaaagtggctgacaacatagagaacaacttctgtgctgacaatgcaccagaactggtttccttgaaccgatctgaggaggaatttcagccaacggtctctgcctcttgagcataaccagtgtttgctccgttctatgttgtgtgatagtgtggaagactatgagtatgaatgtagaatcacagacactgatgtaattgtattaggttatgaagtctgtaactgtgttttatatgtaacatagctactaaacctgaaatggtctgtaacagtgtgacttgaaagttgtgtgcatctgtccacgtctaggaagtatgctatgtgttttgatcactctatagtaaactgttattcttgtatgagactatgtggacaactgattatctattgtgttgatgttccaacttctatttttattacaccgttgccccctcccc

SEQ ID NO: 2989 - DNA, 936 bp, Glycine max
  misc_feature (580)..(580): n is a, c, g, or t
  misc_feature (927)..(927): n is a, c, g, or t
agcgtggtcgcggccgaggtacgcggaaagaccctagattcttaagagagctcgttcgtcatttttcgtgcctcaaatctttacaatcgataaccacacccatcgcctttattcagaatgtcggaatcaccattcagaccacgagaaaagcttgctgagaagcaaaaatattttcagagtatccacaggcatacctacttgaagggacccatggataagattacatccgtggccataccactggctttggctgcaacgtcaatttacatgattggacgagggatctataatatgtcgcatggaattggaaagaaagaataacctgggaatttctgattgaggagggtttcccacacaaacctaccttagcttcgttaatatgggccagtggttttctttgcatttatgtctgttctcttaataaattgcttagttgcagattttgactgccattgggggtttataacttgaatgaaagttgttctttgtatgtttgatataatcaaattgagtgaattggctcaaactgctgttttctgtttctggtttagtacttgttccgtgttactgttccatctangtcatgcttctccttgcgagggccaatggaacgaaaacgtacgttaaggagataattcgttgtttatatttaaatttagagctctcagttccccttttaaaatatcctctggcaacgtgaatgtataatggcccaacatattgatatgcccgtgcatcaggggagatagccgagcgatatcttcatctataatttcttcgccattacggcgcatccagctcaacgcttcctccatatagagcgtgttccacagaaccactgcattagtaaccaggcccagcgcccccagttgatcttcctgcccttcacgataacgctttctgatctctcccgcgtgtccgtaacanatcgcacga

SEQ ID NO: 2990 - DNA, 855 bp, Glycine max
ccacgcgtccccgcggctgccggccgcaacaacacgcctacacacattcctcccagactcggaacagcaacgttgtagagggagacttttgggggagagtgagtgagagtaaaaagatgtttctgcgtgcggtggcgcggccgttgatggcgaaggtgaaggcttcgacggggatcgtggggctggacgtggtgccgaacgcgagggaggtgctgattgggctgtacagcaagacgctgaaagagatccagaaggttcccgaagatgaagggtaccgcaaggccgtggagagcttcaccaagcacaggctcggcgtgtgcaaggaggaggaggactgggagaacatcgagaaacgcctcggctgcggccaggtcgaggagctcatcgaagaggctcaggacgagctcaagctcatttcctacatgatcgagtgggatccttggggtgttccagatgattatgaatgtgaggtgattgagaatgatgcaccagttcccaagcatgttcctctccaccgacctcctcctctcccaacagaatttcacaagacgctagaggcacttacagggaaagatactccggctgccagctctagtgaatcaccctcaaaggcatgaattgcatccacattagagctttggtttctcaatgagtatatgcttcttttctttgtattgaacttgtttgcgtgaagtagtttcagactcctaaataacaagaatggtatggaataactagaattatgcatgaaatgactttgttctcagatccataattaataatattcagaatttctgtttgatctaaaaaaaaaaaaaaaaaaaaacaacaagagggggcggccgctctagagga

SEQ ID NO: 2991 - DNA, 1423 bp, Glycine max
ttttttttttttttttttttttgttgtttttttttttttttttttttttttgtgtactaataataaaagaataaagttcaggatatttgactgtaagttttcccttcttgtacatcatatgatttaacacattaaagaacgtaaaatgagcattgcttttgtatccacataagattaacttatttggatgtgttttctaaaagcttctgcaacagggatttaacttggtttcatcagcctagcgaagacttctaagcccttattttctcctctaaggctgaaaattagcatgtattgcaaaaactaaaaaaagaaacggaacagttacattgtacaaggtagagtcacatgggaaacacttgaagaattaggacaccgaccagcataaaggaatcaaacaaaaaagaaacaacctcatatttctgggggaagacaaggctgttaagtaaattttgcagttagtaaggcttgttgtaaaggccaagcaagggtttctccctctcctgtactcttttccttgcagcctctcttgcctttagagctgctttttcttcatcagagataaccttggatttttcaccaggtctctttctctttccaaccgcaagagatgaaggagcagctttcacatttcttttgggattcaaagaagttgtaacaactggccctggtgaagatccattattaaacttatttcctttgttttcatctgatttggactgtgatgttgacaaggatttctttgcagttggtccattgtgcccggcattagatgtaaagtgaggggaggcatatgcttcttcctgtgtcacccacttgccaatggcatcagagtagtaaaatcctgacttttggtcatagtaaaatccatttgttttatggtagtaatagcctgtactgctgtcaaactcccattcttggtcatccaattcatgtgattctctcgtctcctcaaacttcactttatccttttgatagctacgttgcgcttttgcttcaatttgctcaatggcacgagcagtttctttctgttctttctccttagcaatattctcttttctcatagcagccaacctcttggaaacattatctttgtgacgttggccaagctcatgattccttatgcttccagggttgtttgatatataaattttgcaaaagtcgcaccatttgttgccctggctgacccagtactcagtcatggtagaatattagggttggaaatcgatgcggcaagaattgaaaacgaattgaaactgagaagagaggctaatcgtgttattgctgggaagtgctaataaatctcttcaaatttttttcaaaaccctccaaaaagcagagcaaagagttcgggaacaaaacaatgtcagacttctctagacgagagagaaagagagaggcgccaattttgctgtccaaatat

SEQ ID NO: 2992 - DNA, 1629 bp, Glycine max
tctcagctacgtaggcccccccccccccccatgttttcaaagatttgtaagaaaaaaactgaaaacaactttctttttttctctgtacaaaatggagatcactagaataggccaatggttaagtcttctgatatgtgtactactattactgcagacagaaggggttcctgtgggaatcacttttgttgaaaatgcagtggcaaaaggggctgtttgtttggatgggagtcctccagcttaccacttccacaagggatctggagcagggattaacaactggatagttcactttgagggaggaggatggtgcaacaacgttactacttgcctttcccgtagggacactcgattaggttcatctaagaaaatggatacatcactttccttttctgggtttttcagtaacagtaaaaagttcaatccagatttctatgattggaacagaatcaaggttaggtattgtgatgggtcatcatttactggtgatgttgaagctgttgatccgaaaaccaatttgcacttcagaggagcaagggtttttgctgtggtcgttgaggatttattagcaaaaggaatgaaaaatgctcaaaatgcaattatctccggatgttcagctggaggattggcttctattctaaattgcgatcgattcaaatcactactacctgcaacaactaaagtgaaatgccttgcagatgctggtttttttatcaatgtaaaggatgtctctggagcacagcgcattgaagagttctacagtcaagttgttcaaacacatggctcagcaaagaatttgcctacatcctgcacttcaagactcagaccagggctgtgctttttccctcaaaatgtcgtgtcccaaatcagtaccccaatcttctttgtaaatgcagcctatgactcatggcagatcaaaaacattttggcaccaggtgctgctgatccccgtggccaatggcgtgaatgcaagcttgatatcaaaaactgctcacctaatcaactcagtgtaatgcaaggattcaggacagatttcttaagggcatttagtgtggttggcaacgccgcatctaaagggcattttatagatggttgctatgcacactgccaaactggaatacaagagacatggctgagaaatgactccccagtggtggccaagacatcaattgcaaaggcagtgggtgattggttttatgatcgaaggcccttccgtgagatagattgtgcctacccttgcaaccctacttgccataatcgtatttttgatcagaatgagcgtccagacgtatagattcatttaaaagagtatgcttatttatttattactacaaactatactttattagttatctagtttttattgaacgagatgtgtcacttgcactcatggctttgtggtttgagatctcaaaccatcaaagtatgggttcgattgttgcatcaacaaaaaacaagctgtgattgatgatttaaaaggttccaaagtgtaagggtaggcaacctgataaaggatgataattgtctaccatgtaaacataacatttttattatcaataaagggtatatctgtaattctaataaaaaaaaaaaaaaaaaaaatttttggacgaaaatagtcttgtaggccga

SEQ ID NO: 2993 - DNA, 1078 bp, Glycine max
attctttccctctcgcaataaagattcactggtgttacgcgttaacatccactctattaagcaaatgtgctcctagtagtacaataaaaatataaaataaaataaaaataacaaatatttatataagatataagattgtgttcttgcaagttccaagttccaagttcatgcacaaccgatcttttcctctgagaagacgtgtcggtagctgaagcattttataagcctccactttcctgaactagttttaacatacaatctttcaagtacacctccccagcttccatttaagaatggagatcactagaataggccaatggttaagtcttctgatatgtgtactactattactgcagacagaaggggttcctgtgggaatcacttttgttgaaaatgcagtggcaaaaggggctgtttgtttggatgggagtcctccagcttaccacttccacaagggatctggagcagggattaacaactggatagttcactttgagggaggaggatggtgcaacaacgttactacttgcctttcccgtagggacactcgattaggttcatctaagaaaatggatacatcactttccttttctgggtttttcagtaacagtaaaaagttcaatccagatttctatgattggaacagaatcaaggttaggtattgtgatgggtcatcatttactggtgatgttgaagctgttgatccgaaaaccaatttgcacttcagaggagcaagggtttttgctgtggtcgttgaggatttattagcaaaaggaatgaaaaatgctcaaaatgcaattatccccggatgttcagctgggaggattggcttctattctaaatttgcgatcgattcaaatcactactacctgcaacaactaaagtgaaatgccttgcagatgctggtttttttatcaatgtaaaggatgtctctggagcacagcgcattgaagagttctacagtcaagttgttcaaacacatggctcagcaaagaatttgcctacatcctgcacttcaagactcagaccagggctggtaagtttgggaatttacgtcttctacctttgtggcttcttt

SEQ ID NO: 2994 - DNA, 727 bp, Glycine max
  misc_feature (611)..(611): n is a, c, g, or t
  misc_feature (654)..(654): n is a, c, g, or t
  misc_feature (670)..(670): n is a, c, g, or t
  misc_feature (701)..(701): n is a, c, g, or t
aattcggctcgaggtacacctccccagcttccatttaaggtatatatagcttataagtgaacttcatatacatcttctttatattaatttttgctttgtttcttttttcccccatctgtagtttgtggggctagaagtttctatttctgggcattcagaagattgcaggaaaagttatcagctttatttccatattgaacagagttgttgatctagaatggagatcactagaataggccaatggttaagtcttctgatatgtgtactactattactgcagacagaaggggttcctgtgggaatcacttttgttgaaaatgcagtggcaaaaggggctgtttgtttggatgggagtcctccagcttaccacttccacaaagggatctggagcagggattaacaactggatagttcactttgagggaggaggatggtgcaacaacgttactacttgcctttcccgtagggacactcgattaggttcatctaagaaaatggatacatcactttccttttctgggtttttcagtaacagtaaaaagttcaatccagatttctatgattggaacagaatcaaggttaggtattgtgatgggtcatcatttactggntgatgttgaaagctgttgatccgaaaaccaatttgcacttcanaggagcaaggggtttntgctgtgggtcgttgagggatttattagcanaaggaatgaaaatgctcaaaatgcat

SEQ ID NO: 2995 - DNA, 1158 bp, Glycine max
tacggctgcgagaagacgacagaagggcattcagctacgtaggccccccccccccccaaatttaaaaccctagtcgccgttgccatccaaccatcttctgtttaccgtcgtcgtcgtcccgccgttcctctgccgtcgtcgcacgaacacccagcagagagcttcgaagccacgcaggcgggaacgaccagccatcccagcgtcgtcgttgcagtcggaaggttgcaccacaccaggccgtcgcgttgtaaggttccaagctttttagacagctgacaagagacaacaagatatggcagagaagagcaaagagctgctccagtttgagcataaaggcacacccctttcttccttagaatccactcttcttgtttgtgataataaaaaagaatcagacacacaaactaggagactcccccctcatggcacaccactcactgccccacatcccccaagccaacttttagggaaggttaaagacttcctaggagtgatgtcagaagcaaataagaggcttgaacttgatgcaaaggacaatcctgagaattatgatattgaagagctaactggaaatgaatcggaagttattgaaatggatttgatgcttggtgtagctgatcttcatacaccagaggcagtggctgctgctgaatctgcaatttccacttgtcagcctgtgattccattggctgctgatggtagtgaaacagattcagaggaaagtagtactgatgatgactgtggggatgatgatattgaaagcagtgatgattatcacgacgatggaaacaacagtgaaaagccttcatctcttgttcaaaaatctatttccagtaaggataatattcaggaaaaacaaaagggaaatgttcattccaaaaaacgtccaagaatagttgagctatcttgagcataacaagattttgaggattagatctttatgctataacaatttactgagattattgcgaccagtctagttggaattttctgtatgatttatgctgcgttaaattataaccaatgtatctacgacctctatgtcaggggcagcggctggtgaagtaacaagacttgctacttggctttattgtagcgttctcttaaaaaaaaaaaaaaaaaatttaaattattgcgtaggtgcattaagtttctctt

SEQ ID NO: 2996 - DNA, 1297 bp, Glycine max
  misc_feature (566)..(566): n is a, c, g, or t
agttttaaatttgagctggttattgctttgttgtttctttgtaaagggttgaatggttctcatcatgtgccaagagatcatttgctgctgtcaatgagctttctccatcctgattctccaggtggtgtggtgcactctttggattgatccgtcattttttccttgtcaaggagactcatgagatgagacaattaattttccctttgtaatgttggaattggtattattatttgtaaggcctcatttatatatgggtataaatgctggcatgagggaacaagatgttcaatgaccttcatcacagaaagctgctattttgccacttcttattacaggcatgggaaccaaaattgaatattccataaatcttctagcaaccttagtagacagcaacaacttagcagtgggtggagtggatgtctgggagcattttcagaacaagcatcaaaggactggaatcaataaattgcaaggtcccatggataggatgcttgacagaaacaatgtagaatccatcaaaaagacaatgcagatgcaagaggacatcttcaaacaccaggtaaganagctacaccgtgtatacactgtgcaaaagatgctgatggatgatctcaaaaacgaaattagacaacagaaaatttggaaccacacgaatgacataaatgtaagccatccacattccattaaacagcaacatcaaacaacacagatttcacaccagcctgatttccacgttcagaatttgagaggaggaagaggttttgatcttgaaaggtctgctgctgaggaagacatttttacccaagtgcgtggcttcgatgaaggtgaggcagggcctagctcccacactgcacttcagagttgtaaaacaagtactagtggatatgatgaagaaatggaagtggatttgacactaagtataggagttagccaagttaagaagaactctcacttaccacaattagcatgctcaaactcaaccaataatggagaaaccagaaagctgaattcacctgcctccttcaaatcagatagaacaggagaatgcagtgaccccacaaccccaatgagtagctccactgtgacatttactcagcaaagaaaggggacacattggctttctcaaggtctaaagcttaaatagcactataatagcttgattgtatcctttcaactctacatggaccaccgaatttgtatggttcatgcattcagattcctagattactttctactttatcccaataataataaatgaatagcttatacaccctaaaaaaaaaaaaaaaaacccgac

SEQ ID NO: 2997 - DNA, 2237 bp, Glycine max
atcaatccatccgtcacctagtaaccaggttctgcaaatttcgccacttgcagatgaaaagttctaaactttcccctggttaaatcctaaccccagttttcttcctctcactttaagcactccccaatttgacaattttcccctctctcctcaaaaggggtgtgagccactttctctctcctcaattggggtgtgaaagtttctaccttttttcctttctatttttccattatctatgttagttttgcattgtgtgttgtttggcttgcaatcttgttgcatgctggttgttggtgttggtgtcccaattcactctcaaatttcagggttcttagaactagtaggaccttgcgaccatggctgccaaaaaggcatgtgagacattctcaaagtccttgattgaggaagtgcatagatggggttgcttgaagcagacaggggtaagtctcaggtacatgatggaattcgggtccaaacccactgacaaaaatttgttgatctctgctcagtttcttcacaaggaacttgccattagaattgccagaagggccattgagcttgagaatcttccctatggtttgtctcaaaaacctgctgttttaaaggttagggattggtatgtggattctttccgtgatctcagagccttccccaacatcaagaatgtgaatgatgaacaagatttcactgaaatgatcaaggccatcaaagtgaggcacaacaatgtggtacccacaatggccttgggtgttcagcaattgaagaaacgtatggatccaaagattgtttatgaagatcttgttgagattcatcagtttctagaccgcttctacatgtcaaggattggaatccgtatgcttatcgggcagcatgttgagttgcacaatcccaatcctcctccccatgttgtgggctatatacatacaaaaatgtctcctgtggaggtagcaaggaatgccagtgaggatgcacgtgctatatgttgtcgcgaatatggaagtgcccctgatgtgcatatttatggagatcctgattttacttttccgtatgttccagctcacttgcatcttatggtatttgagttggttaagaactcactgcgtgccgtacaagagcgttttatggattctgataaagttgcacctcccattagaataatagttgctgatggaatagaggatgttaccataaaggtctcagatgagggaggtggaattgcaagaagtgggttgcctaaaatttttacatatctatatagtactgcgagaaacccattggatgagcattcggatcttggaataggtgataatgtgacaatggctggatatggatatggtcttcctattagtcgtctatatgctcggtattttggaggtgatcttcaaataatctctatggaaggatatggcactgatgcatatctccatttgtctcgtttgggagattcacaagaacctttgccctgaaagtacttttcagtcagagttaccttaagtaactcactaacattgtgctaaggaaaacacttgttagaataaaaaagtactatttgctgtcaatttttacattctaataatttgacagatttcctgtaaatatgtggtacataagattgtgcatggtgatgccccccttctttgccttcagatccagctttgggaatttgtcctttttatcttctgaaaaaaaatgaatatgctcttttatcctaaagaattgatgcatatgggggattaaaggtggagatattccacatgattttaaaataaacaaggtcatgctactgtgacttagcatgtgccttttattgagttggggaccaattttgtgtggttcagcagcaatccaaataaattgcatctaggtccctcttcaggatcaatttgtcactataacttgtcttcttccatttacaatttgggcaaacatggtcaccattccaacatcagcagggttatttattactatgatagcatttgataacaagtgactgtaaaatgggcttttgcaaaccaaatgcatcttaagcaatcatcttaatgcctctttgtttaaaattcttgatgcaaatgggaaaattgcgtttcctgcactttttaacagaacacacagtaacatggaagtgtacacttgccaaactataagagaagaaaataatatggagtatttttttagtgcttaacttttatagaagtttttgctgctatgttttttttttttttgaaaacaagtgattt

SEQ ID NO: 2998 - DNA, 1119 bp, Glycine max
acggcttcgtattgtcgtatcgcttcgctcccttgggttagggttttaattgtgtcttctcggaaagcaaactagggtttgtttgtgtggcagaaggaggaatgggaaggtatcgtagccggagcagaagctatagcccccggcggcgaagcagaagcccaccggcaccgcgcggacggaagcgctatgtcgacgatcgctacggtgacagcaggtcttacagagaccgccgctcacctcttccttccggcttgcttgttcgcaatctcccccttgatgccaggcctgaggatcttaggatcccatttgagcgctatggtcctgtgaaggatgtttatctacctaaaaattactacactggtgagcctcgaggctttggatttgtgaaatatcggtatggtgaagatgcagctgaggcaaagcaacatctcaatcatactatcattggtggacgtgaaataaggattgtttttgctgaggaaaataggaaaacttctcaagaaatgcgtgttaatactcgaggaagtggtcgacatggaggtggtagaaggaggaatcgtactagatccccacgaccccgatcctattctcggtctccatcaccagctagggatgattcaagggatggcaggggtagggatgattattattctcctgagcgatcaagatcttattctaggtctctctctcccagtggtgggaaggactacaagaagtcccctcgtctcagggagaatggtcggagtcctaatgacaagaaggatcagacaccccgcagatccgagagtcctagggacaatgattgcagtccttcaaggtctcattcacggtgatacattccacgctgatttgcgagcaagcagagattggaaggtggtcaattcggtttttcctgtgaccacacactgtatctaaaactttgacattttgaaagatacaaaaatgtagctaagccaagtctgtgatgtttatattagtattcggtaggtgacaacccatcagaaggtagtttgacttgtgtcattttggatgactttttcatcagtttacaaatttttggataaaaaaaaaaaaaaaaaacatgaatcatgtcttaaaaaaactcgagactagttctct

SEQ ID NO: 2999 - DNA, 1916 bp, Glycine max
ctcttctcgtttctctctcctccctcgaagctcagctccagcttggaggagggtccatggtccactttctggatctcaccgtcaccgccacaccttcttctcaatgctcctccttcattctttctccttccccgtgactcacccgcgcgggaagatatcactccctccccaacccattcatttcgatctccattctccctgatactcctctctctctctctctctctctctctctctctgtgtccgagttctagggttttgcggatagaaggataacacacttacacggcgtcgtttgatttgagggcggcgcaagatgccggggcaccgctcgaaatcggagaagcatggcggcggcggcgagaagccgctccggcgggacccctacgaggtcctcggcatctcgcgcaactccacggatcaggaaatcaaaaccgcctaccgcaaaatggcgctcaaatatcatccggacaagaatgcaaatgatcctaaagcagctgatatgtttaaagaggctaccttctcttataatatcctgtcagatcctgataaacggcgtcagtacgactcagctggctttgaggctgttgaatcagacaaccaagagttggagttagatctttcaagtttaggtgctgtcaatacaatgtttgcagcactttttaagtaaacttggggttccaattaagacaactgtatctgcaactgttttggaagaggcactcaatggtttagtgaccattcgaccacttccattggctcagtaggcaccccccccggttgagaagcaatgtgcacacttctattcagttacaataacagaagaggaagcacaagctggttttgtttgtcgagtacaatcgccagacaaaagcaagttcaagttattgtatttcgatcaggaagacaacagtggtttaagtcttgcactccaggaagacagtgcaaaaacagggaaggttacctctgctgggatgtattttcttgggtttcctgtttatcgattagatcaaacaatgaactctatagctgctgctaaggatccagatacgtcatttttcagaaagctggatgcgtttcagccctgtgaattaacagaattgaaggctggtacccatgtatttgctgtttatggtgacaactttttcaaaagtgcaaactatacaatagaagccctgtgtgctgcaccttttagtgaagaaaaagaaaatttaagaaacatagaagctcaaattttgtctaaaagggcagaaatatcaaagtttgaggcagaatatcgagaggttctggcacaattctcagatatgacaaacagatatgcacatgaaatgcaagcaattgatgagctactgaagaatagaaatgaaatacaggcatcatacaccagtgctcctttaaaacgaactacaagtaggagcagaagtaaaaattcttccaaggaggcaaaagaagatggccaagcaaaggaaaagaggagtacaagagaacggccaaagaagaagaaatggtataaccttcacttaagagttgataagagaaaggcttgctaaggtgagaattggacaattaagttcttctgtcactcatgtattgatataagtaatgaattgttttattatttggttgtcaactctgaattccacggtaaaattattaccagtttatctgcacccttttgattgtttagcacttgtgcaagttaataggaaggctttgctaaagcaacaacaaccaaatgaagtggaaggtttcgtttatgtctgtcactcaagcatgtcaaaaatgacaagtcctcattgtttatgtataatcccccttccccccttttttatttgtctctcagtagctcatcttcagaattcgtacttgtaaattgtttgctttattgaggaagcacgattaactcttaagggtga

SEQ ID NO: 3000 - DNA, 909 bp, Glycine max
tcgagctcgttttctctctcctccctcgaagctcagctcagctccagcttggagggtccatggtccactttctggatctcaccgtcacccccacaacaccttcttcttcctaatgctccttcttcattctttctccttccccgtgactcacccgcacgggaagatatcactcgctccccatcccttccatttcgatctccattctccctgacactcctctctctgtatccgagttctagggttttggggatagaaagcataaaacacgtacacgacgtcgtttgatttgagggcggcgcaagatgccggggcaccgctcgaagtcggagaagcacgacgtcgacggcggcggcggtgagaagcagctccggcgggacccctacgaggtcctcggcgtctcgcgcaactccacggatcaggaaatcaaaaccgcgtaccgcaaaatggcgctcaaatatcatccggacaagaatgctaatgatcctaaagcagctgatatgtttaaagaggttaccttctcttataatatcctgtcagatcctgataaacggcgtcaatacgactcagctggctttgaggctgttgaatcagacaaccaagagttggagttagatctttcaagtctgggtgctgtcaatacaatgtttgcagcactttttagtaacttggtgtgccaattaagacaactgtatctgccactgttttggaagaggcactcaatggtttggtgaccattcgtccactgccattgggacataatatagctaaaagggttgagaagcaatgtgcacacttctattcagttacaataacagaagaggaagcacaagctggttttgtttgtcgagtacaatcgccagacaaaagcaagttcaagttattgtatttcgatcaggaagacaacagtgg

SEQ ID NO: 3001 - DNA, 1390 bp, Glycine max
  misc_feature (18)..(18): n is a, c, g, or t
  misc_feature (26)..(27): n is a, c, g, or t
tgcttagagcataagcantcttcganntttatgacacaacccgaaggaaggaagggaatgaatgggatggtaagcgaagttgccagagacggttaaagctttctcatggctactacctttaccctcgcaacgctgtcactaccgtcgtcttctcgtgtttccattggcggagctccgattcgccaccaccgttctccgaaccggatcgggttgttgccgcctctcaaatgctcctcttcggagccggaaaccgccccgcctcctcccttcgactggactcacaagttgatcgccggtgtcgccggcgtcggattcctcgaaacctcgtacctcacttaccttaaactcaccggcgcagacgccttttgccccgtcggcggcggcacctgctctaaaatactcgacagtgattacgccctcgttttcggtattcctcttcctctgattgggatggctgcgtatggcttggttgctgcacttggtgttcaattggcttcgaagaattttcgttttgggattgagaaaccaactgctgaagcagtgttgcttggagccacaacctccatggcagctgcaagtgcgtattttttgtacattctaaccaccagattctctgactcgtcttgctcctactgcttactttcggctttcttgtccttcaccttgttctttgttacactcaaggatattggattgcaagaggtgtctaaacaactgggtctgcaactgcttgttgctagcttagtgattctctcgctgaacgcatcctatagcaattcaaaatctgcctcctcaagcctggctgaaaatgatcttccatattttgcaactgagattacaactccgtcaagccctttcgcactatctctagcaaggcatttgcactccataggagctaaaatgtatggtgctttctggtgttctcactgtcaggaacaaaaagagatgtttgggcgcgaggcagccaagcagttggactatgtggaatgctttcccgacggatttcggagaggaactaaaatgatcaaggcatgcatagatgccaaactagaaggtttcccaacgtggattattaatggccaggttctaagtggtgaggtagaattatcggagctggctcaagtttctggttacgaagaatctgttcaaccttaaggctgattgagcaacaaatgtagcattgtagaatttgtagtagcacatacattattgtacagcttatagatgagtcgtttgtcctctgtaggcgtatgtgacgttatggatccgtttaatttgcatatatttaagggacaagacaacacaaactacttgatttaaaaaaaaaaaaaaaaaaaaaaaaaaaaaaagcggccgctctacaggatccgagctaggtacgacgcgtgca

SEQ ID NO: 3002 - DNA, 2787 bp, Glycine max
  misc_feature (2765)..(2765): n is a, c, g, or t
ccacgcgtcctgaagaaacagtggtcgttctctctgaaatgggtttcgctttggcatacacagcatctggttgttgctcaaacctacaatttcagtctctgttattcgctgctgcttcattgagatcaaaaccgtgtctctctctctgcaactctacttatcgacccaaacgcattctccagcgttctccaattgttggcgctcagtctgaaaatggagctctggttacttcggagaagcccgacactaattacggaagacaatacttccccctcgctgctgttgtaggccaagattctataaaaactgctcttttacttggtgcaattgaccccggggttggaggaattgccatatcaggaaagcgaggaactgccaaaactgtaatggcacgtggattgcatgcaatactgcctcctattgaagtggtagaaggttccattgccaatgcggatccaacctgcccagaagagtgggaagatggtcttacagaatgcctggaatatgattctactgggaatattaaaactcgtattatcaagtctccctttgttcagattcctcttggagtcacagaggacagactcattggatcggttgatgttgaggagtctgtgaaaacaggcacaactgttttccagcctggcttgcttgcagaagctcatggcccccccccccatgttgatgaaattaatcttttggatgagggtatcagtaatttgctccttaatgtattgagtgaaggagtaaatactgttgaaagagaggggatcagtttcaagcacccttgcaggccccttctcattgccacctataacccagaagagggtgctgttcgtgaacatctgctggaccgcattgcgattaatttaagtgcagatcttccaatgagttttgaaaaccgtgttgcagctgttggaattgccacagagtttcaggagaacagtagccaagtatttgagatggtcgaagaggaaacagacaatgcaaaaactcagatcatcttggccagagagtatctaaaagatgttactctgaacagagaacaattaaaatacctggttattgaagctttacggggcggttgccagggacatagagctgagctatttgctgcccgtgttgcaaagtgcttagctgctttggagggacgtgaaaaggtttatgtggatgacctaaaaaaagctgtagaattggtcattctaccccggtcaatcgttactgagaacccaccagatcaacaaaaccagcctcctccccctccgcctcctccacaaaatcaagaatcaggcgaagaacagaatgaagaggaagaacaagaggatgacaaggatgaagagaatgaacaacagcaagaacaattacctgaagagtttatctttgatgctgaaggtggcttggtagatgaaaaactcctcttctttgcccaacaagcacagagacgccgtgggagggctggaagggcaaaaaatgttatattttccgaggatagaggccgatacatcaagcccatgcttccaaagggccctgtaaagagattagctgtagatgcaacccttagagctgctgcaccttatcaaaaattgcgaagggcaaaagattctggaaacaatagaaaggtatttgtggagaaaacggacatgagggcaaagagaatggcacgtaaggcaggagcattggtgatatttgttgttgatgcaagtggaagcatggcattgaacaggatgcagaatgcaaaaggtgcagcacttaagcttctggctgaaagttatacaagcagggatcaggtatctataattccattccgtggagatgcagctgaagttctcctgccaccttctagatcaatttcaatggcaaggaaacgtcttgaaaggcttccatgtggtggagggtcccccacttgctcatggtcttacaacggctgttagagttggactaaatgcggagaaaagtggtgacgttggacgtataatgattgttgcaatcactgatggcagagccaatatatcattgaaaaggtcaactgaccctgaagctgccgcagctactgatgccccaaaaccttcagcacaagaattgaaggatgaaattcttgaggtggccggaaagatatataaagcaggaatgtctctccttgtcatcgacactgaaaataagtttgtctcaacgggttttgccaaggagattgctagagttgcccaagggaagtattattatctgccaaatgcttcagacgctgttatctcatcggcaacaaaggaagctttatcagctttgaaaagttcatgaaaccttgtaaaagtaaatcagccaaacttgatttcttccccctttttgtcgtaaatgttaatgtaaatcattcaactatctatgatgggaagaacgcatattgtaatagccaagagcaattttgaatcataccgatgctaacaaaccatagacatgataatgatcaatgttggctaattccaaaagatttaggctgagcacttcaagatttaaagcataattaccactgagaagttctaagatactctcaactgctgaaattcaacttcaaaattgtcaaataattctatgtggcgcattgatatttctatttttaaagcataattcttctcgatgatattcttcaaaccttatccaatgtaacagtaatttagatttattcctatttctactaatcttgccatgacgaccaaggttataaagagaatgattgttaattttagagggtttaggttacgcacatcgcgactcanaaattttaaagcataattacaa

SEQ ID NO: 3003 - DNA, 827 bp, Glycine max
gccctttttatatttttttttttttgataataaagagaatccattttccattaaccaaatagcaggcgaaaagagtgaccaaattagcatatgctgaacttgttggatcttagagagaacctatacatgatgacattgattacattataacatagtaaaaagtaagcaaagaaagacaatggaacgtgatgaaaatcagccaaagaatgcagggtcatagccattgctagtggtggccaagatatagtaagcaacaacatggccaatggagccccaagccaagacatcaacaatgttgaatccaacagggtcattggatttgaggaggctgacatactccttggcacgtgtgtcaccagcctcaaagtgtgtgagtccgttctgctcaggcacttgctttgccacgttctccctttggaagttgaagaacacaaacctccccaagaagagggagagcccagtgctgaggcttatgacaagtgctgagttgagttcagctctaacaccgacaccaccctttggaataacccttttggtggtgctgctcactttggttgtgaaccttgtgaggggtctaaggccttgaaagcacacgttggatggcttcaaatgatggtgcttttggatgcttgtgcttggagataaggctggtgttgatatcatggtggatgaggccgaggctgctgccattttggtttggttttgtggaactaaaaatttttagagtttggaaaaagaggtaatagcaaagatgatgagagagaattgtgtagaattttacccaatcactctactttcttgtatgataagtattcaatgcattttat

SEQ ID NO: 3004 - DNA, 939 bp, Glycine max
aaactagcatgttttttttttttttttttttttttttttttttttttttaaagagattccaaattcaatacgtagagaagtcccattttccattaatcataatagcaaaccaaattgcagccgaaaatagtgatcaaattagcatatgctgaacttgttggatctttagagagaacctatacatcatgacattgattacattacatactaaaaagtaagcaagaaacacagttggaacaacatgatgatgaaattaaatcagccaaagaatgcagggtcatagccattgctagtggtggccaagatgtagtaagcaacaacatggccaatggagccccaagccaagacatcaacaatgttgaatccaacagggtcattggatttgaggaggctgacatactccttggcacgtgtatcaccagcctcaaagtgtgtgaggccgttctgctcaggcacttgctttgccacgttctccctttggaagttgaagaacacaaaccttcccaagaagagggagaggccagtgctgaggcttatcacaagggctgagttgagttcagctctaacaccaccctttggaataacccttttggtggtggtgctcactttggttgatgaggctttggtgaaccttgcgaggggtctaagaccttggaagcacacgttggatggcttcaaatgatggtgcttttggatggttggagataaggctggtgttgatatcatggatgaggctgaggctgctgccattttggtttggtttggtttggtggaactagaaaatttggactttggaaagaggtaataacaaagatgataagagagaattgtgcagaatggagctagaagcgtagcatatatgagattggatcatatactatgaaaagcggtggtgggagagaaagataagatgcattgtgattgtaagccatggaattt

SEQ ID NO: 3005 - DNA, 753 bp, Glycine max
  misc_feature (712)..(713): n is a, c, g, or t
ttcggctcgatcttcgtcccactcgcaacacaacaatgctgttactccacgcgccaccactaccttttctgagaacattgcttcatttccctcttaatagtattcatcattcttctcgcgctttctcctcactatctcacttcacaaaacccttttctgtttccaatcgtttctcctcacattctcgccgaagctcactccaaatgaacggagaaggcctcgccgccgacgactcctcgccggatcacgtcaccaaagactggtactccgtgccggagctccggttgcgcgatcatcgcttcaaggttcctctcgatcactctctgggaccccattcttctcccaagatcactgttttcgctcgtgaagtcgttgcagttgggaaagaagagaaaaacttgccatacttattatatttgcaaggtggacctgggtttgagtgcgggcggccaactgaatcaggtggatggactaaaaaagtctgtgaagaattccgtctcatcttaatggatcagcgaggaacaggcttatcaactccgttgactgtgtcatcaatgtcacagttcaagtctgctgatgaattagctgacttcttaaaatatttccgagcggataatatagtaaacgatgcagagtttattcgagtacgccttgttccagatgctggtcctgggacaatattggaacagagcatgtgggggaatttttgagnncacaatttatgtgagttttgcaccacagggactgaagcag

SEQ ID NO: 3006 - DNA, 726 bp, Glycine max
ataatattcatcattattctcgcgctttctcttcactatctcacttcacgaaaccctattctgtttccaaccgtttcatctcgcattctcgctggagctctctccccccaatgaacggagaaggcctcgccgccggcgactcctcgccggagcacgtcactggagactggtactccgtgccggagctccggttgcgcgatcatcgcttcaaggtccctctcgatcactgtcggggactccattcttctcccaagatcaccgtttttgcacgtgaagtcgttgcagttgggaaagaagagcaaaacttgccatacttattatatttgcaaggtggacctgggtttgagtgccggcgtcctactgaatccagtggatggactaaaaaagtctgtgaagaattccgtctcatcttaatggatcagcgaggaacaggcttatcaactcccttgactgtgtcatcaatgtcacaattcaagtctgctgatgaattagctgactttttaaaatatttccgagctgataatatagtaaacgatgcagagtttattcgagttcgccttgttcctgatgctggtccttggacaatattgggtcagagctatggtggattttgtgcagtcacgtatttgagtttcgcaccaaaaggattgaagcaagtccttataactggaggaattcctccgattggaggtggatgtactgcagattcagtgtacaaagcaggct

SEQ ID NO: 3007 - DNA, 1405 bp, Glycine max
atcctcgtccattcgatctctctctctgatatgcggtaaacaccagccctttgagtttcaaaaatcttttcttctaaaccactctaatcaccattttcaaatcaagaaatttagctagctttctttcaactctcttgggagcttgcttagggctttaggaggcttgggtggagcaactcatcacctctttttctcctctcttcgcatagttcaacttgagaaattcggcggtgggaactgatggtggctctgagcttccagggtgggcgggcaagtcctgcccaaccccaacacccatcattgtgtagtggaagagccgctggagtcatcaggattcggtgtgggatagctgagccatctggtgaacctgctcctttaggacaaaagacgcggtactatgacggcatttttgagaaggccttcatgactctcttcgcacgtaagatggagaaattttcagatccaccagcaggaaaagctagagagaataagggttggtgggattggggttatgactatgagagtttcgtggatgtgtcaaggagggtaatgcagcgtaggtctcgtatccagcaacaacaagtggttcgagaggttctcctgtctatgcttcctccaggtgcgcctgcccagttccggaaattgtttccgccaacaaaatgggctgcagagtttaatgctgcattgacagtgcctttcttcgactggttagttgggccatctgaggttgtggaagtagagataaatggagtgaagcaaaaaagtggcgtgcatataaagaagtgcaggtacctggagaatagtggctgtgttggaatgtgtgtcaatatgtgcaagattcctacccaagattttttcactaatgaatttggacttccgttaacaatgactcctaattttgaagatatgagttgtgatatggtgtatggccaatccccacctacatttgaagaggaccctgtttcaaaacaaccttgctatgcggatatatgttctatggcaaaaccaagctctagtgtgtgtcctaaactacaggcatgagaaggcattcctttcggatttaattttccattgcagaattagtgtttagtaagctttttttttttttaaatcagcaaagataagtatatatatttaatatgtggtgggtacaaagggtatccaaatctatatacatgtctagtaagcttctaattcgacccgaggtgctcttcccgctctagcttcagaaaatttcatttttcatgtgtaataatattaataccagccttgctaggcttttacttctttcatagagtcattacattcacaaacgagagaacattgtctacaaatacttcatgtaaatttgtaattatagtgtcaaatatcggtattgccagattgtacaaaaaaaaaaaaaaaa

SEQ ID NO: 3008 - DNA, 1069 bp, Glycine max
attgctagattctctctccaatcgagctccaattaacctcactctccttcttctcattctctctcactccctgtacggtgccattgctctttgcttatgctcgccatcgccattcaccaaacaacaatgctatcccaggtgtgggcataatctgagtgttgaaaatggcttagaataatgttttggtggcattgttggtgaaggactcagagtaagagttattgaagccgcagtgagtcagtgatctttcgctctagcctttgtcctcaaacactgaccgtggagtagtgaagaggcaagaaattgaaggggatgttgatgatgagaaaaagactagcatgctgcacaagggaaaggaaatttagcatcgatcatgatgagcaagagaggattatgacatataatggccttgagagttgcatgctgaacaaccagtcttacgaagatgagagcagaacaagtagaggagatgaatgcataactgattcatttgatgacgacgactccagttgttcctccagcaaagatgcttttggatcattctcttcaaaatgtttgacaatgaaaagggatgataaaggacttgaagaatgggaactctcagaaagtcctcaacatttttgtgtcaaagagaagccttatgctatccaacattcagatattgaagccatgaaagaaaatttttcaaagcttttactaggtgaagatgttacaggaggaactaagggcctcagtacagctttggcactgtctaatgccatcacaaatctatcagtgtccgtttttggtgagctgtggaaattggaaccactatctgaagaaaggaagagaaaatggcagagagaaatggactggttattgtctcctaccaactatatggtcgagctagttcctgctaagcaaagcagttccaatggtgggatttttgagataatgaccccaaaagctcgtgcagacatccacatgaatcttccagcactccagaagttggactctatgcttattgaggcactagattcaatgataaatacggagttttggtatgcagagggaggaaaccgggcagaag

SEQ ID NO: 3009 - DNA, 1422 bp, Glycine max
  misc_feature (69)..(69): n is a, c, g, or t
tcagctacgtaggcccccccccccattactaatcaaaattttgagtgcatctttgattatttctctgtnttcttccccgcgtccgtttgattatttctctgttttcttactacctaccgtctttcatgacaaactgtctagtctttatggcggcatgtgctgattgatgtctcaataagatccaagagaccaagattgtcattaatccggttgattatgatgtagggctttgccaggatcttttaattccagtaaccaactttcataatgaagacaagggctatatggttttacctggagatgtttttgatttgcctattcggaaggacattattcatcgtgttgttaggtcgccgccgagaagacgacaacaggggactcactcaacaaaaactatcagtgaggtcagtggcactgggagaaaaccttggaatcaaaagggaactggtagagcaaggcatggttcattgcgtgggcctcagttcaggggtggtgccaccatgcatggccctaagccccgaagccatgctttcaaagtcaataagaaggttcgacgtctagggctgaagattgctttatcagctcgtgcagcagaaggaaagcttcttgtttttgaggatctggcggttcccacacataaaaccaagaatattgtgaattattacaatcaaatggaggataccaagaaactgctgcttgtagatggcgctatagatgaaaagttaaaattatctacacaaaatctacactatgttaacgtacttccctccattggcttgaatgtctacagcattttgctgcatgatacattggtgatgtcccgagctgctgtgagcaaaattgttgagcgcatgcatactccaataaatcgttgaggctgtaactttttattgtgcttcgcttcatttactcggaaataggaacatttctgtagcaacataaaaagatccaatgagaatatctttggtacgaggtgtctgttttaattacataagttaggcaagttatgccattttgcccatgttgaaggttggaacttaggaacttgatgatcgaaatttgacgttcatgtgattaggtttatcttgttttccggtggttgaatctcatttttcaattctttcacatgcataggatctgataaacctgtacatcattcatgacctagtgtccttcattcatgaatttaaccaatatagtttgaaaaaaaaaaaaaaaaaagaaattggattaggcagcaccaagggtgtggctgttcaaaagtttggtgcctttttaccctcttggatgcttccttacttattggtgcttcttagtcacaatgcagtctgccggagcaagactatagttttgaggccctgaggttgtaaatcacttcaatgtgtgcagtgcaatcaccaagaccttagttgggcttctctt

SEQ ID NO: 3010 - DNA, 983 bp, Glycine max
aaaagcccagagaggcccattaaccagagccaccctttgtaaacggtaacgagctcgggagcagcttccatggaggcatagacggagacgcagtcatgaacaggacagagttcagattcttattcagagcaaaatttggggcagcaaggaactaaatcctctatcagcattagtttacctctgcgttctgtctctggtgcaatccagtatagattgttgggtcagttatggcagcgttgatttccaaaagaatcctacgttgttcttcttggtcattgcattcactaggacgatgttactttgattcacctagtgctgggtttgcctctatttataaaccacgtgatgtatgcaacagtttatctggggagagaatgtttcctgcagatcgttctttggtcaggtctatggtccgacagttttctacttctattttaactcctggagctgatgatagtgcatttccatctgatttattgtccaaaaagactctggcaacatctgagcgtactatagggctttgccaggatcttttaattccagttaccaactttcataatgaagacaagggctatatggtttttcctggagatgtttttgatttacctattcggaaggacattattcatcgtgttggtaggtggcagcttgcaaaacgacaacaggggactcactcaacaaaaactatcagtgaggtcagtgggactgggagaaagccttggaatcaaaagggaactggtagagcaaggcatggttcattgcgtgggcctcagttcaggggtggtgccaccatgcatggccctaagccccgaagccatgctttcaaagtcaataagaaggttcggcgtctacggctgtagattgctttgtcagctcgtgccagcagaacgaaaggcttcttgtgtttgagggaacctggaggttccccacattaaaccaagaactttgggaattattacagtccaaatgaaaggaacccaaaa

SEQ ID NO: 3011 - DNA, 1720 bp, Glycine max
tacggctgcgaggagtcgacgaaaagtgagggtgaaggaagacgcgtgcgtggataatatagagaatagtaatgtaatggcagagcaaagtggtgcagagttgattgatcgatgattgatgatggttcgggcgtcggtgaaggtgggttccgccaagttcgtagtgatctgcgtggggcttttaggcttcgctctcgtcgccgactttctatgggcctctacctcttccactcttcccacctccaccaaaccctccgcatttgtggttccctccaaccacaataagaagaaatatgagaatgccactgcttctggaagattccttgccgcggcttacgccgatttggatgcgccgcagctcaagtggcaaaagatggctcctgctcccgtccctcgccttgacggagccgccattcagattcgggatctcctctttgttttcgccggctacggcaccatcgatttcgttcattctcatgttgatgtatataattttactgacaatacttggggaggaagattcgacatgccgaaagagatggcgcactcgcatttgggaatggtgaccgatggaagatacatctatgtggtgactggacagtatggcccgcaatgcagaggtcctactgctcataactttgtgctcgacactcaaactaggaaatggcgggatctacctcctttgccggtacctagatatgcaccagcaactcaactttggaggggtagacttcatgtgatgggtggcagtaaggagaatcgacatacacctggattagaacactggagtcttgctgtgaaggatggaaaagctttagaaaatgagtggaggagtgagatacccattccccgtggaggacctcacagggcttgtgttgtggttgatgatcgtctttatgttcttggtggtcaagaaggagattttatggccaaacctgggtcacctattttcaagtgctcacgcagacaagaggtggtttatactgatgtttacatgttggatgatgatatgaagtggaaaacgctgcctccaatgccaaaagcaaactcacatattgaatttgcttgggcgcttgtaaataactccattgtcattgttggaggcacaacagagaagcaccctataaccaagaagatggttttaaacggagaagtagtccagtttaacttgaatactttgaagtggtcagtgattggaaaattaccataccgggtgaaaaccactctagttggattttggaatggatggttgtatttcacttcaggacagagagacaagggacctgatgatccatcaccaaaaaaggtcattggggagatgtggagaacaaaattaaaattgaatgagtgagcaattgctgtagaagcgtctttctcctgaagcagaggtgaagaggccaaaatattgcacattctttgtcagtacaatattcattgttgtaattcactgagaatgactgtaatttaattcgacattaacagttgtcaccgactcttgtatttctttaccaatcggcttttgtatttctttccccgcatatttttagcttttaggtatccatctattcaagtaaatattgacagatgaacttcgtttatgtcaattgtaattcttataggcttattattaaagagaagaatatgacatatgttcattctacttggatcatcaaaaaaaaaaaaaaaaaaaaaaaaaaaaaaaaaaaaaaaaaaaaaaaaa

SEQ ID NO: 3012 - DNA, 1564 bp, Glycine max
cccaatgtgctacttccattaacagcagtgctctggggtggaaacattcatccttcttcgtacaatccaataatggcttcaacgttgcttcgcctcctttcaaaccaaagccgccacgctcctccaacttttctctctattgctctgccgcctcctcttcttctgatccactgttggtcagcgccgctgggggggatcctgttagtcgtcctccggcatggatgatgcgccaggccggaaggtacatggctgtttacaaaaagcttgctgagaaatatccatccttccgagagaggtcagagacaactgatctcattgtggaaatttctttgcagccttggaatgctttcaggcctgatggagtaattatcttctcggacatccttacaccacttcctgcgtttggagttgattttgacatagaagaagtaaggggacctgttatacattcgcccattcgttctgaggaaggattaaaggttttacatccaattgacctggacaggcttaaatttgttggagattcactaaagatactgcgccaagaggttggtggtcatgcagctgttttgggttttgtgggagcaccttggacaatagcaacatatatagtggaagggggtacaacacgcacatatacaaccattaagagcatgtgccacactgccccacatgtattgaggactttgctttctcatttgacgcaggcaatagctgattacgttattttccaagtggagtctggggctcattgcatacaaatatttgattcatggggtggacaactaccacctgaaatgtgggaacgctggtcaaagccttatatcaaagagattgtaaatttggtcaagaaaaaatgccctggggtaccaattgttctttatataaacggaaatggtggtcttcttgagcgtatgaaagacaccggagttgatgttatagggctagactggacagtggatatggcagatggaagaagaagattgggtagtgggataggtgttcagggaaatgtggaccctgcctacttattctcccctcttgatgccctgactgaagaaattcagagggttgtgaggtgtgcgggacctagacggcatatccttaatctcggacatggtgttcttgttggcacacctgaagaagctgttgcacatttctttgaagtagctaggagcttgcagtttgacacactttttcaaaacaatactgcaaaaggccctaatcttgtaacttaagaacaaatgtcattagtgttgcttacttgcttcttgttttactttgtcttggagttagttcaagcccttctcgaaaggaagagtgtaggcttagtcctttattcttatgcttctatgaaatgatcaaaagtctgaggatgcacattgctgtaccggcttagatgaagttgtgattttacattctgctgtatttataattgattatgataaattaattggaggcttccttccattttggtaaaatcttcttaacttggggtggcaccctgtctttgtagtttgtactaatattttattttatttcaaagaattatttaatttaaaaa

SEQ ID NO: 3013 - DNA, 1135 bp, Glycine max
tcagctacgtaggccccccccccccataatagaggaaacaacgtgagagttccacaggagtaaagtaaaagcttttgtagattcagaaaccctcacttgttgttggtgtggttgtgtttttgcatgcttcggacatgtcgatggcgatggtccacccttcggttcacccaatcgaagccccacccatgactgagcatgcaattgcaattgcaatgcccagacacactctgaaggatacgcagggcatgcccggcaccctcggtggcttcctcttgcgcttcgcccagttctctttcgccctcgtttccctctccgtcatggctaccacctccgatttcccttctgtcactgccttccgctaccttgttgctgctgtcagcctgcaaagcttgtggagcctctctttgggagttgctgatatgtatgccattttagtaaggcgtggctacagaaatgtgagaattgtccgcttattctctatcggtgatgggattacttcaacacttacattttctgcagcctgtgcttctgctggtattacagtcctcattggcaatgatttgaatgattgtgcacagaaccattgcagcaggtttgagacagcaacagcaatggcgtttatgagttggtttgctgcttcgccctcatttattttaaatttctggacgctggcctccaaatagaagcagcaagaaagggttttagctatgtatgtcatgtaactttgaggattgatggccctgattgttgcaaatcttaaccatgggcttttttgatcctttgaaatattgctgctcttcaattcaaggcatgagctttaaacttttagttgtgaggtttataatttctcaaacgatgatatggtaactttccaagtacatgtctacatggcacaatataaagtttatgctggtgtgaatgagtttgcacaagtatagcccccagaaaagaaaataaaaaaaaaaaaagaaacttgatttctagagtaataaacttctaaaattctaggagctggagtcgtgacattgacaaccatgttcaagaagtaataagttatagcctcaaacagtaatgcatagaggctagaaaggcctagagttgttaatcattgggttcggactaatggagtctgcag

SEQ ID NO: 3014 - DNA, 1386 bp, Glycine max
  misc_feature (1342)..(1342): n is a, c, g, or t
  misc_feature (1364)..(1364): n is a, c, g, or t
ggaagtaaaaaaagataaagacaagaatcggcccccccccatccaagcaaagcaatcacttcactacaagattttgtgagtttttcctctttctttgttagctgagcttggtatctcaaggtctcaatctctaactaggacgacatgccttctctctccgttttcccatcactcccatcgcttcaaaaccctaacttgagccaacccaatttcttcaatttccgcttaccgtcgctctgtcaccgtcccctcgtcaaaagcactgcaacttttcaccgtagaatcctctgcaaagccttcagagattctggcgaggacatcaaggcggtgctcaagtccgacgacggtggtggcagcggcgacggcggcggcgacggtgggggtgggggtgaccgggatgcggagaagaaagaagggcccttgccggaatggttgaatttcagttctgatgacgcaaaaacggtgcttgtggctctggcaatttcgcttgcgtttcgaacgttcgtggcggagccgaggtacattccttcgctgtcaatgtatcctacatttgatgttggagatcgaattgttgctgagaaggtttcatactattttagaaaaccatgtgcaagtgacatagtgatatttaaaagtcctccggtgcttcaagaagttggatatagcgatgatgatgtttttataaagcgtgtggttgcaaaggcaggtgatattgtggaggttcgtaaagggcatcttgtagttaatggggttgagaggaatgaagagtacatccttgaaccacctgcttatgagatgaaacccacacgtgtgccagagaactacgtctttgtaatgggagacaaccgcaataacagctatgactcccatgtgtggggtcccctgccagccaagaatatcataggtagatcagtatttcgctattggccaccaaatagaattgctggcacagtttctaaggaaacttgcagtgttgaaaccacgcagacgcaggagagtgcggagactgctctaccatctcaatgaccactctgtccatcgattattgtagactgtacaacctttcccaatttttgtattcaaagatataggataggatgtttgctaagttaaaaaacatttgtaagtttcttcacattcttcatattggttcgtgtaaattatctattaattcaaatatccagtcatcgtactttgcttgaagaagttggttacaggaaaaaataccaccaacttttcttagaatatattttgctttaatgaatgaaaagtatatacattataaatctatctatgtactatttaataaaatcatgtcttgattaagacacatgtaacattnttaacttcatttcgccaaaaanaaagaaaaaaaaaaaaaaaaaa

SEQ ID NO: 3015 - DNA, 892 bp, Glycine max
ccattatatatatcgcggacaactgctaattatgccctagtttgcttcttcccttagccgttgctctgcttcaacattgcggaagcagaagaagcgccgcagctatggtgaagtactccagagaacccgacaatcccaccaagtcctgcaaggccagaggcgctgacctcagagttcattttaagaacactagggagactgcctttgccatcaggaagttgccccttgttaaagctaaacgatacttagaggatgttttggcccacaaacaggctattcctttccgacgcttttgtggtggtgttgggaggacggcccaggctaagaacagacactccaatgggcaaggacgctggcccgtcaaatcagctaagttcattctagatttgctgaagaatgctgagagtaatgctgaagtgaaaggtttggatgtcgatgctctgtacatttctcatatccaggttaatcaagcacagaagcaaagacgccgcacctacagagctcatggaagaatcaacccttacatgtcatctccatgccacattgagctgatattatctgagaaggaagagccggtgaagaaggaggctgagactcaattggcaacaagcaagaagaagggcgctcttcgaagtggtgcttcatcttaaattacccttgaagctactggatgaccttcattcctgatttatgtcagttttgtctatcgttttcctttatatttgttatgagctgcttttgaagcttggacagcaccttttgcttggtatactatgtttcaagttaattgagttactcgggaatttttattatggtaattggatgattaattttagtttcaattctgtggatccctgctgctgggaattttcggaagtagaatcttgttcgg

SEQ ID NO: 3016 - DNA, 858 bp, Glycine max
ggtctgggccccctcgagtagctgcgtaggagcccctagtttttcttcctccttcagccgttgctctgcttcaaccttgcggaagaagaagacgccgcagccatggtgaagtactccagagaacccgacaatcccaccaagtcctgcaaggccagaggcgctgaccttagagtgcatttcaagaacactagggagactgcctttgccatcaggaagttgcccctggttaaagctaaaagatacctggaggatgttttggcccacaaacaggccatccctttccgacgcttctgtggtggtgttgggaggacagcccaggctaagagcagacactccaatggtcaaggacgctggcccgtcaaatcagctaagttcatcctagatttgctgaagaacgctgagagtaatgctgaggtaaaaggtttggatgtcgatgctctgtacatttcccatgtccaggttaatcaagcacagaagcaaaggcgtcgtacctacagagctcatggaagaatcaacccttacatgtcatctccatgccacattgagctgatattgtctgagaaggaagagcctgtgaagaaagaggctgagacccaattggcaacaagcaagaagaagggtgctcttcgaagtggtgcttcatcttaaattgcccttgaagctagttatctgatgacctacattcctagattatgtcagttttgtcgatcattttcctttatatttgttatgagctgcttttgaagcttgaacagcaccttttgtttcgtatactatgtttcaagttaattgagttacttgggaatttttattatggcaattggatgattgattttagtttcaaaaaaaaaaaaaaaa

SEQ ID NO: 3017 - DNA, 2347 bp, Glycine max
tcgagtcagctacgtaggccccccccccccgagagaaacagaattgaaaaactcacaaaccagatagagagaatctaatcagaacagagttctgttccttttcttctgattcccgaagaactcaacgatccaatcgcaaccggaagcaatcgatcagtgagtcaattgcttccggcaaggagaacaataatgacctcggagttagaaatttctccggcggacactcgcaaggctcccggcaaggagcagcaagccgccggcgtcggaatcctcctgcagatcatgatgctggtcttgtccttcgtcctcggccacgtcctccgccgcaagaaagtttacatcatccccgaagccagtgcttctcttctcatagggttaattgttggcatactagcaaacatttcagacactgaaactagtatcagggggtggttcaattttcacgaggagtttttcttcctgttcctgctacctcctatcatattccagtctgggttcagtctagcgcctgtgggtccctccacactccgcagtgttctctttgctggaagtttactttgtttatatggactggccttttgacttggtgttaataatgtgattcctttgcagaaaccctttttctcaaattttggagcaattgtcacgtttgctatatttggtaccttcatagcttcaattgtaacgggtatcttggtttatcttggtggcttgctctttctgatgtataggctacctttcgtggagtgcctgatgtttggtgctcttatatcagctactgatcctgttactgttttgtccatatttcaggagctgggcacagatgtcaatctatatgccctggtttttggagaatctgttctgaatgatgcaatggcaatttctttgtacaggacaatgtcatcagtcagagctgatccatctggacaaaatttattcatggtggttgttcgatttttggagacttttgtagggtcaatgtctgcaggtgttggagttggatttatatctgctttgctgtttaagtatgcaggattggatattgacaaccttcagaacttggaaagttgtctctttgtccttttcccatatttctcgtatatgcttgccgaaggccttggtctgtctggtattgtgtcaatcctgttcacaggaatagtcatgaaacattatacgtattccaatttatcgcaaagttctcaacggtttgcctctgcttttttcgagttgatatcatctttagctgaaacatttgtatttatatacatgggctttgatattgctatggagcaacatagctggtcacatgttggatttatattcttctccattatattcattggaattgcaagggcaacaaatgttttctcatgtgcttatttggtcaatctggtcagacccactcatcgaaagatacctccaaaacatcagaaggcactttggtatagtggacttagaggagcaatggcttttgcgcttgctctgcaatcaattcatgatcttccagaaggacatggacagaccatctttaccgcaaccactgcaatagttgttttgacggtattgctgattggtggttcaacaggtagcatgctggaagctctagatgttgtaggtggagataatgatagccctttggcttcagttggtaccatcacaaattttgatggaaacaatggttatattgctcctccttacaacgaagaatcatcttcagggaacaaaatcaagatgaagctaaaagaattccacaagactgctgcctcttttactgcattagataaaaactacctgaccccattctttacgagtcaaaatggagatgaagatgatgaagccgagccttttacttctacaagatcggaacttcatggtcagaaccactattcatcatgatacgttccagacaacaacatactgaatgcttttttgtacataatttccgtcagatagctcgtaggaattggcgcaatacaggaatcgaatttacctcctacattccaagttgtacgattgagaatatcatgtcaagtctctttagtttggacaacatcatctcggcagaagcagcattccatgcagttgttgtatttctctgccatgaagttgaaggtttataacttggatctcaccacacaatcacacatgtatttttaagttgacgtctatataggttttcttacttagtctaattcagttgaattctgaaaattctggctcacttcatcattgtgacagtgaaattatatctcaaaatgaatacaatcatggaaaactatatatctcaaaataaatgcatcatggactatggatgagtccttatacaaaaaaaaaaaaaaaaaaaaaa

SEQ ID NO: 3018 - DNA, 683 bp, Glycine max
  misc_feature (1)..(1): n is a, c, g, or t
  misc_feature (9)..(9): n is a, c, g, or t
  misc_feature (32)..(32): n is a, c, g, or t
naccagggnaattcggccattacggccggggnacccatcaaaaacccaattaatcaaaaattgagatacaccacttacaactatcgtcatgacttcttcatcacttcaccttctgcctcttacctattccgatcatgcaccccaaaagcctcgtagtgtgttacccatctttggtttcatcaacatgacaatcagcagcgtggtcacaatctaccgcgcgcacaacaacaacgacactcccaccgtagtgttcgtgggttttgtctactttggttccttcttgttggattattgctttcgcttgtaccactccctacctaaatcttcatcatccaattcccataatattagacgcaacgttaaaatcatcatttgggtcttgattagcaccatcatgttgggatttgcgtgcgagttttcgacctttatgagcttcctcgagtcttcattcttctttgggcttgtgattagtggcaacatctttcttttctatgtgtacttcatttgggagggtgacaagagtgctactactagtgcttgctccaataatgatacttgctgctataatgattatgattataaaccaatattaacagaggctaaggttgatgcataatgtgtaatgattgactgattgagggtttttttgtttgaattatttacgtgtatttgtttatatgaaa

SEQ ID NO: 3019 - DNA, 1187 bp, Glycine max
  misc_feature (1185)..(1185): n is a, c, g, or t
acgaggccatttcaatttcacctacccacgccccctactattccttattttttttttttcagaagccaacaaggccaagcgctgagagaaaaaggttcagaaatgggtttatacacgagcgtgatggaagagataagtttttacacagggctatctcccgctgcgtttttcaccattttggctatgatggtcgtcgtttacagaaccgtgagcggcatgtttgtgtcccccgaagactacaacaagccccccgtcgtttcggcccgagccaattcccggttagacgagtccgagccgccgcgcgaaccggtccaattgggcgaaataacggaccgggaattgcgagcctacgatggctccgaccccagcaaacccctcctgatggcaatcaaaggccagatctatgacgtgtccaatggcaggaatttttatggtcccggaggaccatatgcaatgtttgcaggaaaggaatgtagcagagcccttgcactcctgtcttttaaacctgatgacattaatgggaacctcgaaggtttaggtgaggaagagcttacaattttagaggactgggaatttaaattcatagaaaagtatccgaaagttggccagctcattgcagaacaaagaactcggcaaaatgagttcaaagaacaaactcaagacaatttggacaaccctaatgaatgcaaggaggaagaaaaatagtaaccattatattgtataggttacaaccgagggattttgtagggctactgaatcactgatagtttcgaagtactgcttggtaagtatgaatacacatagcaatgcatattgtccagtagatggtggtcattatttcaacataagcctcttgcaattgataaaatacatgttgtattcggccattgtttacacatcccccaaatccatatatgtaactggataccgaaaacgttctctttccctctgctcatgtagaaaatgaaatctagttatagcttgttgtactcatactgttctgcttacgtaattacctctttttggtgtttttagtcaaacttggcatgaaagatagagttgtttaatgttggctatactctacatattttggtgtttattgttgtcttcttagcaaagtgtaaaacacacccctcttttcggctcttttctttaaggaagtgtttatttcaaggtgtaaaaaanaa

SEQ ID NO: 3020 - DNA, 2463 bp, Glycine max
ggtccggaattcccccgcccaactcggctcgaggtgtgaactggctactggctgtcatcccttcattcatcttcttccagtgtctgtctacactacggatagagcttttttcacaccacagctaaaagtgctggaatagagcccttccccttcttcttcttctcctccaaatcctccttctttttctcttctctctaccacacaaaaacccttaccaagttctttctttctaattcccttgataatgtaaaatcacagaaaaagaaaaagctactaaaaacttggctctaaacctttctttttttgaggaaaacctgaaaagttccacacaatgtcttcttcttcttcttctagagctttcttcttcttcttcttctttcttatcaacgtctccttgctcctcacactctcttctgcagcggatccattcgtttcctacgaatttgaggtctcttacatcactgcctcccctcttggagttcctcagcaggtcattgccatcaacaacaagttcccaggtcctactatcaatgttaccacaaacaacaacgttgctgtcaatgttcggaacaagttggacgagagcctcctcattcattggtctgggattcagcaaaggaggacttcgtggcaagatggtgttcttggcacaaactgtcctattcctgcaaagtggaactggacttaccagtttcaggtgaaggatcaaattggaagctttttctacttcccttcccttcatcttcagagagctgctggtggatttgggggtttcatcataaacaacagacccatcattccgattccttttgataccccacatggggacattgttgtttttattggagattggtacacccgcaatcatacggatttgaggaaggcccttgatgatggaaaagatcttggcatgccggatggtgttctcatcaacgggaaaggcccttaccgatataacaacacacttgttcctgatggcattgattatgaaaccattgaagttcatcctggaaaaacttaccgacttcgtgtacataatgttggagtatcaacaagtctgaatttcaggatccagagtcataacttacttctagcagagacagaggggtcttacacagtgcaacagaactacactagcttagatattcatgttggacaatcttattcttttctgttaagcacggatcaaaatgcaagtacagattactacattgtagcaagtgccaggtttgtgaatgaatcacgttggcaaagagttactggagttgctatcttgcgctatacaaattccaaggggaaggcacgtggtcctctcccacctgctcctgatgatcaatttgacaaaacttactcaatgaaccaagcaagatccatcagatggaatgtatcagcaagtggtgctcgtcctaacccacaagggtctttcagatatggttccatcaatgtgactgatatttatgtattgaaaaataagccactggagaaaattaatgggaagcagcgagcaacactcagtggaaactcttttgtcaatccttccactccaatcaggcttgctgaccagtacaaattaaagggagtatacaagcttgatttccctaccaagcctcttacaggatcacctcgcacagaaacatcaatcattaatggaacttataggggatttatggaagttatactgcagaacaatgatactaagatgcatacctatcacatgagtggatatgcattttttgtagtcgggatggattttggtgattggtctgagaatagcaggggtacatataacaagtgggatggaatagctcgcactacagcacaggtctatcccggagcatggacagcaattttggtttcccttgacaacgtaggagtttggaatctcagaacagaaaaccttgattcatggtatcttggtcaagaaacatatgtcagggttgtcaacccagaggtcaataacaaaactgagcttcccattccagacaatgcccttttctgtggtgcccttagcaaattgcaaaagcctcaaaaggtttcgtcagatgcaccatcaatcactgggaacaaactgaagctgctcttcacttggctcgttgtatgggcatggatccacattttccagtaaaaagcacattttgggtcatctactcttagttgcttcaagtggacttgtggcttgttggtgaggttttgtgattgagttattagttttgtaagtcttgtttataaattattgatcttttgcagtgattttgacttgtattcttcttcctattagctttatgcttgtggttccatgtttaatttattgggacttgtgattcttttaatgcctataattgatgtagtaatcacaatttaatcatactcttgatacatgtaactttacctgccgactcctactttcaacttaaaaaaaaaaaacttggggccccctcatgcaaggtcaagatgcatggaccc

SEQ ID NO: 3021 - DNA, 2246 bp, Glycine max
aaaaaaactgctaagtcaattgtacaagaactagttcttaagtttaagaactccataaacaactcccttggaaatgctctaagaaaagctaaaaaagaattgctacaagggattggtcatcctcaccttttgaaatcctgtttggtgcacaacacttcttagcaatctggaaacattactatactattgatccttagacagataatgctagctgggccactattaaatacaactgcaaacttgattgcattggctgcaagtaaataaagcgggatagccaaataagttattaaagtgtatacagaaaaatggtaggaatctcattcatctatacaaaaattaaagctcgatttccctgattctcctgttgagaactttaatattaaggtacaacggtacaagattagctgtgggaagaggcagcaggattgccgtttgctactgtccccaaaactgcattgccctctgcagcggcctggtcttcgtttgcatggcgaacaaactcctcaggggtcatgtgagaaccatggcatgcacagacaattctgacttggttagtgctgtatttataagtaacaccagaaattgtccttccatttggacctgaacctgaggtggatacccaaggcagatttgggtaagaaccacatccaccaaatttcacatctgcagcaagacctggcttaatatttgaaaaatcaatgatggcaccttctcctgttgattggcctgatacatctttggccctaaggtttgtgcttcttgctttcacatcttcaggttgtgaggaggagccttcttcattgacacgctgtttaccatctcctttggttcgttctaacggccttccttcataaggcatggcctcggatatattgtttgagattacttgtagtgcagctgagttaattggacctctgccaacaaaggaagggtgtaactgttgaggacgagaaaccaaaccccatgagttgtccttctccaacatgggaagctgaacaggtgaatatccaaacatcacaggcaaattcccattactcacagattgggctcctaagtgttcaccagttgcagtaggcatcacatgcatcactccaggtatctgagggcttggtgccccaacagagctggactcttttactgaagggtaaggtacattcattgtatttacaggttgaacagaaaaggaagcaccataggtcatgttagcatgcttaaaatctttttctgatgacccagtaaacctcttctgcccactaaagtcagtagcatttgagtcagcacttccacgaatctcttttgctgcatcggaagaagcactaactctaataaatcctttggaaccatcactgtggtgtgagatgggcctggaggtggagttctcagtctcagagtcagccacatcttcattttctgcagtcgaaccctcctctgttatagatatatgagaggctctagccctgtcatgtaaatcggcatgaacatcactgtcatgcttcttttgatcacgtatctcatcaaaaggcatttttcgcttatttgctgcctctgaccttttatcttcctcaatttcaacaggtttattactgtttgcaaccagaaaccctctcccgtttaaattcaaagaagcattgtcttctttggcctttgaaaggtcactaaagaagttctcctcaggctttggggaatcagttcttcgagtcccagtaatagattcaggcttctgaggaacgttatcaaacatgctcttaaagtcatccaccattttgccacccctaccaacttcttcagccctagtatctgaggagctaccattcttacccttgggtttggctgatgagcctccaaaagataaacccaagctgagctcaagcccactctcatcctccatattgtaatctgagcctatcaaaattcaaaactgatcaaactacttgcttgccttatcttccatgctactccctactcattagcccaccttttcaccataagtaaccatcctcagatatctcacccccgaatcctgatccaaatcttccctctcagtctcactctctccgagcaagctcttttttttttttcctcttcaatttggaaactttagtgtcccaaagggttccttgaagattaagaaaagatgggtaaggctccgatcggagatccaaagcttaccctggaattgggaagaggaatgataaaaaaaccctaggtcaggtctgcatctctctgcggccgcgggggattgc

SEQ ID NO: 3022 - DNA, 1873 bp, Glycine max
aacctgattgggaatctggctttccctttgatcttgacggaggattgttccttctctcgagacgatccggagggatgggaggtcctggtggccctggatttcctcttgcttttggtcaatccaaagccaagtttcaaatggaaccaaacaccggagtgacatttgatgatgttgctggggtggatgaagccaagcaggactttatggaggtggtggagtttttaaagaagcctgagaggtttactgctgttggggctcgcattcctaaaggagttcttcttgttggtcctccaggaactgggaagaccttgttagccaaggctattgctggtgaagctggtgttccatttttctctatatcaggttctgagtttgttgagatgtttgttggtgttggtgcttctcgtgttcgtgatttgttcaagaaggcgaaagagaatgccccttgcattgtctttgttgatgaaattgatgctgttggaagacaaagagggactggaattggtggagggaatgatgaaagagagcagaccctcaaccaacttttgacagaaatggatgggtttgagggtaacacaggtatcattgtcgttgcagcaactaacagggctgacattcttgactcggccttgttgagacctggccgatttgatagacaggtgacagttgatgttccagatataaggggaaggactgaaatcctaaaggttcatgctagcaacaaaaagtttgatgctgatgtttctcttgaagtgattgcaatgagaacacctggctttagtggagctgatcttgcgaatctgttgaatgaagctgctatattagctggtcgccgtggaaagacagctatttcatctaaagaaattgatgattctattgataggattgtggctggaatggaaggaacagtgatgacagatgggaagagcaaaagtttagtggcatatcatgaagttggtcatgctatttgtggaactttgactcctggtcatgatgctgtgcaaaaggtaacactagttcctcgcggtcaagctcgtggacttacatggttcattcctaacgatgacccaactctgatctccaaacaacaactctttgcaagaattgttggaggactaggtgggagggctgcagaagaaattattttcggtgagcctgaagttacaactggagcagctggtgatttgcagcaaatcaccagtttggcaaaacagatggtgaccacatttggaatgtctgatattggtccttggtcacttatggaaccatcagcacaaggtggggatgtcatcatgagaatgatggcaaggaactcaatgtcagagaggcttgcagaagacattgatgctgccatcaagaggatctcagatgaagcatatgaaattgcactggagcatataaggaacaaccgtgaggccattgacaagattgtggaagtccttctggagaaggagactctgagcggagatgaattccgtgctatattgtctgagtttgttgaaattccagctgaaaaccgtgttgctccttcaactccagtaccagccactgtttgaatagcctatatatgtaacatctttcatatgtattatcttagaatacagaatgccctctgcagcctgctccatatttgtgaatgattaaagattctaccttactttttcattttttgtagtgttgacaaatgacaacagagagtatgtataaaagagaaactgtttttagtgtaaaaatttgtagtttctttacgtctataatacagtgtaactttaataaacctttatttttaaatgtagagttgtaacgggtgagacacaatgtttactttccttttataaatggaaatgaaaaaaaatactaacttaaatacttt

SEQ ID NO: 3023 - DNA, 1047 bp, Glycine max
cctcattggctctagaaaaggcaggacagatggaatctggaaaagtggcccttgctacatgcatgcggcacgaggaacggggcaatttgctgttcagctagcaaaattagcacgaaatacagtggttgcaacttgtggaggtggggcaaaagccaagcttctgaaagatttgggagttaacagagtcatagactatcatagtgaagatgtaaaaactgttctaagggaagagttccccaaaggtattgacatcatctatgagtctgttggcggtgacatgttacacttgtgcttgaatgctttggctgttcatggacgactcattgttattggcatgatttctcagtatcaaggagagaagggttggacgccatcaaaataccctggactattggagaagctcttagcaaagagccaaacagtgtctggctttttcctggtgcaatatggtcacttgtggcaagaacatcttgacagactatttaatctttactcttcgggaaagctaaaggttgctattgatccaaagaaatttataggcctgcattctgctgcagacgctgttgaatatctccattcaggcaaaagtgttgggaaggttgtcgtctccgtggacccaagcttccttcctcaagtggccaaattgtgaatcaacccatgtcaaatgacctcacagattatattatagctctttcaaattaaaaaggataagttaaacgtgcagctcttgtgcaagtaattttgtcgaatgtttctgaaatttgctgcatcagctcaatgccaaagctgaaacgttctcaatgctttttcattttttaggttacttatgcaattgtgagtttaaaaaataaaaatctgtaagaaaatggagcaaggtataccacctttacgttcatagtttatactatagaacacctttcatatcatgaacaattgtatattttgactctcggtgaaaactggccactctttcctttatttgcattgtaacttaaaaagttgaaactgttgttcaatcgaataactgctaatttggctcaatagttt

SEQ ID NO: 3024 - DNA, 1449 bp, Glycine max
  misc_feature (670)..(670): n is a, c, g, or t
  misc_feature (711)..(711): n is a, c, g, or t
tatatatacattgcatagcctcggcgtatgcaaaatcatcaattttcaattcatggcttccctcatgagcaccatcctcaagcaaaggtcttgttcttcttcttcacatgctgggaggctgttgttctccacaacaacagcagccattgttgattccccttcacttgctcagagaatcagagatttgcctaaggaccttcctggaaccaacatcaagaagcatgtttctcagctcattgggaggactccactggtttatcttaacaaagtcaccgaaggatgtggagcttatgttgctgtcaagcaagagatgatgcaacctactgccagcatcaaagacagaccagcatatgcaatgatcacagatgctgaggaaaagaatctgataactcctggaaagacaactttgatagagcctacatcaggcaatatgggtatcagcatggcatttatggccgccatgaagggatataagatggttttgaccatgccctcttacacaagcttggaaagaagggtgaccatgagagcgtttggagctgaattaatcctcactgatccagccaaaggaatgggaggaacagtaaagaaggcttatgaacttttggaaaacacaccaaatgctcacatgctgcaacaattttcaaaccctgccaatactcaggtgcanttttgaaacaacagggccctggagatatggggaggatacanaatggacaatttgacatattttgttatgggaataggtaagtggaggcacaagtctcttggggttggacaatattcttaaatccaaaaatcctaatggtaagatatatggagtggagccaagtgaaagcaatgtgctgaatggtggtaaacctggtcctcatcatataactggcaatggggttggattcaaaccagacatattggacctggatgttatggaaaaagttcttgaagttagcagcgaagatgcagttaacatggctagggtgttggcattgaaggaaggactcatggtagggatatcatctggagctaacacagttgcagcactcagattggctcagctgcctgagaacaaaggcaaacttattgtgactgttcatccaagcttcggtgaacgatacctatcatctgttctgttccaagagcttcgtcaagaagctgaaaacatgcagccagtagcagttgattaattccatgcataagctttgttgtggagttacattacatggagcaacctagttattacaatcctgttgtagcaaaaattgttaacatcatcttacagttcggccatagcaaaaattgtcaaacaaagctgtgttaattgggaaaaggttttgatacagcttacaataagagctgtgttaatgttttgtattgttctttatttttcatttttaatcgaaaaaggtataaagcaatcgaagtgttctttataaataaaggaatcaaaaa

SEQ ID NO: 3025 - DNA, 1481 bp, Glycine max
attgaacttagccatcattccctgacatgaagcaaaatctggtttggtcatccatagatacctctgaaaaccaaattagactcttgcaccgcaataatggcaataaaatactagcataatttatttgtgagtctcaaaaccttagcacactatatatacactgcatagccttggggtcttcaaaatcatcaattcaatggcttccctcatgagcaccatcctcatgcaaaggtcttcttctacttcacttgctgctgggaggttgttctccacaacaacagcaaccattattgattccccttcacttgctcagagaatcagagatttgcctaaggacctccctggaaccaacatcaagaaacatgtttctcagctcattgggaggactccacttgtttatcttaacaaagtcactgaaggatgtggagcttatgttgctgtcaagcaagagatgatgcaacctactgccagcatcaaagacagaccagcatatgcaatgatcacagatgctgaggaaaagaatctgataactcctggaaagacaactctgattgagcccacgtcaggcaatatgggtatcagcatggcatttatggccgccatgaagggatacaagatggttttgaccatgccctcttacacaagcttggaaagaagggtgaccatgagagtgtttggagctgaattaatcctcactgatccagccaaaggaatgggaggaacagtaaagaaggcttatgaacttttggaaaacacaccaaatgcccacatgctgcaacaattttcaaaccctgccaatactcaggtgcattttgaaacaacaggtcctgagatatgggaggatacaaatggacaagttgacatatttgttatgggaataggtagtggaggcacagtctctggggttggacaatatcttaaatccaaaaatcctaatgttaagatatatggagtggagccaagtgaaagcaatgtgctgaatggtggtaaacctggtcctcatcatataactggcaatggagttggattcaaaccagacatattggacatggatgttatggaaaaagttcttgaagttagcagtgaagatgcagttaacatggctagggtgttggcattgaaggaaggactcatggtagggatatcatctggagctaacacagttgcagctctcagattggctcagctgcctgagaacaaaggcaaacttattgtgactgttcatccaagtttcggcgaacgatacctgtcatctgtcctgttccaagagcttcgtcaagaagctgaaaacatgcagccagtagcagttgattaattccatacataagtttgttgtggttacatggagcaacctagtttttacaatcctgttgtagcaaaaattgttaacatcatcttacaactcggccatagcagaaattgtcaacaaaagctgtgttaattgaaaaaaggttttaatactgtttacaataatcttaaaa

SEQ ID NO: 3026 - DNA, 641 bp, Glycine max
cgtggtaacggtgattaaaatataatgttaaaacaggccgccctttttgtttttttttttaacaccgaaagtacatgttttattatagggtacactagtgagctgctagttcttattcactaggaagttacaagacaatacaacaaacatgtagtcacagtttgtagtagctaacatccatagtgcatttacgccctgtcatctttgttttcagcaacaaccttaactctttcaaggcagagtgtaaggtccacacttgtaaccaacagggcgattagccaggttacaacgcttggggatggtgacagcaacttgagggttgacgccagccattttggctgtgttagagagaagaactgcacagaggcaactagggttctgcccaattttcttcacctgagcacagcaactctgagaaacactagcattctcatcttgtgctgctgaggcacatggtgcaagcttataagcctcattatcaggggttgtagatttcccacattcaccagcactctccaccccaccaatagtactcacaagcaccacaaacccaacaaggcatagcaacttcttcacacaaccctccattctcaatatatgtttattttttatgtctctctattaatttcacaatgccagcc

SEQ ID NO: 3027 - DNA, 1318 bp, Glycine max
tcgtacggccgcgtggatccgccaggtcggcccccccgtcgttgtgcattttgcactttgcaaaaatttggttgcagaggcagagaggaggcaacaccacaccacaccgcaccactctctacactctcactctgcaacactcaaatctcgtttccacctaaacgacttcgttttgcgttcttttcccttcttctgatttaggtttcagagggaaaaggagcagcgatggactcacgcacgtataatcctcgcaccgtcgaagaggtttttagggatttcaagggccgaagagctggtctcatcaaagccctaaccactgatgttgaagatttttacaaccaatgtgatcctgagaaagagaatttgtgcttgtatggctttcccagtgagcagtgggaagtaaatttacctgctgaagaagtaccaccagagcttcctgagcccgtgctgggcattaactttgctagggatggcatgcaagaaaaagactggctatctttagttgctgttcatagtgatgcatggttacttgctattgcattctattttggagccagatttgggtttgataaagctgacaggaaacggcttttcaacatgatcaatgaactgccaacaatatttgaagttgttactggtgcagcaaagaagcaagttaaggagaagtcttcagtttcaaaccacagtggcagcaagtctaagtccagctctaagcagcgagcttcggaatctcaggctagacagccaaagccattgcaatcaaaagaagaggatgaagaactggacgatcaagatgacgatgaacatggagagaccttgtgtggggcatgtggtgaacattatggcactgatgaattctggatttgttgtgacatctgtgagaagtggttccatggtaaatgcgtgaagatcacccctgctagggcagagcatatcaagcaatacaagtgcccatcatgcagtaacaagagagctcgcccctgattgacatgagccaagttccatcattgacagtcattgttggactctttgctgatcgtgttattttgcttttcttcctagatgttgcagttaatggatagtttctgtttgacttgtgtaggtttcttttctagtctgtaggattctgctgtgttggtttctttagtgtcagctgcaattcagttgatgccttcttggatttgatcaatttttagtttatgcattgttgacttgggaaagtgaagtcttttccttaatgtcactctaaaactaggttaattaaacacaaatttatttgaaatggatgtctagttatgtcaaaaaaaaaaaaaaaaaa

SEQ ID NO: 3028 - DNA, 690 bp, Glycine max
tttgggtaacgaggttcataagattttgttaaaacttaaaacagttaaatgtttttttagttttttgaaacaccgaaagtacatgttttattatagggtacactagtgagcagctagctcttattcactagaaagttacaagacgatacaacaaacatgtagtcacagtttgtagtagccaacagccatagtgcacttacgccctgtcatctttgttttcagcaacaacctcaactctttcaaggcagagtgtaaggtccacacttgtaaccaacagggcgattagccaggttgcaacgcttggggatggtgacagcaacttgagggttgacaccagccattttggctgtgttggagagcagaactgcacagaggcagcttgggttctgcccaattttcttcacctgagcacagcaactctgagaaacactagcattctcatcttgtgctgctgaggcacatggtgcaagcttataagcctcattatctggggtggtagatttcccacattcaccagcactctccacccctgcaatagtactcacaagcaccacaaacccaacaaggcatagcaacttcacacaataagtacaaccctccattatttctcaatattatgcttatgtctctctattagtgaaatgtttctctgttgatttcacaatgccatcttaaccgcttctgatggct

SEQ ID NO: 3029 - DNA, 1782 bp, Glycine max
ccacgccgcctcagctgtctctgcaattcggaggatatcaaggactaaaaaccaccaatcaaaaaccatgaatgctaagagagaaaagggagagtgctttgaaaatgggaaagtttagttcaagttacagtacttctgattttgttcactttggagttctacttccctttcttctgttatcacagttgttctttcaacttgcatggtgtggctccatagtaaagttccttcctggattagagggaccccttccttttgttcttgaaaccgggtatgtgggagtgggtgaatcagaggatgtgcaggcattctactacttcattgagtcagagaacaatccaaaggaggatcctctcatgctttggctcactggtggccctggttgctcagctttctctggccttgtcattgaaataggtccaattgcatttaaaaatgaggaatacaatgggagcctgcccaatttggtcttgaggccacactcatggacaaaggttagtagcattatatttgtagacttgcctgtttccacgggcttcacttatgccacaacagagtttgctactcaacgaagcgactggatacaagttcaccaagtccatcaatttcttaggaagtggttgattgaacatccaaattttttgtcaactgatgtttacattggtggcgattcatactctggcattactattccagcaattgttcaagaaatttctctaggaaatgaaaaagggctccaaccatggataaatctccagggatacctgctggggaatccagcaacaactcgaaggcatgaaaactatcgaatatcctttgctcatggaatgggacttatttctgatgaactatacaggtcactgcaaaaaaattgtaaaggagagtacataaatgtagacaccaaaaatgtattatgttctagaaatatcgagacattcaatgaggttacatcaggacttagtatggtcaatattttggacccgtcatgtgattggcttgatactgaaacatcttggaggagatctctacttaagaaatatccgagaaagaatttccttaatactcatctcaaattgccatccttaaactgtcggagttatgcatacttcctctgcggttattgggccaatgatgatagtgttcgcagtgcactgcatatccgtaagggaactataggaaaatggcgtcgctgtaccttcaatatacctaacaaggaggacatctcaagcagctatgagtatcatgtaaatctcagtagaaaaggctatcgttcactgatatacagcggggatcatgacatgaaaattcctttcttggaaactcaagcatggataagctctttgaactattccattgtggatgattggaggcaatggcatacagatggccaagttgcaggatacacaaggacttactccaatcgtatgacatttgccaccgtgaagggaggaggccacacagctccggagtacaagcctgaagaatgcttggccatgttcaggagatggatatctaacaaggctttgtaggaataactaataaaactcatgttctctcttggcaagaactaaacttggcatactttgcataataaagccacagggtagattattcactaataaaaaataaatttgtgtgtctttgtcaaccaaaaatacaaaactgtatgaataggatttgttccaagtagattttaaaatattcaactatgtaatgctttggtgttgggatttgcctcactgcctaaactaaaatcaactactgtattttaaaaaaaaaaaa

SEQ ID NO: 3030 - DNA, 1437 bp, Glycine max
  misc_feature (49)..(49): n is a, c, g, or t
catatttaaaacaaaaaacaaacatatttacacacatttactaacatantaagcacgctccccataaaagctaaagatcatgttgacattagttaccattgttgtaaaagctggattatatatcgaaatgttagcttcgaatcataatttgattgattcaacagtcaattttgatgattcaaactgattgaattgaataacatgataaggtatgggagcgaaaacaaccggttcagggaatatttgaaactgtcaattcggttaatacattgagcagaccggtactatgatagatccatgttttttaaataaaaatctgtgtacttactgagaacttgaccatacgtctggagtttaatggtgccaccgtcttcttttgctttggtaaaatactacattctatgtttctatatatcatgggtagccacattaatgttgccaaattcgtgatcttcctaaattgcagccactgagtccaatattcacaggtccttgctacaagtatcaacttcctagcagcaagcgaacattaggcatgccattcaatttatgtcaaggacagcaacctaaatgaatgtcaaaaatgataattcctatctcggctcaccagcctggaagacaacctagttagaaaatatgacagagagagatgtggcaattatcatcaatgttcttcccacaacaagctgaaactgacaactctgtttggacacgaaaaaaaaaaacaaatattacctcggaaattcagtagtctaacagcaatatggaaccatttctaatatctacagctgatctatataccaaaaatgtagaagataacttaaaagttggtgttcctcccaccaaagacagtgtctgaagaaacttagatcttcctagtacttgacaactccaacattttgagccttgcccagaacagactcaacatctccatgaaacaagctgaatttttttgccacagcaaaaccagcatgcattccatctactgctgcgctaatgatccctccagcatagcctgctccttcaccaactggatatagtccttttaccgaagtgcattcataagtgtcaccattgcgtggaatttggattggggaactagtcctagtctctacaccatgaaggagagcatcattgcagataaatcctggtaactccttgtcaaatgttacaagtgaatgtttcaaagcttcagttacatgaatgggaaatagttgatggaggtttgctgccttcacacccaatcgataacttgacgggggtacagatgttactgacaacttgttctcaagaaaatctgtaactgtctggacaggcactgtaaaatttcctcctcccatcatagcagctcttttttcaaactctctctgaaatttgaccccggcaagaggaccataataattcaaagcttcgaaatcctttgttgtgacctcgtgc

SEQ ID NO: 3031 - DNA, 1313 bp, Glycine max
agtcagctacgtaggcccccccccccaaatttggttggaactgcgctactcactcagttaatctttgacgttgtgtgccgtacaaagtgatgacgggtaaggctatgaacttgagccattccaaaacggtggttttgatctggctcatctccgctttctgcttcttcaccttgttccaaatggccctctacaactcatcacaaactccttcatcaacttctttagattctccaaattcaaacacggggcaaagatcaaagttgtatgacaagatggggagagatctggatgagcatggagctgctttcctgaaacatggtgaaacctctcagtcattgtctctttcggatatattcacactgaaggatggatctgtaactcctgttctgaagccggcaaatcctccggtgcgggctaatgtattgtatttgagcactgaattctctgtacctatcgcggaggctgtcaaaaatgtttttaatccttattttgataaagcaatctggtttcagaactctagtctgtaccattttagcatgttccatgcctcccaccatattgtacctgtacctgccaccaaagaagagatagaagctgaagcatcttctgtggaagctgttgtcgcaacactctgccctttgaaaattgttttggatagggttgttttgacttcaacaggggtgctcctgggttgctggcaggttacctcgggaacagatcccataaccattcgtgctaagttgaagaatgcacttccacatgcaccggagaagcaactttatgatgctgcaattctccacacgtcatttgcaaggcttttgggtccacctaaagcattatcaccttcggaacagcttagaatgtcagatgatgtccaatttttccatgacctagttgatcgacttaacagtcagattcatggattcaaggcggtggtgtcggagctttggtacgtggaggaatatgatgtgctagcccttgcgctaaatggaagaatgaacactcgcaaattcagacttaggtgttcaaaagaatgaagttgtcttgcacgtgtattgcatgtgtattaaatttagtgaccacaagaatatgcactaatgtgtaaaagaaccattagtatacagaaaactacgtgtttttttgtttcttttactgcattgaaacttaaaagtcagtccaaaattatatataggtggatatactaatgtgtatgatcatagattcatagaataatatcttatacggttaatggacttcaattttaatttttttttgctgctaagtgctaactggactgttgtttcctggaccaa

SEQ ID NO: 3032 - DNA, 1519 bp, Glycine max
atcgaccaccacacaaaactcccatttgctcagctacgtagccctaagcttcggaggaaaaaagttgttgtagtagttgtttgtggtcggtgatagttgagtttgaagtagtgcttcgcgtctacattcagttcaatggcttcttccatctgtgctctctcgccttccgtccaatcacagctcactaaaaccaccctcgttgctccaatccctctctatcaacgaagcaagtgcgaaatgagcaggaggagttttgcgtttaagggaattgtggcctctggcgtttcggtcgcggcttctactctcacagccgaagcagaaccatcttccaaaggttttgaaagattgccgtacaagccggaagggtacaattattggacatggaggggtcataaaatacattatgtagtgcaaggagaaggctctcccattgttcttattcatggttttggggcctctgcattccactggaggtacaacattccagaattggctaagaaacacaaggtatatgccttagacttgctcggttttgggtggagtgacaaagcacttatagattatgatgctatggtgtggagagatcaagttgttgactttgtgaaggaaatagtaaaagaaccaaccgttttagttggaaacagccttggaggatttactgctttggttgcagcaactgggttgcctgatcttgtcaatggtgttgctcttctaaattctgccggacaatttggcgatgggaaaagggaaagtgaaacttctgaagaaacagctctacaaaagtttctcctaaagccattgaaggaagttttccagcgtgtagttcttggatttttattctggcaggcaaagcaaccagctcgggttctgtcagtcctaaaaagtgtgtatataaattcttccaatgtggatgactatcttgtggaatctataacaaggccagctcaagatccaaatgccggagaagtttactacaggttaatgacgcgcttcatgatgaatcagagcaagtacactctagatgctgtcttaagtgaactctcatgcccgttgttgctgctttggggtgaccttgacccatgggttggtccagccaaagcgaatcgaatcaaagagttctatccaaaaactactcttgtgaacttgcaggctgggcattgtccacatgatgagacaccagagcttgtgaacaaggctttattggattggttgaccaccctcactcctgaagtgactctccaaacagtttgaacgcgtatgattttgtaaagccaattgaaaacaagttcttgattaagttttgagtttcaaatagttaatagtagttatcagtatacgttgtgtacaaagaattgggtaaaggatactcagaatagagaaaaatcacagcaagaatactttatgatcattgttctacttcttctgcacacctgtacatttttttcgacctaatgtatgcattcatttcttacataaaaatccttttcattgatcaactaagaaaaaaaaaaaaaaaaaa

SEQ ID NO: 3033 - DNA, 1080 bp, Glycine max
agctcgaatttggcaaattttggtctgaaaatcgttgctttgcagagtataagatctggtatgctcttgctcccacgtctctgattgattacttgcaagcttcatctgcactcatggatcccaaccagatttaggtgattaattagattttcttgtgtgtgtggtgcagcccgtgggtgaaaactacgccaatcccaggacttgcttctttcatgtcctcttcaaggctgcagccttggcattttacattctctcggccctctttattgataactttgtcatcattttcgtggtgaccgttcttcttgccgcccttgatttttgggtagtgaagaatgtgagtgggcgaattttagttggattgaggtggtggaatgaaattaatgatctgggtgagagtgtttggaaatttgaatgtcttgaccacgagtcattggctcggatgaacaagaaggactcatggcttttctggtggaccctgtatcttacagcgattctgtggattgtgctggctatattctcactcataaggcttcaagctgattatctccttgttgtaggagtttgtctgacccttagcattgcaaatattgttggttttaccaaatgcaaaaaagatgccaagaagcagattcaacaatttgcctctcagacaattgcctctcggttctcatctaccttacagtcagcgttcagtgttgtctgatcgtcaaagatggaaatgcaagttgaaccgttcattattgagatgcggtggaagtttgtacatgattatttcggccaggagcatcgaattggattgatcaaacttgcatagttactgatatagcaaatgcaaaattttgtactttttacatgaaatggcttgaatgagactttgatgatcaaattacatagtaaaacagttctttgtaggtgtaaatcatgtttttttcttgtattctttttgcatcgaaggattaagatttatattctgtattgactgcaataaatctttatggcatataatcaggatattgactcttggaacttgccggataattataaattacgaggttgcatcatcaccgttgattggtc

SEQ ID NO: 3034 - DNA, 2208 bp, Glycine max
  misc_feature (919)..(940): n is a, c, g, or t
acggtgcgagagacacagaagggatggaaattccgcgagtccggaaattatggcaattttctatattcttcttcccaccggtcatcatcttttggctgtggctgtggctgttgcaggttcttctccgaagcttcaaagttaacagagaaagaccctaacaacctaatcctccctcgtcactcattctccaccttcacttaacggtctcaaataattgaagatttatcgaagggatttgtttttgtttgtgtgctgtgttgaaagtgaaattaagcattaatgtgttgggagctatgagattgtattgtttagcttgtggtgagccttaattactgcgttggttagatataaaatgccatctaattacttttcaaggctcggagtttcgattcggagatcggttgtggggaaagaaggtcgaatccgggactctgctgaagttctcattgggcaagggaagttgtggtttggtagttctaagttttttcattctgtgcagagctcatattttgtggaactgcagcttctagttcggcccggcattgccttagcttcgagctctgagttagctggcaaaaggagaacattgtctgtagttgacacactatctcgaacgttttcggttccatctgtgtcggggccttcgtttcaggtctgtggataccacattggttctgcccttgctggacctgatcagttttcaagtgggaccaaatttaggattaagacaatggctgctcacttgcccagaatagtggttggcgaatcctgtttagataacccgactttgaagggtagttgccgttccctgtcaaccaagaatagctatagtatatgtttaagcacaaaattgaggaatggtggaaaagtgagcatgagtttgagaaaccatcagcagccagataacagtgcggtttannnnnnnnnnnnnnnnnnnnnngccaagacctggtgtaattctcatccttacatgcagtcaggatctggagacttccatactttgtcatccgcctcgtgctctgttgggcctgctcatgatgtgcctttcgacactgctgcccgcgaggaacagttaagcagttctgcagattcatctgaacagaaaactccttcaggtaagacccttaagttaatatcaggatcatgctacttgcctcatcccgataaagaagaaactggtggagaagatgctcattttatatgttctgaagaacaagcaataggggtggcagatggtgttggtggctgggcagatcttggtgttaatgctggatattactctcgtgagctcatgtccaaatcagtggaagctattcaggatgagcccaaaggttcaattgatccagctagggtgctggaaaaagcacactcaagtacaaaagctaggggttcctctacagcgtgcatcattgcacttactgatcagggccttaatgctatcaatttgggagacagtgggtttatggtggtccgggatgggtgcaccatattccggtccccagtgcagcaacatgatttcaatttcacctatcagctggaatgtggtagtaatggtgatttacctagttctggtcaggtttttaccattcccgttgcacccggtgatgtcatagttgctggtacagatgggctgtttgataacttgtacaataatgagattacagcagtcgtggttcatgccatgagagccggattgagccctcaggtgacagcccagaagatagctgcattggcacgtcaacgggcaatggataaagacaggcagactcctttctcaaccgctgctcaagatgctggtttccgttactatggtggcaagcttgatgatacaacggtagtagtttcatatattactggctctggtgatgcataatttcattttgctgtgccctctgtatataatcactttatctcggttgtgacatgttttgatttgaagttaagatttgtaggtcacatgataggtccattgaatttaaaatttccattgtcgatgttgtgcttggatggtttgtccaactgagtagttgctaccctgagaatagtatttccagttagatttaaagggaaaaaaaattcttcctttttttttaggtttagcagtggcgaaccgactttattgacttcgggctggaggttaaatcctgttgtcaaagttgtgatcataacaaataatattccctatcatgaattaggggtgccttttgt

SEQ ID NO: 3035 - DNA, 1255 bp, Glycine max
tcagctacgcggcccccccgacaggtactggtcaacactgaattcaaaatcactttcgaccatattctcttcttcttctctctctccatcatggtgcaaacaaggaagttcagaggtgtcaggcagcgccattggggttcatgggtatcggaaattcgccacccttttctcaagaggagggtgtggctaggcacgttcgaaacagcagaagaagcggcacgagcttacgaccaagccgcgatattgatgagcgggcgtaacgcgaaaaccaatttcccaatactccaaaccccggagggtgacccaaagacgacgctaacacccatcgatcacgaaacctcatcatcgtcgacgaccacctcgaaggaactggaagagattcttcacgccaagctccgaaagtgcgggaagcttccgtccccttccatgacctgcctgaggctcgaccccgagaattctcacatcggagtgtggcagaagcgcgccggccagcgttccgattccaactgggtcatgatggttcctcccctcggaaaaaaaggtggtgctaatgaaggaggtactggaggagatgcttcttgttctaactcctttccgttctccgagtgcgatccgaccccgcaagtggcaaggcaggagcttctgaggacggagatggacgaggaagaaagaattgcgctgcaaatgatagaagaactcctcagcaggaactgccccactagcccttcattcaataacttatattaattaagggaaatgtttcctgaagaaggataattttattcagtttctttaagggtctttagagataaattatgctggtgtaacattctctttctaatatttttttaaaatattattgtttgcttaaatttactgacaatcacaaatttcagtacatttcacttctaaacctggaataagacttattaattgagaagtgaaatctatcgatatttgtgatattcagtgaattatagccgataattaaaaaatgttagaaagaaagtgttagagtaaatgttgtctgtcttatatcatggtttttcatgaattagtgcttacttcaagaaaaaaaaaaaaagatatgctaggttgcgtaataagtagataagtagaaacagtatgacttttgtgtgttttcttctcgctttgtggtgttagtcttgttacactccatttatgtacttccattttacactttctttcataggataaaaagagaggatgggttctccaaaaaaaaaaaaaaaaa

SEQ ID NO: 3036 - DNA, 493 bp, Glycine max
gttcgagcgacgcgtccgaaacacccttgtcgaccacaccaaaattaaaaacataaaaaagcataaaagcacaaaaagacataaaaaagggaaaataaaacattttgaagtcatatttgcacacttgattaaaggctgtcgtcccttgtgacggatgcgtggggtgctaataccttccctgtgcgtaaaaacaactcccgaactattcacacttaaagttcgtagaccacaccttttcaattttcccgacgctttcctcaaataaaagttggtggcgactccgcgcattttcctttcatggaagacgcacttgtgagtcccgcatcgccctcccgtcaaagggtaggttgcgacagtacttgccctcccgccgaagggtaggttccttaattgaattaactaataacaaaagtgaaactaaggctaaaataaactcacaaatcaagctttgtccataaaaatcacttaaaaaccattttgaggtccaacgcct

SEQ ID NO: 3037 - DNA, 1498 bp, Glycine max
ccacgccccacgagtgagtttgagttgctgcacagaatggggaaaacggcttacaagaggctgaagggaagccagagcttcaggcaacgccttcttctctctactctctcctccactcccattctcatcgaggacattcgcgccgacgagacatggcccggcctccgcaaccacgaaatttctctcctccgactcttcgaaaccgtctgcgacgattgccacgtcgaaatcaacgaaaccggtaccaaattaaagtacaaaccgggaactattatgggtggcagacaacacagtccacacgattgcggcgtctcacggtccattggttactttctggagccactcattgtgttgtgtttgtttgccaaacagccccttactatcaggctcaaaggaattacaaatgattctaaagatccatctgttgataccttcaagtcaacgactttacctatattgaagcgctttggagttccatctgaaggcttggagattaaagtagagagtcgtggattacctcccaatggtggtggtgaagttcttttgtctgttcctgttgttcagagtctaacggcggttagttggattgatgagggttttgtgaggaaaattaggggaacttctttttcaacaagagtgtctgttcagtttgaatatggcatgattaaagctgcccgtggaatcatcaatccgctggtttctgatgtgcacattttctctgatcacagatcaggtcctgaggctggaaactctcctggatatgggatttctctggttgcggaaactacgtctggttgtttcatttctgtagacactgctgtttctcaagtgagggatgacgatacttctggccttgcagatgatgcgaaacgagacttaatgccgccagatgatattggtgtggggattgctagtgctttactaggggagatagctcaaagtggagtggtagattcaacacatcagggtttgttatttcttctatgtgctctatgccctcaagatgtttccaaggttcgtgtaggaaaactttcgcagcatggagttgaaactctcagaaacctaagggattttcttgatttgaagtttattatcaaaccagatccaaactcacagtcggtttttctaaagtgtattggttatggcatgaagaacctttctcgaaaggtatcataaagtggggtcaacagtctgatataattcaaaatacgagtctgacagaattgtaattttgaagcaactgctacttcagcacctggaaaagaactcaagcagcttcaatatatagtattatgccaatgataatggcctaccccgctccccctactcccaaatgaattacaggtgaagtttggtttcaattgtaacccattgctagcaatatatataattgagtgtttttcacatgattttacttccttttagcatttttctgatcctgaacaccaaaacacttttccattttgaagtactataaaagaaatcactgtgttataaa

SEQ ID NO: 3038 - DNA, 1254 bp, Glycine max
gcgagacgatggatggctgtggcgatgattgacagcacgaatggcgactgcgcgaggagaagaagaagagaaatgggcaacacgttgggacatgaagagggagaggagaactttttaaaatttgaagtgaaagataattttccggcttcacttaaaatattggtgcatctagcaaatacccaagccttcctagcaacaactgcattattgcattacaaaaagggaaaaaaactacggtagaggaaaagggtattatagtaaaatcaaagaacacgatctgatctctcacactgcaatctgtctctatctgtgaccaatccaaataataataatttttcttttttaccgaaatcgaaattcattcccacatttcactttgatctgatctcatttccattcattcattcgttgttcttctttccaccaacaagaaagaaaacagagagaaactttcatttcatagattttcatcatctcagcaaaggaatcaatcaatcaagccatggcaggcttcagtggcgacgaaaccgctcctttcttcggcttcctcggtgccgctgcggccctcgtcttctcctgtatgggagcggcgtatggaacggcgaagagtggggtgggggtggcgtcgatgggagtgatgaggccggagctggtgatgaagtcgatcgtgccggtggttatggcgggagtgttggggatttacgggttgattattgcggttattatcagcactgggataaacccaaaggctaagtcttactatctctttgatggatatgctcatttgtcctctggccttgcctgtggcctagctggcctctctgctggaatggccattgggattgttggtgatgctggtgtcagagctaatgcccagcaaccgaagctgtttgttggcatgattcttatcttgattttcgctgaagctcttgctctgtatggcctcattgtgggtatcatcctctcatctcgggcaggccaatctcgtgccgattaaaagcagtcaactcaatcatacttggtagtccagtaaattccaatatcaggcttgtatttgaaatgggagatacttgtctttagtatattattactattatttcatttgttttcgtacacaaaccctgtatccaaactccatcagttttatgaagtattttcctatggattacataataaaaaaaaaagaataaaggtttgttgtgcagaaactcttgataaaacttatacaatctaaaagttaacactaaaaaaaaa

SEQ ID NO: 3039 - DNA, 618 bp, Glycine max
aagccttcgttagggtgccaaaagaccaacgaaagggagagccttgttcaccaattaagtctttgaagagaaagagtaattggaaaatggcttcaaagagtgtttcagctgttgccctaattctggtctccctcaacctccttttcttctccatggttagctccaaccccctaatgacccctgcccttgtctcatcaataatatctaacaaaaagtgccccgaattacatgtttgcgccactattttgcctccccatcacaagccagacaagggttgctgccccctcatcgccggtcttattgatcttgaagccgccgtgtgcctctgcgccgtactcaagctcgacctcggtggaatcatctccattccccttgacattttcgtcaacctgctattaaacatgtgtggacgcaaatcgaccacctacacttgcaactgagaactgaatatgtatgacatgtatccaccatgttctgttgtgttaattagttcgtatcatggtctttgtttatcgtcttgttagtgaaagttgtttaataaattaattgtgtcctttgttcgggaagtgattccaagttattaagttgcttattgtttaaaaaaaaaaaaaaaaaaaa

SEQ ID NO: 3040 - DNA, 1743 bp, Glycine max
acatatacaaatagtataccattgaattaccttatttcctttatggggaaataagaaaattaaggaacccccgactattggcaaaattacaactgttgttaaccaaggaaaataattcgtgataaaaataagatatacttagactagaaaaacccgcgctcaaaataaaaaaagatttccttttttattttgagcgcgggtttttaccagtaaaaaaacgtacttgtgtgtggttctttttgaaacgtatcaataagctagacccatgcttcgagttgtttcatgccataaataaactctaacacttaagaaatctgtcggacaggcggattcacacctcttacaaccaacacagtcctctgttcttggggcagaagctatttgtttagctttacatccgtcccaaggtatcatttctaatacatccgttgggcgggctcggacacattgagtacatcctatacatgtatcataaatttttactgaatgtgacattggatcgtaatccttgaacatcaaaaattcaacattttcaatctagtaaacttgtaaacgaatttatatatattagataccagatgaatcaatgatttataaaaattttgataatcaaaatatacttatagattaattaataataagagaatagaaccaagatactttgatttcttatctttgttttcgcaaacatgattctaatttatatatcatatatgcttatgctaatttgaattcattaatagtacacacaaaatataaattatactttttttattttttatgggtaatattatttattcaataaatttgattgattgatacgggttgattttctattacgataaattgaggaaacaatagccggtccgatagctgcttcagcagctgcaatagctataacaaaaattgaaaaaatatttccttttaattgtcgactatcaaaaaaatcagaaaaggttacgagatttatattaactgcattcagtataagttcaagacacataagggctctaaccatattccggctcgtgatcaacccatatatacctatagaaaataaataggcactcaaaacaagtgcatgctcgaatatcattgaccaactccttatcaatttttattcatttcgatatgaacaagaagaattcaacggatttgattgactaatattataagtctacaacaaaataaagtattcgcaataaaaaaaagattttatacagaaatattcgttttcattcacatagaattcaaccaaaataaatgtgataaaatctaaaaaaaaaaaaaaattgaattttggttttggtttatattattagttctaaaaatttcttattggcgagctacgacaattgcacctatcaaagcaactaaaaggattattgaaattagttcaaatggaagaaaaaaatctgttgataaatgaattccaatttgttgactagtacttatcaaatcttgctctataatctgattgggtcttgtagtccaaataatcccgtgccatgatgtatctagaatagtagttattagtgaaacaaagatacttgtacaaaccatcaaagtaattccatccccaacagtccaaagacgaaaatcttggtaatattccgaaccattcataaacatcacagcaaatattattaaaacatttatagcgcccacataaataagtagttgtgatgcagctacaaaatgggagtttgataaaatatagaataaagatatacaaacaagaac

SEQ ID NO: 3041 - DNA, 1827 bp, Glycine max
tcgagtcagctacgtaggccccccccccccaactaacaaccaccaataaggttgtatttcttgcagaagtagagaaaagttgaagaaggaaactcctaagaccaaaacccaatggatttgaattcctctccttcgaacaacacaattgccgtgaatggaacaatccccgtcgcttccacgttcgccaaggccaccgcgccgttggagaaccctccgccggcgaacggctccagcaaccggaaacccatcgcattgtggccggggatgtaccattctccggtgacgacggctctgtgggaggctcggaccaagatttttgagcggcttctggaccctccgagggacgctcctccgcagagtgaattgctcaccagaaccccgtcgcagagcaggaccagcatcttgtacaacttctcctctgatttcgtgctcagggaacagtatagggatccctggaatgaagtccgaattgggaagttgctcgaagatcttgatgccctcgctggaactatttctgtcaagcattgttctgatgaagctagcacaacaaggccacttatagttgtcactgcttctgttgataagatcgtactaaagaagccaattagtgttaacattgatctcaagatagttggttctgttatatgggttgggcactcctcaatagagattcaactggaagttactcagtccaatgaagagggcaatgattcagactcagtagcactgacagccaacttcatattcgttgctcgagactcaaaaactgggaaagctgctccagtgaatcgactttcgccagaaactgctcatgaaaaacttctttttgtacaagctgaagcaagaagtaatttgagaaaaaggaaaagagaaggggaaaagagggactttgagaatggggagaaaaataggcttcaggccctattggctgaaggaagaatattctgtgacatgccagctttagctgatcgagacagcattcttctaaaggataccagccttgagaatgctttaatatgccagccacagcaaaggaatatccatggtcgaatatttggaggtttcttgatgcatcgtgcatttgaattggctttctccacagcatatgcctttgctggattagttccttgctttctagaagttgatcatgttgatttcctaagacctgttgatgtaggggactttttgcgtctcaaatcttgtgttctgtacacggaggttcacgatcctgatcagccacttatcaacgttgaagttgttgctcatgttacacgacctgagctacgtagtagtgaggtatcaaatactttccatttcactttcactgtccgtccagaagccaaggcgatgaaaaatggattcaaacttcgcaatgtagtaccagcaacagaagaagaagcatggcgtatattagagcgcatagatgctgacaacttgaatgaattcttcagaacataagatgaaaaacaacatttagctcgtaaagtatttaaaatatccaccactaattatgtgagcagaagttcaaagattagcttttatataataaatttttctgcccttgttaggggggcactagtgtggcttatatgtctggcattgttggactgatagaaggcaactggtgcttagacaagtatatgaacctgaaattcataggcacctgctgtgcaagtagtatgaggaaaacatatgtaaagttaatgaaagaaagtttactatgaattctgtagaatcagataatcaatgatggctatagtgaattgccacgtttgttatgcatatgaagcaagggatattattacttagaaaaaaaaaaaaaaaaaa

SEQ ID NO: 3042 - DNA, 1815 bp, Glycine max
tcagctacgtaggccccccccccgaagattgtatttcttcttgcagaagtagagaaaagttgaagaaggaatctcctaagactgaaaaaaacccaatggatttgaattcctctccttccaacaacacaattgccgtgaatggaacaatccccgtcgcttccacgttcgcaaccgccaccgcgccgtcggataaccctccgccggcggacagctccggcgaccggaaacccatcgccctgtggccggggatgtaccattctccggtgaccaccgccctatgggaagctcgcagcaatattttcgagaggcttctggaccctcccagggacgctcctccgcagagtgaattgctcacgagaaccccctcgcagagcaggaccagcatcttgtacaacttctcctctgatttcgtgctcagagaacagtatagggatccctggaatgaggttcgaattgggaagttgctcgaagatcttgatgccctcgctggaactatttccgtcaagcattgttctgatgaagctagcacaacaaggccacttatagttgtcactgcttcagttgataagattgtactaaagaagccaattagtgttgacattgatctcaagatagttggttttgttatatgggttgggcactcttcaatagagattcaactggaggttactcagtccaatgaagagggcaatgattcagactcagtagcactgacagccaacttcatatttgttgctcgggactcaaaaactgggaaagctgctccggtgaatcgactttcaccagaaaatgctcatgaaaaacttctgtttgaacaagctgaggcaagaagtaatttgaggaaaacgaaaagaggaggggaaaagagggactttgagaatggggagaaaaataggcttcgggccctattggctgaaggaagaatcttctgtgacatgccagctttagcagaccgaaacagcattcttctaaaggataccagccttgagaatgccttaatatgccagccacagcaaaggaacatccatggtcgaatatttggagctcgcgggatgcatcgtgcatttgaattggctttctcaacagcatatgcctttgctggattagctccttgctttcttgaagttgatcatgttgatttcttaagacctgttgatgtaggggactttttgcgtctcaaatcttgtgttctgtacacggaggttcacgatccagatcagccacttatcaacgttgaagttgttgctcatgttacacgacctgagctgcgtactagtgaggtatcaaatactttccacttctctttcactgtccgtccagaagccaaggcgatgaaaaatggatttaaacttcgcaatgtagtaccagcaacagaggaagaagcacgacgtatattagagcgcatagatgctgacaacttgaatgaattcttcagagcataagaagaaaaacatcaattagctgataaagtatttaaaatatccaccgctaattatgtgagcagaagttcaaagatgattaactctcttatataataaatttttctgcccaattttaagagggaactagtatgccttatatgtctagcatcattggacttgatagaaggcaactggtgtttagacaagtatatgaacctgaatctagtaggcacctgctgtgcaagttgtataaggaaaaacataggtaagccaatgaaagaaagtttacaatgaattctgtacaatcaatgatggctatagtggattgctacgtctgttacttgtggcatataaagcaagtgatattatattactattacttagaaaaaaaaaa

SEQ ID NO: 3043 - DNA, 1662 bp, Glycine max
ccacgcgtccgggcgttaattctaacagagctgttaacggcgaggttttctcgaagttgctagctcacacttcgcagattggtgccgttgttggcaaaggagggaagaacataacggccattaggaacaataccggtgccaaaattagggttttccctcctccgcaatgcgccaccaaagacgaagagttagttcaaataactggtggaattttggctgttaagaaagcgctgatttctgtatctctctgccttcgaggccgccccccattatgcaaagttccagttacttctagtacaccaactgttagctcttctgataggttgtcctctgatccaaatgctgaacttttccctcaccttaattcattgttaacctccatggaaggtttatctatatacgaacggaccacaaactctaatgaaacctctaaccgtgactcaaaaggtgcagaacacgaagttgtgtttagactcctttgctctaataatgtagctgggagcgtaattggcaaaagaggggctatagtcagagctctagaaagtaaaacaggtgcttctattatctttgcagctcctttaagcgagcatgccgaacgcattgtcaccatttctgctgtagagagccttgagtcttgtaattctcctgcacaagatgctgttattcttgtctttgctagaattattgaagatcacattggaaagggttttctccaagtctctagcatggaatcacctgtaactgcaaggcttttagttgcaacaagcacggtaaattgctttagtggcaatgaaggtcaggtgatttcagaattgagagaagtaactggggctgacatacaaatattgcatggagagtcagttcctaacggtgcttcagatgacgatgtggtggtgcagatcactggagaatacagatgtgtacaaaatgccctatataaaattacttctagaatcagggataatctttcacccaatgaggcggttactgaagcaagaccgaaatccaattggaaagtgaataaggatcctgtaaagggtaaacctttttcccgtggaaaatctgcgtttccttctgggaggtttctgccacggaatgcaggggtccatgctgaaacaatattacaaaatggagaattacatacggatttaagtgagaatttggaacgtgggagaggaaacatgtttgctacggtgacaaatactactgtggagataatagtttctgaacacgtctttggttctgtttatggtgaagatggtggcaatttggatcgaatcagacagatttcaggtgcaactgttacggtttatgatccttccgttggtacaagtggagggaaagttgtcatatctgggacaccagatcaaaccttggcagcgcagagcttgcttcaagcctttattcaaacgggacaagtaagctgatggaaagctgcatttcatcatcagttgatgccatgaatggtgtatatagttatgtcaatgtcacacgacaaccttccccttgtgaatacggattcactctttttttcttaaagatgatgcttgcctccttatagactataacacagattttgctctctttctctccctccctcctccacactctgtctcacttttaatttaaggttcaccatagtaccattttgctccaaaaaac

SEQ ID NO: 3044 - DNA, 1167 bp, Glycine max
cacattggaaagggttttctccaagtctctagtatggaatcacctgtaactgcaaggcttttagttgcaacaagcacggtaaggagctccccccgcggtgaaggtcaggtgattttagaattgagagaagtaactggggctgacatacaaatattgcatggagagtcagttcctaacggtgcttcagatgacgatgtggtggtgcagatcactggagagtacagatgtgtacaaaatgccctatataaaattacttctagaatcagggataatctttcacccaatgaggcggttactgaagcaagaccgaaatccaattggaaagtgaataaggatcctgtaaagggtaaaccttttgcccgtggaaaatctgcgtttccttctgggaggtttctgccacggaatgcaggggtgcatgctgaaacaatattacaaaatggagaattacatacggatttaagtgagaatttggaacgtgggagaggaaacatgtttgctacggtgacaaatactactgtggagataatagtttctgaacacgtctttggttctgtttatggtgaagatggtggcaatttggatcgaatcagacagatttcaggtgcaattgttacggtttatgatccttccgttggtacaagtggagggaaagttgtcatatctgggacaccagatcaaacctttgcagcgcagagcttgcttcaagcctttattcaaacgggacaagcaagctgatggaaagctgcatttcatcatcagttggtgccatgaatggtgtacatagatgtcacacgacaaccttcactttgtgaatacggattcactcttttttcttaaagataatgcttacctcttatagactataaacacagattttgttctctttctctccctccttcccccgcacatagtctcacttttaatttaaggttcatcacaataccattttgcttcaagacccattcatattcatcctcacccctttttctatatatatatatatatatatatatatgcattgttaatgttaatagagtttgcagaaaaaaggaaactaaaaagacaaggatgatatttatttttgtttggaaaatcaaacaaatgaataaataaataatgaataggtaagcttattctgaaaacaatcagtttaaagtaaaaaaaaaa

SEQ ID NO: 3045 - DNA, 661 bp, Glycine max
tcctctagagcggccgctttttttttttttttttttttttttttttgggggcaatctcaatagttccatctcgtgttcctgcaacttaccaaataaagtggcaagagacatgttagacaaatctcttgattcagaaatggccgttactttgggttgccattctctacttaaacatcttaacaccttgtttataagatcctcattttgaaattctttgcctaaggctgctagatgatttactatatgtgtaaatctcttttgcatactctgaatattttcatttgcattcattctaaataattcatactcatgagttagtgcatttatcctagatcttttaacatttgtagttccttcatgtgttaatcgaagagtgtcccacatttccttagcactcttacaatttgaaaccctgaaatattcatccattcctagggcagatgttattatgtttttggcttttaagttgtattgtactctttttctatcctcttcagaccatctatctctaggtttttctatggttatgctttcacttgatgaactatcatctattgaaactctttctactgtggtgggtatataaggccctatttctatggcttcccagatatttagatctattgcctcgataacccttctgtcgtcttctcgcagccgt

SEQ ID NO: 3046 - DNA, 639 bp, Glycine max
tcccacgcgtccgtacggctgcgagaagacgacagaaggggaactaagtagagaataaaatcaaatcaggagagcatgcatatgaacatgatgatgaagaaggtgtgtgggtttgcaatagtgatggtggcagtgcagcttctggtggaggtgagtcccaaggcagaggctgtgacttgtacccctgtggagctgagtccttgtttgggggcaataacttcctctcaaccaccatcaacaatttgttgccagaaggtgagggaacaaaggcaatgcctctgtggttacctcaaaaacccaagtctaaggccatatgccaattctcctggctccagaagggttgctagctcttgtggggttccctttccaacttgttaattaccttcatatcatatcatatatagtatgtaataaaccctgttggctggaaattatatatatatatatataagaatgatatcagtcagtattgcagaataagaaaatgatcgatgctagctagctgtttaagagtgactatatgtttgttagcttgaacaagttaatatatatatgtgtgtgtgtcgaagaaattcattgaataaatttgctgtgtatttcagttcttgaaaaaaaaaaaaaaaaaaaaaaaaccacaaa

SEQ ID NO: 3047 - DNA, 559 bp, Glycine max
cccacgcgtctgaaggctgcgagaagacgacagaaggggggcactcagtagagaattaaataaaatcaagaaagcatgcatatgatgaagaaggtgtgtgggtttgcaatagtggtgatggcagcactttttctggtggagatgagtcccatggcagaggctgtgacttgtagccctgtggagttgagtccctgtttgggggcaatcacgtcctcttcaccaccatcgacaacttgttgccagaaggtgagggaacaaaggccatgcctctgtggttacctcaaaaaccctagtctgaggccatatgtcaactctcctggttccagaagggttgctagctcttgtggggttcccttcccaacttgttagtcactttttacttcatatatatgtaataaactccccctactgttggctggaaattatatatatatatatatatatgttgaagaaattcactcaataaatttgttgtgtatttcagttcttaaaaaataaaaaaaaaaacttttccgtgaaaaacacttgcgtggtctatggatcaattaatctgttaaaa

SEQ ID NO: 3048 - DNA, 827 bp, Glycine max
ttttttttttttttttggaagtaaatatagtttttttttactactacttcttttatagtaagcagttaaaaaatttaatccaacaagaactcaaaagtgaaaacacatgctaaaagctggaaaatgaaaggacaaggaatgtactcatagatagatcatcaatggcgttaggtaaatattcataagcaaaaggaaaggaagtaaagaaaaaaatactaatgttcaagcaaaatacatagccatctgaacagatttctgctggaagccacatttctcgtagaacgccttgttctcgacgctgcaatcaagaatgaccttgtagcatcccatatcccgcgcatgctccgttaggaactcgatcattctcttccccaaatgcttcccgcgtatgctagaatccacaacaacatcctcaatgtgcccaactttgccgcaattcctcaaaaacttcttctcgataaacacgctccccgtcgcaatgatctttccggaagcctcgtcttcgatcacgccgatcacgtgctcgtcgccgagaacactgaggtctcggaatcgatcctcgaattccttgtcggagacggaatcgcatacgctgagttgctgcagtaactcgatgaagccttttcccttgtctgagatctctaatctccggactctgtacttttgttcctcactgttttccatcttctctcctgctttgattccaacattcgaaccctccagaaaatgaaaactgaaagaaattgtaatcaaaaggagattcactaatgcagagatttttcatttttcacgttcttacgctttgattccaacattcgaacagtctc

SEQ ID NO: 3049 - DNA, 737 bp, Glycine max
atacataatttttttatatgcgaacacttcgttcaaggtaagcagttacaaaatgttatccaccaagaactcaaaagtgaaaacacatgctataagctggaaattgaagggacaaggaatgtactcatagatagatcatcaatggcgttaggtaaatattcataagcaaaaggaaaggaagtaaagaaaataatactaatgttcaagcaaaatacatagccatctgaacagatttctgctggaagccacatttctcgtagaacgccttgttctcgacgctgcaatcaagaatcaccttgtagcatcccattgaacgcgcatgctccgtgaggaacttgatgattctctttcccaaatgcttcccgcgaatgctagaatccacaacaacatcctcaatatgcccaactttgccgcaatttctcaaaaacttcttctcgataaacacgctcccggtcgcaatgatctttccggaagcctcgtcttcgatcacgccgatcacgtggtcatcgccgagaacatccaggtctcgaaatcgatcctcgaattccttgtcggagacggaatcgcaaacgctgagttgttgcagtaactcgatgaagcctttgcccttgtccgagatctccaatttccggactctgtacttttgttgctcctcactgttttccatcttctcctgctttgctttgattccaatattcgaacaatgtctctgcttatcgctgcgagcgaaacagctt

SEQ ID NO: 3050 - DNA, 1776 bp, Glycine max
tcgtttcgttgccttctcaatcatcattttaatttaattgatttattccgcgtctataagctttcttgttttgctattgcttgctccgcaatcataatttcatcatcgaatcaaatcaattttgaaggttcattataatggcggaagagataaccaagaacgacgtcggagtaacctccaaaaccaccagaagcagctccaggttctggcctcgttggattcccacttccaccgatcacatcatcgctgccgagaagcgccttctttccgtcgtcaagactggttatgttcaagagcatgttaacattggctctggtcctcctggctccaaagtgaggtggttccgttcatccagcaacgagccgcggtttattaacaccgttacatttgacagtaaaccccattctccaacgcttgtcatgattcatggttatgctgcttcacaggggttcttttttcgcaattttgacgcgcttgcgtctcgatttagagtcattgctgttgatcaacttggatggggtggatcgagcagacctgatttcacatgcaaaagcactgaagaaactgaggcatggtttattgattcttttgaggaatggagaaaagccaaaaacttgagcaattttatactgctcggacattcttttggtggttatgttgctgccaaatatgcgctcaagcaccctgagcatgtacaacacttgattctggttggatctgctggattttcatctgaatcagatgcaaagtctgagtggataacaaggtttcgagcaacatggaagggggcagttttgaaccatctttgggaatcaaatttcacacctcagaaacttgtcaggggtttaggtccttggggtcccaacatagtccgcaagtatacaagtgctaggtttggtacacattcaactggggaaatactgactgaagaggaatcaacattgctgacagactatgtttaccacacattggcggccaaagctagtggagagctgtgcttaaaatatattttttcatttggagcatttgctaggatgccccttcttctcagtgcctcagagtggaaggtgcccaccactttcatgtatggtttccaagactggatgaattatcaaggtgcccaagaagctcgcaagcatatgaaggttccatgcgaaatcatcaggattcctcagggtgggcactttgcgttcattgacaacccaactgccttccattcagctgttttttatgcttgtcgaaggtttcttacacctgatccagacaatgaatctcttcctaaagggctaacctctgcataggttaggtcttaattttgtgctattcctgtctatatgtattttaatatttttttttactaattaaatttcataattgaatgaaatcatatgtatattgtttcagtaaagtggaatttactgaaaatatttgtaatagcaacttcaacaaaaatcgatttgtaggagaaatttcttccctggaaattgttctattttaaatcttgttgctcataagatattatgacttcattcaactaataattcatgtcgtttaggaaaagtagttagttatattaaatttgtcaaaaaaaaatattgttactccaaattattcttttatttttctattcacttaatttttttttattaatggttggagaaaaaattatttaattaggactttatagggaaaaatattatttatttttttaaaaatttaaaaaatatggtattaaaaagaataaataattttttaaaggagtctattatttaaaac

SEQ ID NO: 3051 - DNA, 2496 bp, Glycine max
  misc_feature (19)..(19): n is a, c, g, or t
  misc_feature (100)..(101): n is a, c, g, or t
gtagtttggggtttttttnttaagcacaagaaattctgcttcttattgcaagagcatgatctaccaacgaagttgaaaataagaattacaatggatcccnncttattccaacacacatactacaaccataccatatgggatcactcatatgcagccagacaccacatggcatagcataaccattcgcccattgttcaccataatcaaactcgaattaaaccaccttcagcaacaatggttaacatccaaaccaatacatcttacatcttccctcaaacacaatccactgttcttcctgatccctccaaattcttctcctcaaaccttctctcaagtccactccccacaaactctttcttccaaaactttgtcctaaaaaatggtgaccaacaagaatacattcatccttacctcatcaaatcctccaactcttccctctctctctcatacccttctcgccaagccagttcagctgtcatattccaagtcttcaatcctgatcttaccatttcagccccacaaggtcccaaacaaggtccccctggtaaacaccttatctcctcctacagtgatctcagtgtcaccttggatttcccttcttccaatctgagcttcttccttgttaggggaagcccctatttgactgtgtctgtgactcaaccaactcctctttcaattaccaccatccattccattctctcattctcttcaaatgactccaacaccaagtacacctttcagttcaacaatggtcaaacatggcttctttatgctacctcccccatcaagttgaaccacaccctttctgagataacttctaatgcattttctggcataatccggatagctttgttgccggattcggattcgaaacacgaggctgttcttgacaagtatagttcttgttaccccgtgtcaggtaaagctgtgttcagagaacctttctgtgtggaatataactgggagaagaaagattcaggggatttgctactcttggctcaccctctccatgttcagcttcttcgtaatggagacaatgatgtcaaaattcttgaagatttaaagtataaaagcattgatggggatcttgttggtgttgtcggggattcatgggttttgaaaacagatcctttgtttgtaacatggcattcaatcaagggaatcaaagaagaatcccatgatgagattgtctcagccctttctaaagatgttgagagcctagattcatcatcaataactacaacagagtcatatttttatgggaagttgattgcaagggctgcaaggttggtattgattgctgaggagttgaactaccctgatgtgattccaaaggttaggaattttttgaaagaaaccattgagccatggttggagggaacttttagtgggaatggattcctacatgatgaaaaatggggtggcattattacccaaaaggggtccactgatgctggtggtgattttggatttggaatttacaatgatcaccactatcatttggggtacttcatttatggaattgcggtgctcactaagcttgatccagcatggggtaggaagtacaagcctcaagcctattctatagtgcaagacttcttgaacttggacacaaaattaaactccaattacacacgtttgaggtgttttgacccttatgtgcttcactcttgggctggagggttaactgagttcacagatggaaggaatcaagagagcacaagtgaggctgtgagtgcatattattctgctgctttgatgggattagcatatggtgatgtacctcttgttgcacttggatcaacactcacagcattggaaattgaagggactaaaatgtggtggcatgtgaaagagggaggtactttgtatgagaaagagtttacacaagagaatagggtgatgggtgttctatggtctaacaagagggacactggactttggtttgctcctgctgagtggaaagagtgtaggcttggcattcagctcttaccattggctcctatttctgaagccattttctccaatgttgactttgtaaaggagcttgtggagtggactttgcctgctttggatagggagggtggtgttggtgaaggatggaaggggtttgtgtatgcccttgaaggggtttatgacaatgaaagtgcactgcagaagataagaaacctgaaaggttttgatggtggaaactctttgaccaatctcttgtggtggattcatagcagaagtgatgaatagaatggatttggttattgaacatgacaacactgctgatttggttgttattattattgctactattactatgccaataaaatcatcaaatatgtcttacatcataataaaaaaattattactatgccaataagtcaatgatttcgatatgttatagaagaagaaaactataataaagttacaacaatatcatgatcttctataacatgtctgtttcttaaaaaaaaaaaaaaaaaaaaaaaaaaaaaaaaaaaaaaa

SEQ ID NO: 3052 - DNA, 1697 bp, Glycine max
  misc_feature (67)..(68): n is a, c, g, or t
  misc_feature (71)..(71): n is a, c, g, or t
  misc_feature (73)..(73): n is a, c, g, or t
  misc_feature (76)..(76): n is a, c, g, or t
  misc_feature (79)..(80): n is a, c, g, or t
  misc_feature (95)..(107): n is a, c, g, or t
ataaagaaaaagaccaggccacacaacacaagaaccacgagagtccaccatcggccaagcaattacnnaangnaanacnngtgcataccaggggnnnnnnnnnnnnnttttgccaaaaaaaaaaaaccaggtcgtctcctcttatatatatagcctacatattgttccttcttgcacggtagcaacgctgttttgtagccgttgtctgccttcaaaataaaacaaaaactactcatttctcacaacacaaccttcactcacgccactccaaaagaacacaatgagcgctgcttcttttctattctcctgctctatgcatgtgggtgtgtctcatcccaaagtggctgcaaaatcctctccatgcggtttgctcaatcagccatggaatcatttaaagtcaaaaacaccatttgggcattcaggagttttggaaaaatctaaactttcacaaaaaggtgatgagattctgtggagggcaggggcccttcaagtggaaagtgcaccctccttctccatggggcaaaaatttcaccttcatgatgtgattgaggctcagcaatttgacagagagactctcaatgccatatttgaagttgcaaggagcatggagagcattgaaagcaagtcatctaggagccaaatgctaaagggttacctcatggctactttgttttatgagccatccactagaactaggctttcatttgagtctgccatgaaaagattgggtggggatgttctcacaactgagaatgcaagggagttttcatctgctgctaaaggagagacgcttgaagatacaataagaacggttgaaggttactctgatataattgtgatgaggcactttgaaagtggtgctgccaaaagagcagcaacaactgctagcattcctgtaatcaatgcaggggatggccctggacagcatccctcacaggcactgctagatgtttataccattgaaagagagatagggaaactggacggaattagagttgggcttgtgggagaccttgctaatgggagaacagttcgctcacttgcatacttactagccaagtatcaggacgtgaaaatttattttgtctctcctaacgtggttaaaatgaaggatgacataaaagactatctgacatcaaagggagtggagtgggaagaaagtgctgatttgatggaagtggcttctaagtgcaatgtggtttatcaaactcgcattcagaaagaaagatttggagagaaaattgaactttatgaggaggcaagaggcaggtatattgtaaatcaagatgttttaaatgtgatgcaaaaacatgccgtggttatgcaccctcttccaagacttgatgagattacggtggatgttgatagtgatccaagagctgcttactttcggcaggcaaagaatggtctatatattaggatggctctcttaaaggtattgcttcttggttggtaaggatgcattcacttttcaaagtgaatgggatgatctaatgtcaaaaaaatttagttgttttctttgtttcctttccttgcattttagcatgtatctactgtgtgtccaaatgcagtttttctatttgtaggcgtcacaaatacagtgagagagggagaaataaaattttctttttgagtaaaaaaaaaaaaaaaaatgtttctctctagaaaagtgggaactgggaggggggaaaggagtt

SEQ ID NO: 3053 - DNA, 1691 bp, Glycine max
  misc_feature (12)..(12): n is a, c, g, or t
tcgagtcagctncgtaggccccccccgcaaaacccaaaacctcttcttcttactctcttacgttaattcttcgttgtctatgatggcattggatatgattgatgttgttcccaggacgaggatggaagaagaaaatatagcaatacaagaagcagcttccgctgggttaaagagcatggagcatctcattcgtctcctttctccttcttcttctcttcacaacaaccttaataatctcaatctcaaccacctcgactgctccgaaatcaccggcttcactgtctccaagttcaaacaagtcatcaaccttctcaaccgcaccggccacgcccgcttccgccgctctccaccccaagcccaagcccaagcccaaactaatcctcaaccacaacctcagatccaacaacaagggttcagtttagatttcgtgaagcccaccattctaaactcaaagcccatcaacaaagacgaaactttgactctttcaacaacctcttcttccttcatgtcctccgtcaccaacgacgccagcgtctccgacggcaagatcggacctttcctccctccctccgccgccaaaccccctctctcctccgcccaccggaaaaagtgccgcgacgccgccgcagcactctccgccaaaccctcctgccactgctccaagaaaaggaaatcacgcgtgaaacgaacgattcgggtgccggcgataagctcaaagatcgcagatatcccaccggacgagtattcgtggagaaaatacggtcaaaaaccgatcaagggctcaccttaccctcgagggtactacaagtgcagcaccgtgagagggtgtccggcgaggaagcacgtggagcgagcgcaggatgaccccaagatgctaatagtgacttacgagggtgagcaccgtcacgtgctgccgttaacttccgctgccggcgttagtttcggccattgagttaatcgacggcgtcttttggaaacttggcgggggacgttaaatgagcgtcggatcgtgaagtaacggcggatgcgaacaaggatcgattcggttcgaggacggaaaaagaaaagtggcaactaaagtcaactttcgcgttgtggaatgattttgttgacgaggacttttgtgtaaatttgaccccaagtaaagtagtgcaggtctcaaagaatgaaaattatagtgatctcatctgtttttctttatttctattttttttttaaaaagagacatttatttatttatttatttgatgttagagttgaattggttgaaggatggggctgcaataattttcttggtagaagaataaaaaaatattaatattgggagatctaagttgaaagattagattctttttgttgaaagaaaggacggtgtttgggggcaaaaagtcaaagtatgagggccccacagagaagcatgtggagttggaataataatgataactttagcattgagtaatggaaagtaggggggaagggaaggaacaggtcaatggttgttatggcgagtgggtcccactgcgtgttgttacttcaaaattcaaatatctctttctctctggtctctaatctctaatctctttgactggggtgcgtgtctccaattaagttacgtaacctaacctaactaacattgatgccaaggttgacgggttgaggccatataatagtagaattaaaattttatgaaa

SEQ ID NO: 3054 - DNA, 1221 bp, Glycine max
ctcatacccataccctgttgtttcttttccctcttctttttctatgatggcattggatatgatagatgttgttccaagaacgaggatggaggaagctgcttccgctggattaaagagcatggagcatctcattcgactcctttctccaacctcttataattccaattcttcttcttctcctcttctcaataccaatcccaacaacctccactgctcccaaatcaccgacttcaccgtctccaacttcaaacaagtcatcaaccttctcaaccgcaccggccacgcccgcttccgccgctctccaccccaagcccaagcccaagcccaaacccaaacccaaacccaaacaagtcttcagcctcaaccagaaacccaacaagggttcagtttagatttcgtgaagcccaccattctaaactcaaaacccagcaacaaagacgagactttgaccctctccaccacctcctcctcctccttcacgtcctccgtcaccaacgacgccagcgtctccgacggcaagatcggccctttcctccctccctccgccgccaagccacctctctcctccgcccaccggaaaaagtgccgcgacgctgccgccgcactctccaccaaaccctcctgccactgctccaagaaaaggaaatcacgcgtgaaacgaacgattcgtgtgccggcggtaagctccaagatcgccgatatcccatcggacgagtactcgtggagaaaatacggtcaaaaaccgatcaagggttcaccttaccctcgagggtactacaagtgcagcaccgtgagagggtgtccggcgaggaagcacgtggagcgagcgcaagataaccccaagatgctaatagtgacttacgagggtgagcaccgtcacgttcttccgttaactgccgctgccggcgttagtttcggccattaatagagttgagtaatcgacgtcgtcgtttcggaaacctgacgggggacgttagatgaccgtcggatcgtgacggtaacggcggatgcgaacgaggttcggttcgtggacggaaaaaagagggaatgaaactatgaaagccaacatttgcgttgtggtctttgacggagtctcttatgttgacgaggacttttgtgtaaatttgacccaaagtaaagttagtacaggtctcgaaaaaatgaaattatagtgatctcatctgtttttcttttatgcaaattattaattctttatttcaa

SEQ ID NO: 3055 - DNA, 1592 bp, Glycine max
aaaaaaggacttgaattcaatccctttgagttggaagcctcttaaagcctttaaatctgtcttttagttcccttttcagagtctgtctcaattccccttcccattatctcagttgtctgtgcctgagagcaagaacagccacagaaactgagaagaaaagaaaaaaagaatgctatcttcaaatgttgttccatcatcatcccctgtcactttctccaaacccaatcaccattttttcatcaatgcatctcccaatcccaaaccaaatcttctcaggtttcaggcccaacacagaaccactcctctcaaaagttccaaactttcttttatgccaacgtctcagatccaacattcaatcgcaaagttaggctctttcagcagattcctctcacacccttttgagctctcatcaaaacccagataccaaatcgttaaggctgcatcagaagccaatcctgaaggagaaaatgtagcccccactgaacctaattctaaaaatctcaaacttggtcttgtgtttgggctatggtacttccaaaacattgtgttcaacatttacaacaaaaaagtgttgaacatattccctttcccatggcttcttgcatcttttcagctctttgttgggtccatttggatgctggtgctttggtccttgaagctccaaccttgtccaaaaatctcaaaacccttcatcattgctctccttggacctgctttgttccacacaataggccacatatcagcctgtgtttcattctccaaggttgctgtttcctttacacatgtcatcaaatctgcagaaccagttttctctgtcatgttttcttcagtccttggagataagtaccccattcaggtttggctttcaattctgcccattgtgcttggttgttctttagctgctgttactgaggtgtctttcaatgtacaaggattgtggtgtgcccttattagcaatgttggttttgtgttgaggaacatctactctaaaagaagtctacagaatttcaaggaagttgatggcttgaacttgtatggatggattaccatactttcattgctttatctgtttccagtggctatttttgtagaagggtctcagtggatcccagggtattacaaggcaattgaagctattggcaaagcatccacattttatacttgggtgttggtgtctggggtgttctaccatctttataaccaatcatcttaccaagcacttgatgaaattagcccattgactttctctgtggggaacacaatgaaaagagtggtggtgattgtgtcttcggttttggtgttcaggaatccggttcggcctcttaatggccttggatctgccattgcaattcttgggactttcctgtattctcaggcaacatccaaaaagaaagcaatgaaaattgaaggtgaaaagagtagttagagaaaaagaaggaaaaaagaagcattacacagaaacaattgtttgattatttgagtgctactcttagccttgttagaattagacattaaataagatcttccattttggtttcttttgtactattgctatggtttttctattgatattttaaagcgccttttctgtt

SEQ ID NO: 3056 - DNA, 1342 bp, Glycine max
  misc_feature (786)..(786): n is a, c, g, or t
  misc_feature (1149)..(1186): n is a, c, g, or t
  misc_feature (1274)..(1278): n is a, c, g, or t
tagggctggaccatctgaggttagggtgattcctccatccagggttgtatctgttgctggaaaggtcataattgcttactgtggttgattttgctgctgaggttgaggaggtctattgtaaatatttgcagcataagcttcaggctgctcaattgctccaggttgctgcatggaagggcaaaggtctgtatggtggtcagcagaggagcacaaaccacaaacccttgcgacaggtacagatttctgattcaaggccagctgggttaccaagttgaccaacgcatccagtttgccttcaagcttcttagtttcagatgatgcagatgggtttgtagctacctcatgcactcctctaatgactatggcatcatttctggcgctaaactgctgggagttggaggccatcttctcaattaaatttctggcttcagcaggagtcatgtctccatgggctccaccactggcagcatctatcatacttctctccatattactgagtccttcataaaaatattggagaagaagttgttctgaaatctgatggtgggggcaactggcacatagtttcttaaatctctcccagtactcatacaggctctctccactgagttgtctaatacctgagatatccttcctgatggctgtggtcctggaagcagggaaaattttttctaagaatactctcttaaggtcatcccagctcgtgatggaccttggagcaaggtaatacagccagtcctttgccactccctctaatgaatgaggaaaagccttcagaaatatgtnatcctcctggacatcagggggcttcatggtggaacaaacaatatggaactccttaagatgcttatgaggatcttcacctgcaagaccatgaaacttgggcagcaaatgtattagtccagtcttgagaacatatggaacaccctcatcaggatattgaatgcacaagctttcataagtgaaatcaggtgcagccatctccctaagagtcctctcacgaggtggaggttgagccatgttctcagtatgaaaattagtagttgaatgctcaaaatcagaatattcagaatcaccagcaacagaatactcagaatgctcaaaatgctcaaaatgctcagaatgcacagaatgatcaggatgcacacnnnnnnnnnnnnnnnnnnnnnnnnnnnnnnnnnnnnnnggatcaaacggttgtaaatcacctgaattgcccctagtcatgcactatatgcagcaaataatgtgcttctcaacaagcacctaacaannnnntaaaactaccactatagtcaaacgatatccaaatgagcttagatgttttgagcaacatcctaaa

SEQ ID NO: 3057 - DNA, 1659 bp, Glycine max
  misc_feature (1457)..(1457): n is a, c, g, or t
  misc_feature (1460)..(1460): n is a, c, g, or t
  misc_feature (1462)..(1462): n is a, c, g, or t
agcgaatattggatatgtgattcctacaactgttgtatctcattttttgaccgattatgaaaggaatggcaggtatactggtttcccttgccttggagtacttatacagaagctagagaatcctgcactacgtgcatggttgaaagtagctacgtaggcccccccccccccacgtagagttgaaccaacttctgatgcaaataatgtattaaaggagggtgatgtgattgtcagctttgatgatgttcgtgttggtagtgaaggaacagtcccattcagatcaaatgagcgaattgccttccacttcctcattagtcaaaaatttgcaggtgatactgcagagcttggtatcatcagagcagggacattaatgaaaactaaagttgttttaaactcacgagttcatttggttccctatcacattgatgaaggtctgccttcctatctaataattgctggtttagtattcacacccctctcagagccattgattgaggaagaatgtgaagactctatagggctaaaattattggcaagggcacgttattcattggcaaagtttaaaggggagcaaattgtaattctttcacaggtcttggcaaatgaagtcaacataggttatgaagatatgggcaatcagcaggttgtaaaattcaatggagctcgaattaaaaacattcatcaccttgcacacctcatcgattcatgcgaagacaggtatctgcgttttgaatttgaagacagctatgtagctgttttagagaaagaagctgttgctgctgcttcaccctccgtactgagtgattacggaatcccatctgaaagatcttctgatctttcgaaaccttatgtcgatacactagaagtagaaggtgaccaaccagcagaccaggaatttggtgatagcccagtttcaaattatgaatttggccctgatggactactctgggcataagaaacttgcatctgaagatatctgtgtgaaatttctcatggcggcagcatttgtagcaagtgatcacaattttgggctgcagagaaagtgctgcaacaacatggggcaaccttgatgtgaacacatgaatggttttatgctaccctgggggcatgttagaagcaacctatttaacagaaaggcgtaggaccataggaaagagagttcgtgattattttttcccatgtatgttttattctttcttgtcactcttcttgatttgataaacccaaatgatgtcttcaggtttgatatctacatttttcacgcgcattctgtatttttaaggaaatagtgaacataagagtgacttgtatacgcctttgatgcaatcaatgtaacattttacagtacattgattttaagtttgttctgattgaagttaaatggcatcaatttaacatttatgaagttaaaaaaaaaaaaaaaaaacaaacaaaaaacaacaatttctgccttccgnatntncgttttcttgtcgcccgggctacccactatttatagcgcgcccaccccggcggacccccctttttttccccttagggaaattaatcgagctggcgtcatagagcatatctctttccagtataatcctcccccacactcccacaaacactcatctgattataagtgtgctccgtgttatagtgttccttctattctgc

SEQ ID NO: 3058 - DNA, 1882 bp, Glycine max
  misc_feature (11)..(12): n is a, c, g, or t
  misc_feature (21)..(22): n is a, c, g, or t
ccgggtccggnnattcccggnngtcgacattaaagctccaggaaaatggtcaccatatgaggaccctctttctctttctctctcttttttctcatacacagttcgtgacactcctttttcatgtttggggactctcttctgggctttcttcggtttaagccttagaagacggagattattaaaacatgggttgctttcgttgcacaggcaaatcaagcaaaaaaaccaacaacaataacattaatcacgccgagaagcacaccaatcacaacgagaaacatactgctgctgataaggtcaaagttgatttgaatgtgaatggtaaacaagaagataataatcctaagcctgatcagctatctctggacgtggagaatttgaatttaaaagaggtttccaatgaaggaaaagttaacagttaccgggcacagacatttacttttgctgagcttgcagctgcaacagggaatttcaggtcagattgctttctgggtgaaggagggtttggcaaggtttataaggggcgcatagagaaaataaaccaggttgtagcaataaagcaactagatcctcatgggcttcaaggaattagggaatttgttgttgaagtgttgacattgagtttggcagaccaccctaatttggtcaagttaattggtttttgtgctgagggagagcagaggctattggtttacgaatatatgccattgggatctttggagaatcatttgcacgatcttccgcgtggtagaaaaccgattgactggaatacaagaatgaaaatagcagctggtgcagctagaggcttagagtatttgcataataaaatgaaacctcctgtcatatatcgggacctgaaatgctccaatatcctgttaggcgaaggatatcattccaagttatctgattttggcttggcgaaagtaggaccaagtggtgataaaacccatgtttcaaccagagttatgggaacatatggatattgtgccccagattatgcaatgacgggtcaattgacgttcaagtctgatatttatagctttggagttgttcttttggagatcatcacaggcaggaaggcgatcgacaatacaaaacctgctaaagaacaaaatctagttgcatgggcaaagcctttattcaaaaaccgtaaaagattctgtgagatggttgatccattgcttgaaggtcagtatccaataagaggtttgtaccaagctcttgctattgctgccatgtgtgttcaagaacagcctaatatgcggcccgaaacaactgatgtggttacagctctaaattaccttgcatcccagaaatacgatccccaagttcattcaatacaaagctgtagaaaaggtttatcttctccaagagaaagaagcaatggtcatagacgcactgtcagtaacgattctgatccaagagcaagaagccatgatcatagacgaattgtttgtaatggttctgagacaagagcaagaagcgaaggtcgtcatagacgaactgttagtattggtaatggtcatagtagtggttctgagacagaaagctctcgaaaaggtgtagcttctccaagggtgagaagtgatggtcatagacattttgttagtaatggttctgagacagacagttctggagattagaaatgtgatgtgtttttggatattcatattgtaaaatgcttagttatccaattttgcttcatataaagaagattcttctttttggctcctccaaaaaaaaaaaaaaaaaagaattcctcagccgggttcaagatggatgcctctcctcgggaatttttgttttgctccatcttttagaatttatcctctgccacaagaatccactttttgatcttaatgataattgcagttcctgggtc

SEQ ID NO: 3059 - DNA, 2208 bp, Glycine max
atgaacatgtctgctacagttggaaaaaagagagatggagagaaaataaaaacgggaggacccatgaagcttattaagaggaatggctaatgagaacaaagtggctatgcttttatcccgagcaatgcttcttcttgcttggagaccccacattttggaacaggagaaactcatcatgaagattgaggaagatggagatttatgaatgattgcagttgcacccacataaaaagtcatgtccactccacaagagggtttcagtgataggaataggagaattttctgctcctcaagaggaaagaaataaagagtcttggtatttgtgcacattcactgatgaaatccagccaaagttgcacgttcttggttttggtaactgatattataaagaatgtttgctggttccaaggctattccatctgaatttaatgaatgacagcactgcacttgttccaatgcaccaggtcctctgaaacggtggttgctaccttggccccccccccttttttatgggatttgaaaaaatggatcacagacattgaagttgacctatgtgttgatattcttaaatggccaaaaagaagagctggtttagtctggtgaagaggctctttatatgggacacacattccacacaagataagaaggagaaaagaaggaaatggatatttggaaggctaaagagcaagagattgccttcaattaaagctccactaccctcaaaaggaacaacactaagtgaggcagagcaagaacagagcaagcatgctttaacagtggccattgcctcagcagcagctgctgaagctgctgttactgctgctcatgctgctgctgaggttgttcgcctcactgggcaacgcaacgaaaactcagaagaatctcaacctgttaaaactaggaatggtgctccacaatccacataccagtgccagagggagattaaagaatctgctgcagccatcaaaattcaaactgcatttcggggttacctggcaaggaaggctttgagggcgttgaagggaatagtgaagcttcaagctatcattcgtggcagagccgtaagacgccaagctatgagtagtcttaagtgcttacagtccattgtgagcatccagtcacaggtctgtgcaaggaggctccaaatggttgaagggagatgtgattactctgaaaatgaagagatgcaagattctaaagacaaaataattaggatggactcaaacagtgaaagaaagtgggatgaaagcactgtattgaaggaagaggtagacacctcttgcacaagcaagagagaaagaacaaaagaatactcatttaaccacagaaggtcagcagagtcagaaagaagtaaagtaaatggaagatggaggtactggctagagcagtgggtagatacacaactttcaaagagtaaagagcttgaagatttagactcagtttttagctcacattctagagctggggaggaatatggaggaaggcaacttaagctgagaagtaatattcagagacaaaatccagttgaaggattggattctccaatacttggttcaagaagatcttttcctcataggaggcagtgttcagtgggagaggaccactcatttttaagctctcctgcaactccagcatacatggctgcaacagaatcagcaaaagcaaaagcaagatcaacaagctccccaaaaataaggactggggggaatgtggacatgaactctgatagctattcaccatgcaagaaaaagctatccattgcatcttctattaacagtgaaatgcttagtaatggtagggtgggcaagctcagtgttaaccagcagcaaagatcaccaagctttaagggactttcagtgcctataaaatcaagccgaacaactatcaaggatctcagtattaattcagattgctcactccctaattgggatcgacaggctttcttcaaatgaatctatgaatgctgatgttactctttcttgcattaacacaattccttgtatcatgtgaaggcttggaaacaataactgtttataaatatgtatgatatactatatgctattggatgttattttggttgggaattgaacattaatgtgacagaaaatagttattctggagatataagatgaattgtatgattaagaaagaagagatataagatggattgtatgattaagaaagaaggaaaggaaaattagtatttta

SEQ ID NO: 3060 - DNA, 938 bp, Glycine max
attactaattcgatctctagtctgactacaattaaatggctcctaaatcactaaacaaaaaccatattccgtcacacacacgcggacttgtacgtagcggtgcaaggcaagctaacccatacacccacctctacattgaacaatagcaatatgagcttgttgatgagaaatctattcgttaaactattgtctcaaatctcaaatatgtaataaataagctggtatatgacatcacattcaatccaaccaccaagtgtgatcgatgcatgaccagtcgatgccaagtctactaatcaaaactgagatcccctattaatcatcttgcatttttcatgttcctgtgtatgatgattttacttctctgagattcaaacagttttggttgactcagtcttgaggtttcatggcagggaagagaagaacctccttaatattctgtgaatcagtcagtaacatggtcaaccgatcaatgcccaaaccccaaccaccagtaggtggtaaaccatactctagagccgtacaaaatgtttcatctaaggccattgcttcatcatcgccagattgccgatccttgagttgttcagcaaatctctgtcgttgtactacagggtcattcaattcagtatatgcatagcaaagttcacgtttattaacaaacaattgaaaacgttcagtcaggcctggtttggatctgtgccactttgctagaggactcatgatctcaggtggtttatgatgaatgtaggatttacacaggtttcttccaaaaagtgacccacaagcgagaatgattcgttgtgcttttctatagtaagtactgtgtagagtcctgaacctttcctgcccagctgcaacagatttgaacgtatatggttgctgtcctgactccgcacaacggtcggagtgaagttggggggggggcccccgcggcgccgcga

SEQ ID NO: 3061 - DNA, 835 bp, Glycine max
ccagggtcctctgttctggactctgctgtcttcggcgcgccctcgagccgatcggctcgaggttggttttgttgccaagggaaatcaagcaaaaaatcggttgccgaagaagactaccgcgacagcctcgaccagaaacccaccaatttcaccgcgacagatagcgtaaaagttgatttcaaagtgaatgggaataaggaagatggttctaaaggtgatcaacttgctctggacgtgaagagtttaaatttgaaagaggaggcttctcaggatagaaaagataatggcaatcgggcacagacattcagttttaatgaacttgaagctgcgacgggaagttttaggttggattgttttttgggtgaaggaggctttggcaaggtttacaagggacacttggagagaataaaccaggttgtagctataaagcaacttgaccctaacggacttcaagggattcgtgaatttgttgttgaagtgttgacgttgagtttggcagatcaccctaaccttgtgaagttgattggattttgtgctgagggagagcagaggctattagtttatgagtacatgccattaggatctttggaggaccatttgcttgatattcggccaggtagaaaaccacttgattggaacacaagaatgaaaatagcagctggtgcagctaggggtttggagtatctgcatgataaaatgaagcctcctgtaatatatcgcgactggaaatgttctaacattttgttaggagagggatatcatcctaaattgtccgattttggcttggcaaaagtaggcccaataggtgataagacccatgtttaactagggttat

SEQ ID NO: 3062 - DNA, 1383 bp, Glycine max
tttgttggtaaataaagaaaaagaaattgtcatcacatgaactacactcaaaattttggccaataaggatacaattaaaactgtttctttttcttttccaaataaaaatggtgtctctgaaaattcaatactgcccagaccaagtgtcttaggcctatttcaggccaaagtgcagttggcgcatacaaagggcaggtactagtctgccaaagaagaaaattgctgagtcgagcctctccagaagttcggatcaagatgtctgggtcaggtgccactgccatgtacatgtgcttctcaatatccaccagttttattaaaggaacatcaccctgcttatacttcctctcttcagtcatttcaaacagttcattgcataatgtgatttcagcttcactattgttttcgctatgtttctctacggtatgctccaacatgccatctttctctccagcaccttgcactcctttaggtacactgctacaagctttggttacattttgatagtctttacttgaatcttgaaaaagcaaatcaaaaccatttcctttcaggccctgatcaattcttgcaaatgcaccatttgttagctttgcttcttttgatgcttgaacttcattccatttttccttgcagcattcttgaacggcatgcacaatctcgtgacgagaagtataggctacgcaaatcaaaagaactctctggttgttgtgagcagtaactctcattgctttttccacagaagccctgacaggctcagtcaatagttgcaagtctccaatgaaatgtaatcgaacaccgtattcattgataagactttcttgttgaagtaactcttcaatcttttcccgcatcaattccatcaaggactgaacctcgttaggcttccttttgaagttatcaatgctgaatgcatagacagtgacatacttcactcccaattcataacagtatctaaggatggacatgagagcagtaaatccagccttatggccatcaccttcttccatgtttctcttctttgcataccttcgattcccatccatgatgaaagcaatatgacttggcacaggacccacagataaaatggcaaacatgcatcttcttagataataatataaacctccaagaaaatggcctataatatttccagaagttttctgcattgaactgttcagttatgagactttaagagtctaatattaacctaaaattaaaaaagaaataacaaaaaataaattattgtcccctctgtgtcatttacgtgtggtctgaattgaagcaaaagccgagagattttgagaccaattggctcactccatcgttttaattcccaaaacgaagtgaataattatcataagtgacgtggcaataaaaaaagtgttt

SEQ ID NO: 3063 - DNA, 1867 bp, Glycine max
caaatctttgtcgttgtactacagggtcattcaattcagtatatgcattgcaaagctgaaaagtaacagcgatcagaagcatgtttccattttattttaaatagtatctctcctgtatttcctggccatagttcatgcttattaacaaacaattcaaaacgttcagtcaggcctcgttttgatctgtgccactttgctaaaggactcatgatctcagggtggtttattatgaatgtaggatttacacacgtctcttccaaaaagtgaccaacaagtttatccaacaaacgagcagttgtctcagggggaggacatttgatctcatacttcaagcacacgtccttcaaatattgattagcttcctcactcgacaagtctttgggaatacttaggcctgccatcttctctaattcatcaatcatgtcaatccttctaaaaggaggagtaaagtcaatttcaataggttccttgtcaatcccatcagcatgatacttgattttatagctccctttggtaagttccttaaccataccactcaacatttgctctgttatatccattaagtcgttgtagtccttataagccatatagaactcacaggtagtaaactcaggattatgggtcaaatctatgccctcattcctaaattgtttaccaatttcataaacacgatccagtccaccaacaaccaactccttaagataaagttctggagcaatcctcatgaataacctcatgttaagatcattgtgatgtgttacaaatggacgggctgcagctccaccagcaatcatgttcatcattggtgtttcaacctccaagaaatcaaggtcatcaaggaacctcctaatataagaaatgattttagaccgggtcttgaatatttctcgaacctctggattaagcatcaaatccaaatggcgtaaccgatacctagtttcctgatctttcaaaatatatgtttcaggattcctggtacttcctggtacccatggatttttcttcaaatttgcattatccgcagcagcagcagacttttgccttggcatcatatgcaaacaatgagacagcaacacaaaagtcttggggaaaatactaagttcacccttcttacttttgcctggaaacccagtgataccaactatgtccccacgcttcacattagaatggaatttggaaaatccagcctcatccaagtctgatttactagcatcagccataacctggaccttgcaaccacccaccgtgcaggtcataaaagacaagcttagaaccagaggtgcgtttgtgcatgatccggccagccaaagacacagagacatcctcaatgtgttgcccgttgcttaaacctccatattccttgatgtattgatcaatagacatagtgacaaagaatttatgaggatacgggttcttcccttctgtcttttgaactgcaagatactttagcctgttctcaaggtattgagttggatccatatcctcatcatcagctggtgcagatttgttatcctttgcctgttgtgcttcagctgcctttttggccttctcctcatccttgcgcttcctttcttcttctctctgtttgttcttcagctcccgcttcaacgcattcttgctcatggtttcgccggtgccggtgctggtgccagtgtcagtagatggtacctccgaaggaacttccattggtggagaaagaaggaaatcggaggcgaggcgaggcgaggcgaggcgaagggcaaagtcgaagtgttcttacgaacggagcaaaacgttagggtgagtaatggcttacaagactttggaaaggtttagggtaacggtttacaggagaaagtcttgggtgaacatgcaccccaaacatcag

SEQ ID NO: 3064 - DNA, 820 bp, Glycine max
attccccacatagctttgaacacaaaacaaaaagtttacgttacaaatcgcataataaccgtcctaagtttattgagagaattttgcaagtgtgagaaacatggcatctcgtcaaaacaacaagcaagagcttgatgaaagagcaaggcaaggagagactgttgtcccgggtggaactggtggcaagagcctggaggctcagcaacaccttgctgaaggaaggagcaagggagggcaaacaaggaaggaacagctgggtacagaagggtaccaggaaatgggacgcaaaggagggttgagcactgtggacaaatcaggagaagaacgtgctcaagaggaaggcattggcatcgatgagtccaagttcaggactggtaataacaagaaccagaatcagaacgaagaccaggataagtgataatgtaacacccttcactagcatgtgtagtgtgttcttatgctagcttaaatgtgagtgtcaagtgttttaggaagtaggaaaagaataggttataaaaaataatgtttaggcaatagttatataggtcaaagtgtcatgtcatgtgtgtcgtgaaataattagctagcatgtttaggttgttttagggtttcttttgcatgtgtgtttctcttatgtgtgtaagtgatcagtgaggcatggctctatagctatccagaaattagcacaagcaagcatgtgcctccatttcactaatgtgtatgtatctatggtgtgaccacgttcaatactagaatgtaatggtctcaactcttatgttaacttatcgtggcacaaacaattacgtacgtactcaactta

SEQ ID NO: 3065 - DNA, 2919 bp, Glycine max
agcaaacaaacacacggctgtagtttctgatttaggtgaagtttttacttggggttgcaacagggagggacagcttggttatggaacctcaaactcagcatctaattacaccccacgtgtggttgaatccttgaagggaaagactttgaccagagtttctgctgcaaaatatcacacaattgtattaggatctgatggcgaggtatttacctggggtcatcgacttgttactccaaaacgtgttgtagttagtaggaacttaaagagaagtggaagcactctgttaaaatttcaccgcaaggaacggcttagtgtggtttctatagctgctggaatggtacacagcatggctcttacagatgatggcgcattattttattgggtctcctctgatcctgatcttagatgccaacagttatatgctatgtgcggaaggaatatggtgagcatatcagctggaaagtactggactgcagcagttacagctacaggtgatgtttacatgtgggatgggaagaaaggtaaggataagccccttgttgcaactcggttgcatggtgtaaagaaggctacatcagtttcagttggtgaaacacatttacttattgtggcttcactgtatcatcctgtctaccctcccaacatgattgagaattctcagaaatccaagctgaataacaaggatgatgtggaagagttaaatgaagacattttatttgaagatatcgattccagtaacataatatctaatgtgcaaaatgatactttaagccagagatctatacccagcttaaaaagcctttgtgaaaaagtagctgccgagtgtctagtagagccacgaaatgctgtacaactgcttgagattgctgattctcttggagctgatgatttgaagaaatattgtgaggagattgtcatgcgcaaccttgattttatatttgcagtatcatcacatactgtagcaagtgcctcactagatattctggctaacctcgagaggttgttcgaccagagatcatctgagccatggagtcaccgtcggctccctactccaactgctactttccctgccatcatcaacagtgaagaggatgatagtgagatagagtttcagaggactcgtgacaaacccatgaaattggagaaagtcctcaggctagattcttttctacagccaaaggatgatcctaataaagaaatctccaaagtagtccgagctataaggaagaagttgcagcagattgagatgcttgaagataagcagtctaatgggcatcttcttgatgaccagcagattgcaaagcttcaatctaagtcagcacttgagagctcacttgcagagctaggtgttcctgttgagacatcacggtataaagaatcatcttctatgttaccagaagggaaaggtagtaagaagggtaaactatcgaaaaaacaaaggagaaagagtggcaattcaaacatagagcagacagaaatagaatctgtttactctaaaagtgaagccattcccaaatctgaggacctgttggacattgacatcatgggggttcctgattcaaaggtggaagaggatgccgtgtgtgaacagatcagcgcagacgagggtggaaaagatttagcttttgttgtgcagaagaaagatgctttagagttgttgaaagccaagggtccatcaccaaaggcttcaaagaagaagaggagcaagaagggtgggctttctatgtttctgagcggcgctcttgatgaagccccgaaggaggtggctccccctccaccaacaccaacaccaaaacacgagggtcctgcatggggtggggcgaagttcacgaagggttctgcttctcttcgtgaaatccaggatgaacaaagcaaaataaaggtaaacaaaccggctgggagcaaagataaggttgaagatcttcctgattttggcagtgggggcaaaataaagttgagttcatttcttccttccagcccaatacctgttacctcgtctcgaagttcccaggtatctgatggagaaataagcacccctccttgggctgcttccggaactcctccccaaccttctcggccatcgttaaggcacatccaaatgcaacagggaaagaaacaacaaagcctttcgcacagtccaaagactacaacagctggattttccatccctacctgtcaaggctcgccgtccgaaacaaccggtgtgagtcgctggttcaagcctgaggtggaaacaccgtcctcaattcgttctattcaaattgaggaaaaggctatgaaagatctcaagcgcttctatagcagtgtcaagattgtcagaaagcaatcttgatgccatttaataatttatctaataaagtagcaagagggctctttcctgttctcctctaccttgagcattaccattttttctcatccttttttcactttccttattagtacaatgactgaattaatctgtacagatagttgcagtgtacatcctttctttccatatcaaaattgtagttttagtttcttagtatctgggtctttttccattttctgtgtttccaaactatcactgtacatgacccaagatttattttatgtactcatttttaaccgtctcaagttagagactggtcaataatgatcctgaacctgatgtctaggacagccacggttacagatttccctgactcaagttgcttcaaggctcaagaatgtcagaataagagggaacttctttccaaataaggcctttgtatggtcccatacttaggggtattgcatcaatcttagtagactctatcaaccttttagctttgcaagtcaagttcatgtgttgtgtcccttctcaactgcaacagccttaatgttgttccattgaggatgatttgcactttggagtgataataactaaaaaaattgattttt

SEQ ID NO: 3066 - DNA, 1446 bp, Glycine max
acgagagataatcttgtgttgaaggcggtgacccgtataaacaaacgagggttgtaatgatctttgtggttgcatatgaatatgaatattaattagatggattaacaaaacagagaatgttgaattgaattgagaagatgacaaacccattagagagataccaaaaacttgggctaagcgagtctctaccgaaaacctacagatacccaattgcgtgcagagagctaagctttattctgagggaagcttttcatcaattccccaaaaatttgcaatccatcgtcttccaagacaccctctccgccttccgtctcctcccagaaatacagactcagagtgctgtttcagcagtccacttcctccttcagagtgtagaagcagcactaccaaagcaaaaaaagaatgtggctgtaacagaatttaagcatgcaatggttgctcataagaggcgctgtaaagctcaccaggtagagaaaggttcattgccattgccacaagatattcttgtgctcattttcagttttcttgatatgaaatctttagtctcagtggggcttgtctgccggtcatggaatatagctgcaaatgataaccatctgtgggagatgcagtatgttgcactgtttggtggtcgtgctaaactggttgaaggcaagaacaataggcttttgctggaacccatagatactagaatcattactgattggaaagaagctgttaaaggagcatatactggagcattatccaggatattaacaaccagtcggggatattgtggacactgcaaatcagtagtttggttaaataactcaaaatgccccaatgtacactctggaatatctgaaattcaagatattaagcctgtaacagcattccaggctgtggaatatgttctagaggattctctatcagtaacatcttcctcagacagtgatagtgattcggaaggaggaacagtttctaggttatgggcatatcccaagcatataagaaaataatatgggacagctttttgctttgaatacattcacaattcacaaatgagtaaaaaaactcccaacgttcaccgggttcatattcatcgagaagcaagttttatggcccttttcataaccaaaaacaaaagctgattgtaatgtatctggaggctttggggtagaaaaataatttctttaaaaaagagaggtacttcagaatacctcatttgtgagtatgaatgatgatgatgatgatgtggttgttgttggttggagcaatgggtctatcatgtctcgaacctgggaccggtaatgctattgcaacaagcaaaccattacaccaggctggggcaatatgctggaattcagctgtcaagtgtttttttcttatatataaaaagtaggaaaattattacttgttattcattttaaagaaatataaatatatttaactaaaaaaaaaaaaaaa

SEQ ID NO: 3067 - DNA, 1440 bp, Glycine max
aaggggaataagttttggatgaggtggagagcgctctacgaaacccacataaacccttccgggtgagggtgagagtgggagagatctgattgtgttgtgaatctcagacgcgacgccatgagaagggtaccttccattctcttcagaacccttgccgcccctcgcgccgccacctctttcgccgtccccaaccgccttcttcaggccgcgctctacggcagcgccaccgccgcctcccgttctcaccgccgccgcttctcctcgctcctaggtcccttcgccgccgcgtccctcggggtcgccggggctctgatctctcaggaagtcctcgccaaggagcccccgccgcccgaggctctcccgaacgacgtcgttctctaccagttcgaggcttgccctttctgcaacaaagtcaaagcatttttggactactacgatataccttacaaagttgtggaggtcaaccctctcagtaagaaagaaatcaaatggtctgagtatcagaaggtgccaatactgatggtagatggcgagcagctaaatgattcatcagttataattgataagctgggacataagattctgtcaaagataattgtagattcaacttctgaggatgaagagacaaaatggcggcggtgggttgataatcatttggtacatgttctgtcaccaaatatatatcgaaatacatctgaagcacttgaatcctttgagtatattacgagcaatggcaatttcagctatcttgaaaaattttcagtgaagtatgttggagctgcagcaatgtattttgtgtctaagaaactgaagaaaaaatataacattactgatgaacgtgctgctctttatgaggcagcagaaacatgggtagatgctctggatggccgggagttccttggagggtctaagcctaacttagctgacctggctgtcttcggggttttaaagccgatccgctatttgaggtctggcaaggatatggtggagcatacacgtattggcgagtggtatgcaagaatggagagtgctgtgggagagccttccaggattaaagcctaaattgggttctttcttgtcctgacaattgacatttatttttttggcttctactattattatggtcttgcttttgcctccactggtttgatggaaaacatttaggtttctcagataacatatttggctctttagaacaatactacaatgtggtattagtgttatatataggcaaagttttgctgaacaattgattctttagaaaaattattcttctattatagctgctgttattgtaaagattaaagaaatctttgagctgtatcaaagaataaggcaacgtctgccatgcctgtgatattttaacactttggttttgattaatttgatgcataaatgacttgatagagtttaatattgagtttaaaaaaaaaaaaaaaa

SEQ ID NO: 3068 - DNA, 1963 bp, Glycine max
cagaacatggtactgtgtcgagtggcgtcgcagccccccccccctggcaaaaaaggattgggtgaaccaacagcaaccaagtcaaaagaccagtcagtaaacactgataaagtgaagaaggtgaatggagatgtgtctgagaacaacaaaggaggaagcaaaccttcagcagaaatagatcttccagatgctgaagttggaaaagttcgcttgcgatttgcccctgaaccaagtggttatcttcatattggacactcaaaagcagctttgttgaacaaatattttgctgagcgatacaagggtcaggttattgtgcgttttgatgataccaatcctgctaaagaaagcaatgaatttgtggacaaccttattaaagatattgatacattgggtatcaaatatgaacaaattacatatacgtcagattacttccctgagttgatggagatggctgaaaaattaattcgccagggtaaagcatatgttgatgacacaccacgtgaacaaatgcaaaaagagagaatggatggcatagaatctaaatgcagaaataatatagtagaggagaatctaaaactgtggaaggaaatgattgcaggaacagagaggggattgcagtgttgtgtccgtggcaagttggatatgcaggacccaaacaaatcacttagagatcctgtttattatcgttgcaatccaatgccccatcatagaattggatccaagtataaagtgtatccaacttatgattttgcttgtccatatgttgattctatagaaggaatcacgcatgcccttcgatctagtgaataccatgatcgcaatgcccagtattactggattcaagaggacatgggtcttagaaaagttcttatctatgaatttagccggttgaatatggtctacactcttctgagcaaacgaaagcttttgtggtttgtacaaaatgggaaagttgatggatgggatgatgcacgatttcctacagtgcaaggaattgtgcgtagaggtttgaaaattgaagccctgatacagtttattgttgagcagggggcgtccaaaaatctcaatctcatggaatgggacaagctctggaccattaataagaagattattgaccctgtctgtcctagacacactgctgtcattgcagacagacgtgttttgttgactctcactgatggtcctgagaaaccttttgtccgcatcatacctcggcacaagaaatatgaagctgccggagataaagctacaacatatactaaaaggatatggcttgaccttgctgatgcagtgtctttatcagcaggtgaggaagtaacattgatggattggggaaatgccatagtgaaggaaatagagaaggaccaagatggaaatatcatagggttgagtggtgttttgcatcttgaaggatctgtgaagaccacaaaattgaaactcacttggctacctgagatagatgaactagttagcctgacattagtggagtttgattatctaattacaaagaaaaagcttgaagaaggggaggatttcattgatgtggttaacccatgtaccaaaaaggagactttagcttatggagactccaacatgcgaaatcttcagcgtggagatttattgcaactggagagaaagggatatttcaggtgtgatttacccttcattcgcccctcacaaccaatcgtgctatatgcaatccctgatggcaggcaacagacaagtttgaagtaatctttttggtcttgaaactgtttgggccacattcacactcagaatagttggtaatggtgataacaagtttgtggaactacttttatgtttaccatcacattgtactgtttatatgcaaaccattatatctggattttttactagtaattggaaaattcgtctttgttatttttgggacaaaaaaaaatacccttaacgggaatgctattgattttatgtttccttgagc

SEQ ID NO: 3069 - DNA, 975 bp, Glycine max
  misc_feature (779)..(779): n is a, c, g, or t
gagcaaacatctaaggtgtgggccggaatcccccacgcgtcccctggacatcaaaacctttgctttcgccccatcttctccgccgttaccggtaatcgccgccgccaagctcgccggaatctctccctcgattgatacctctctctctcctgactcacctcccgcatttatcttctccgatgggctcaagttgcatggagcatatgctcttctacgttatatcggccgagttgccagccttcccaatttctatgggcaaaatgcattagaatctagccagattgatgaatggctggactatgctcctatcctctcatctggccctgcttttgagaatgcatgcaaatatatagatgagtacctggagaagtgtacttttttggttggttattcattgtcaattgcagacctagcaatctgggcaggtcttgcaggttctggaaagagatgggaaagtctaaggaagtcaaagaaatatccaaatcttgcacggtggttcaattcaatagtggcagaacatggtactgtgttaaatgaagtcacatcagtgtatgctggcaaaaaaggattgggagaaccaacagcaaccaagtcaaaagaccagtcagtaaacactgataaagtgaagaaggtgaatggggatgtatctgagaacaacaaaggaggaagcaaaccatcagcagaaatagatcttccagatgctgaagttggaaaagttcgcttgcgatttgcccctgaaccaagtggttatcttcatattggacactcaaaagcagctntgttgaacaaatattttgctgagcgatcaagggtcaggttattggtgcgttttgatgataccaatcctgctaaagaaaagcatgaaatttgtggacaaccttattaaagatattgatacaattgggtatcaaatatgaacaaattacatatacgtcagattacttcccttgagtgatgggagatggctgaaaaatt

SEQ ID NO: 3070 - DNA, 1350 bp, Glycine max
  misc_feature (7)..(7): n is a, c, g, or t
  misc_feature (11)..(11): n is a, c, g, or t
  misc_feature (26)..(26): n is a, c, g, or t
  misc_feature (31)..(32): n is a, c, g, or t
  misc_feature (42)..(42): n is a, c, g, or t
gtacgcnctcngcaggtaccccggtnccggnnaattcccggngtcgacccacgcgtccggttggatatgcaggacccaaacaaatcacttagagatcctgtatattatcgttgcaatccaatgccccatcatagaattggatccaagtataaagtgtatccaacttatgatttcgcttgtccatatgttgatgctatagaaggaatcacgcatgcccttcggtctagtgaataccatgatcgcaatgcccaatattaccgcattcaagaggacatgggtcttagaaaagttcttatctatgaattcagccggttgaatatggtatacactcttttgagcaaacgaaagcttctgtggtttgtacaaaatgggaaagttgatggatgggatgatgcacgatttcctacagtgcaaggaattgtgcgtagaggtttgaaaattgaagccctgatacagtttattgttgagcagggggcgtccaaaaatctcaatctcatggaatgggacaagctctggaccattaataagaagattattgaccctgtctgtcctagacacactgctgtcattgcagacagacgtgtgttgttgactctcaccgatggtcctgagaaaccatttgtccgcatcatacctcggcacaagaaatatgaagctgccggagataaagttacaacatatactaaaaggatatggcttgaccatgctgatgcagtgtctttatcagcaggtgaggaagtaacattgatggattggggaaatgccatagtgaaggaaatagagaaggaccaagatggaaatatcacagggttgagcggtgctttgcatcttgaaggatctgtgaagaccacaaaattgaaactcacttggctacctgagatagatgaactagtttgcctgacattagtggagtttgattatctaattacaaagaaaaagcttgaagaggaggatttcattgatgtgcttaacccatgtaccaaaaaggagactttagcatatggagactccaacatgcgaaatcttcagcgtggagatgtattgcaactggagagaaagggatatttcaggtgtgatttacccttcattcgcccctcacaaccaattgtgctatatgcaatccctgatggtaggcaacagacaagtttgaagtaatctttttatcttgaaactgtgtggagcataacccacattcacactcagaaaagttggtaatggggataacaagtttgtggaactacttttatgtttaccatcacattgtactatgtttatatgcaaaccattatatctggattttttactagcaattggaaaagtcttccctttgttaaaaaaaaaaaaaaaaaa

SEQ ID NO: 3071 - DNA, 723 bp, Glycine max
cactacactacctcaaagcatatcttgcatagaatattgattaattaagaaagctcttagtcattcatttgctagctccaataatgggttctagcagattgtcattcattttagcacttgtgcttgtaacattttcattcatcatgatcattgactcaagggttgcagaggcacgtaccctgccaaaatcagccttattgccttccaaagtttatatacctactgttcctcttcctactctgccattactgccaaaggaagagttgcctgtttcagtccctcccgttactgtgcctgacctaccaattcctgaagtacctaaagtaccaattcctgaactccctaaagtaccagtgccaattcccaacctaatagttaataacgccataatcccttgagtacctatgatctatccagtcactactacttattttgctctagtcacttgctaaaatgtattttttataatttgctgttgctatttcagggtggttctgttggggtttaatttgtacctgatgtgtcattcagttaaatgttatgttcagtttatatgttgtttcagtcggttggacttcagcatattatttattttgatctgtaatgtatcaacttttcatcttctagttcaataactttttgaatttctgaatactgtgatcatggaggcagaagtttctttcaatatgacctaattaagctatggcaaaaaaaaaaaaaaaa

SEQ ID NO: 3072 - DNA, 1241 bp, Glycine max
tacggctgcgagaagacgacagaagggggatacggataaggaagagtattcagtgtctcgtgtagaataatcaatggaagtaggaatgtctctgaacgcgctggttcgtcttcctctctcgaattcacgcttccacgacgatgctgctccgatgattattaggcactctctgttttcgagccgaaagcaacagcagcagcagcagagttataaggttccacagcgtcatcaagtgttcgtggttgaagccaagggcaaaaagggaatgatgtctcgtcaatttcagcgcaatgctcctcctcctttacccaagattgaagacgatggcaatcccaaattcgtcatcttcattcgcatggccaatgtatacctttggtaccctcttagtatcgtatcaggcggcaccactgctaaaataatggttgcagctaaagataattttctcggcaagtatatctacaaagacactcttgatagaaatctcgctgctgttatctacagagatgagaaggaggtacagaaatctgcattcaaacagtaccgtgtattgcgaacagctactgatttcagatacggctacaaacttgttgagaatggcaatataagagctgcactttctaccactgatgttattgagcttccaacacaagataaactaaaaaccgtgcttgacaaagtgaaagacttttttggagatgcaaaggaatcttttggaaagataacatcattgggcactactgaaacagaggagtcagaggaagacacaaaagaaaaagccaaggttaaaggatgaaactatagctggaaatgatttgcttgaattgttatgagtagcctgtggccctatgagatcagaaagctcaattatgtttatggattggttaatggggaaacttctgtgcacaacaatgctactccaggttttgttcttagatctgtaaccatcaaaattgttttatattctgcagagtgaacaccatctttacgatactgattgatcactcgtgtatgttgtaatccatgatgctttggaatggatagcatgtaggatgacatgtaatggcaccgttatcagttcaagagattcctggaattgttgtgtaaattacgggttgtaatatctatgcattttatttgacaggaatttacttagagattgcatttcaactagaccaatttactctagaattgtgatcttctaaactcgatgcaatctggaaaatttgtagaattcacaaaaa

SEQ ID NO: 3073 - DNA, 2950 bp, Glycine max
tgggtaccgggccccccctcgagtcagctatgcaggcccccccccgataactaccgccaccttgacttcaaaatctagacccaatctatctgaaaattccaacaaaggatcgatggcaactcctagagccagtaaagctagcaaagttgtatccaaatcagaatctgagtcaccatcaccactgcaaaattcgcgactttctgtggaacgatcaccacgatctgtgaattcaaagcccgctgttgagcggaaatcaccaagaccctctgccaccccacttgataaacaaccccctagagctgcaaagggttctgatttgcagaaccaattgaatcttgctcaagaagacctaaagaaagcaaaggagctgcttattcaggctgagaaggagaagctaaaagcaattgatgacttgaaagaagcacaaagagtggctgaggaagcaaatgagaaactccgggaagcattggttgctcaaaaactcgctgaggagaattctgagattgagaagttccgagctgtggaattggaacaggctggaattgaaactgtgaagacgaaggaagaagaatggcagaaagagattgaaagtgtgaggaaccaacatgctttggacatggctgctcttctctccaccactcaggagcttcagcaggttaaacaagaactcgccatgacttgtgatgcaaagaaccaggcattgaatcatgctgatgatgcaactaaaattgccgagattcatgcagagaaagcagagtttttatcagctgagttgatgcgattgaaggccttactggattcaaaactggaaacagaggccagtgaaaatcaggttatatttaaactgaaaacagagatagaagctctcaaggaagaacttgaaaaggcaaaggattacgatgataagttgtcagagaaagaaacttttattgaacagcttaatgtggagcttgaagcttcaaagatggctgaatcttattcacgtagcctgctagaggagtggcataagaaggttgaggaactagaaatgaggattgaagaagcaaacaagctggagagatctgcatcagagtctttggaatctgtaatgaaacagcttgaaggaaacaatgatttgttgcaagaagcagaatctgaagttgctactcttgaagagaaggtgggattattagaaatgacaattggtagacagagagcagatgttgaggattcagaacgccaacttcgtctggctaaggaagaaagtcttgaaaagtcaaaggaagttgaggctctgaaatctgaacttgagaaggtcaaggaagagaaagcacaggctttgaacgatgaaaagcttgctgcttctagtgtgcaggccttattagaagagaaaaacaaacttatcagtgaattggagaattctcgggatgaagaagaaaaaagtaaaaaggcaatggaaagcttagcttctgcattacatgaagtatctgcagaagctagagaagccaaagaaaatctactaaacatccaagctgaacgtgaaagctatgatgcccagattgaagacttaaagttagtcttaaaagctactaatgaaaaatatgagtccatgcttaatgaggcacggcatgagattgatgttcttgtatgtagtattgaaaattctaagagtgcctttgagaactccaaggctgagtgggagcatagagagcttcaactagtcagctgcataaagaaaaatgaagaagagaaggtgtccctggaaaaagaaataaaaagattgctttatttgcttaaagaaactgaggaagaagctaatgccaacagggaggaagaagatcaattgaaggaaaatctgaaggaagttgaggctgaggcaatccaactgcaggaagctcttaaggaaacaacagcggagaacatgaaattgaaggagaacttattggataaagaaaatgagttgcagtgtatgtttcaagaaaatgatgaactccgaattagggatgctgaatctatcaagaaggtggaggagttatctaagttgctggaagaagctacaaccagaaaccactacactgaggaaaatggggatcttactgacagtgagaaggactatgatttgcttcctaaagtagttgaattttctgaagaaaatggacatgtaggagaggacatttcaaaggtagagctttcagtgaatcaggaggaactcaaacaaaacagcatacaggaagatagcattctatccaacgacaaggctgaaaaaattgaatctcccaaatatgaggaagtgagtgaaaaactggaggaaaatgagagcaaagaaaaggaggggagcaaagcaaaggatgattcagtagaagttgagtataaaatgtgggagagctgcaagatagagaaaaaggagttctcgccggagagagaagctgagcctgaatcatttgaagaggaagttaactcaaagatagaagaaggtggtgagagctttgataagataaatggaaatgctgtaacagagaacattgatgagagtgggagcccaccatcaaaacaacaacaattgaagaagaagaagaagcctttgcttggcaagttcggaagcctgctcaagaagaagggtgctagcaaccagaaatagaacaatattcaactatggtatgggaagtacattgaacattcaattgtttgcatgtgtttgcttttatgatttttgcttctcagaataggatttttatggaatcacgaggcttgtaatattgtttaggatttttcgctagtgcttcttttggattgaggttctccatgttagtggcaaattgtatgtgacgcaaatgcagactccctactttttttctcccatctctgttcgtcccttgccctcctatctagatttgacgacagaagtggcaagttggattgtatttttcgtcatcccaaattcaaatgaaagttcagaaagtttgatgtttca

SEQ ID NO: 3074 - DNA, 1228 bp, Glycine max
  misc_feature (1102)..(1103): n is a, c, g, or t
  misc_feature (1173)..(1173): n is a, c, g, or t
  misc_feature (1203)..(1203): n is a, c, g, or t
aagaaactgtaggattggagggaagttctgttgggcagtggtggctggatatgataggcaaaacattagatgaaggttcaacatttgaacgtattggatccaggcaacttgctggcttggtcattgctgtgtgggttaaaaccaacattagatttcatgttggggatgtcgaagtggcagcagttccatgtggctttggacgtgctattggcaataagggagctgttggtttgagaattagagtgtatgatcggataatgtgcttcgttaattgtcactttgctgcacatttagatgcagttggtcgtcgcaacgcagattttgatcatgtataccgaacaatgtccttcagtcggccaacaaacctcttaaatactacagctgctggcacttcatcttctgttccaacgtttcgtggtacaaattctgcagaagggatgcccgagttatctgaggcagacatggttgtgtttcttggtgattttaattatcgacttgatgacatttcttatgacgaagcaagagattttgtttctcaaagatgctttgattggcttagagaaagggaccaacttcgagcagaaatggaagctgggaatgtcttccaaggaatgcgtgaagcagttataacatttcctcccacatacaagtttgaacggcaccaagttggtttggcagggtatgattctggggaaaagaaacgcatccctgcttggtgtgacagaattttgtatcgtgatagctgcacttctttggtgtctgattgcagtttagagtgtcccattgtctcctcagtattacagtatgaagcttgcatggatgtcacagatagtgaccacaagcctgtccgctgcatattttctacagatattgctcgagtagatgaaccaatccggaggcaggaatttggagagattcttgagtctaatgagaaaattaaatatcttctgaaagaattatgcaagattcctgaaactatcattagtacaaacaacataattcttcaaaaccaggacacattaattttgcgtattacaaataaatgtgcggaaggcaatgctttgtttgaaatcatttgtgaaggtcagtccactgttactgnngatcagaaggctactaaccatcagttgagaggttccttttgcttcccaagtggcttgaggtgagtcctgncactggggtatatagaccagatcaaattgntgaagtatcagtgcatcatgaggaa

SEQ ID NO: 3075 - DNA, 1089 bp, Glycine max
cccacgcgtccgctgcgagaagacgacagaaggggggaccaacgattggaagtttccttttgattaaacttaaagatcaagcgggccggcccagacatgccttaattgattatggtaaaaggaaagggaaagaggatgtgctttctctctctttgaattggcattggaattcaactcttctctttctctgtcgaagaacaagtagtttcagaaagatgctagagaatcttcaggctcctccgtcaacaacggaatcggccccagtggtgaagcgctatgctccacccaaccagaggaaccgttctgctaacaggcgcaaatcatctgatcggcttgatcggacaaacagtgtcgggaatgacttagaaaagaatcaagttgcttcttcaagaagtgttcacattccagatcatgaagatgctggtagcagtaatcttcttaatgagaatcactattcaagattcatagctttagaagggtgtagttgcagtgcagctgcccagcttcttaatgatcgttggacagctgcaatacaatcctacaataatcccaaagattcatctgaaaagccagttatgtattcgagtgggacttcagtatggactgcagctacaagtgcttcctcttctgtatctcaacgggacttcctgggagaacttcgtcgccaaatgcacagtgcaaatcccagtttcactacatgatggctgacttggattgtttaataaagattttggatcatcgtggatttgtcgaatgctttaagaacactgcgatgctcagctacctgttgtttgtgcctttgtgacttgttttgtcaaactcattactaatatatgtatcttcaaaatcggactcagaatatcaaccacgcttgtgtatgtgtaaattggggtgtcagctcttctaggagcttaaatacgtttttttgtccctctaagttagcatgtctttttttgtccttctcaattcatttttctaattttagttcaggtaagttgctgtttttttttttttttttgacccttgtaaaatattttgtttatttttagtttatgttagtttgcattttttcaaaaaaaaaaaaaaaaa

SEQ ID NO: 3076 - DNA, 1174 bp, Glycine max
agcacaccgcgcttacttgctcaccacttgtcacgcaacttccctcatttcctcacgtctttataaaccctcctctccccactctcactccaaactcaatcaactcgatcaactcaacacaaaccaaaactcaagctaaaattctcactctctctctcatctcgagatcatagtatcatattcaatatcatttcataccaaacacatggctttggaagctctcaactcaccaacaacaaccgctccatcttttccctttgacgacccaactattccatgggcgaaacgaaaacgttcaaagcgttctcgcgaccatccttctgaagaagagtacctcgccctctgcctcatcatgctcgctcgcggcggcaccaccaccgtcaacaaccgccacgtcagccctccaccgccacagccacagccacagccgacaccagatccttccaccaagctcagttacaaatgctccgtttgcgacaagagcttcccctcttaccaagcgctcggtggacacaaggccagtcaccggaaactcgccgccgccgccgaagaccaaccccccagcaccaccacttcctccgccgccgccaccagctccgcctccggaggtaaggcccatgagtgctccatttgccacaaatccttccccaccggacaggcccttggcggacacaaacgttgtcactacgaaggtaacggtaacggaaataacaacaacagtaacagcgttgtcaccgtcgcctcggaaggcgtgggctccacccacactgtcagtcacggccaccaccgcgacttcgatctcaacatcccggcctttccggatttttcgaccaaggtcggagaagacgaggttgagagccctcaccctgtcatgaagaagcctcgcctcttcgtcattcccaagatcgaaatcccccaatttcaatgaactcgttgaatttttagtttatttttcgactatatattttggagaattttgagagttactataatttgattttgtacatagtacttggaagttttgttggaccgtaccggacccagttctctggttgaggttgtactttcacaacagtggcagatttgcaattcaattcaatttatttgtttattttaattagtaaaaaaaaaagtgaaaattgaaattaaaaaaaaaaaaaaaaaaactcgagac

SEQ ID NO: 3077 - DNA, 1293 bp, Glycine max
ttttttttttttttttttgaaataagaccattaaaagggttgcttttgggttactagtggtagataataatcttgtcagaatcacaaaagttaacgatgagggtaaatgctagaattataagaaaaaaatgatagaaaaatcacttgatacatggttacatacctagagaaacactaaaaacaaatctttgcttaccagtccccccaactaaagaaaacatactaattaaactacagaggcattttgctgggcatgccaagctacaacatcttcgtaagccaggtttcccccaaaaatatccaaggcactgcccacagtaacattcacacgctccattccagccgttcttatcctctctagatcagccatttcagtcacaccaccagcataagtaacaggaatcgttgaatatttgccaagcaaagccacaagctcttcatcaattcccaacttcttcccttcaacatcaacaccatgaaccagaaactcatcagcaaagttggcaagaaattccattacatcaggatcaacaaacacatcactgaacttctgccatctatcagtgacaattgcatatttaccatccttttttctgcaactgagatccaacacaagtctctcttttccaacaatttgaacaagatcttttagccttccaatatccatttgtccattattgaatacataagaagtgacaatgacatggcttgctccttcctcaatgtaactcaaacaattgtcagaatttattccccctccgacttgcagaccgccgggataagcgtgcaatgcttgaagggcagcagctttgctcaaaggatccgcaccaagcatgatgacgtgaccaccagtgagtccatcttgcttgtaaagcgtggcgtattcagcggctgacttatcagactcaaaattggtgacgggatcggagcctttcaagtcttgaagggtggaccctacaatttgcttcactttccctttgtggatatcgatgcaggggcggaattgaactgcaccgcactggatggaagggagagatcttcgagagagtgaggggagagtgagaaaaggaggcttattggggcgaaagatgaaaacccccaaggaatgaggtgcagccagattgcgcattctcgatgatgatcggagacgactacaacaaagcacaccaccgcaccgtttcgttaaccattgtcgccgtcgacttcgtcctccgccactcctctgctccaatttcgtagcggaaggggacaggaaggctaaatctggaaagagcaaaatatctacgtagctga

SEQ ID NO: 3078 - DNA, 1613 bp, Glycine max
agcgcttgaattcaagccttacgtaaaacagttgtctgattatataataccatttcgggtgcccgcgcgtcccaaggagccagaagtagaaatttgtgcaagcatgttggacgcattgaatgaatgcatacaggtctctggatcacatctagatgaaaagcaagttcggagcattgttgatgagattaaacaagtccttacggccagttcatcaagaaaacatgaaagagcagagagggccaaagaagaggactttgatgctgaagaaagagaactactcaatgaagaaaatgagcaagaagaggagctttttgatcaagttggtgattgcttgggaactttgataaagacattcaggacatctttcttgcctttctttgatgatctgtcctcatacctaactcctatgtttggtaaagacaaaacctcagaggaaaggagaattgccatttgtatatttgatgatgttgctgagcatggtcgtgaagctgctcttaaatattatgattcttttcttccattcttactcgaagcttgcaatgatgaatatcccgatgttcgacaggctgctgtttatggtgttggtgtttgtgctgagtttggtggatctgttttcaaaccccttgttggagaggcactttcaaggttagatgctgtgataaggcatccaaatgcactacattctgataacataatggcatatgacaatgctgtttcagctcttggaaaaatatgccaattccatcgtgatagcataaatgcagcacaggttgttcctgcctggctaaattgcttgcctataaaaggtgatttaattgaagccaaggttgtgcatgaccaactttgttcaatggttgaaagatcggatagagaacttataggtcccaacaatcaatatctttccaaaattgttgcagtttttgccgagattttatgtgcgggaaataatctggcaaacgaacagactgttagtcggatgattaatttattgaggcagcttcaacagactttaccaccttctacacttgcttcaacctggtcatccttgcagcctcagcagcagcttgcacttcagtccatcctatcatcctagtagttttggatcgtcaccttcagaagatgcgtgtctattgtcatgggatgtcatagttaccttttcagaagctgctttgtcaggtcaaattcattcctttggcatcttcggagtgtctttttttgaagcagctgtgtctggttcgtgtttcatgattgttgaatccatacttggttttgcaagccaggacttgagtaaggctttgttgcagaggcagagcagtgtcgagttggttggataggaaacagttttggtgtgaaatgtgcatactgtgttatagtcagaaggaattctcaaatgaacagtggctcgatcctgtctgtggatgatggggacgaggcgtgatcctgagtcatgcacgactcaggtaaatcgcatagcattcttttgtttattttgagttgtaacagttttgatgggtcatttcttttggaagttggaaacatattgtcatagtttaattaatttgtataccaaaaaaaaaaaatccaaaaaaaaaaaaaaaaaaaaaaaaaaaaaa

SEQ ID NO: 3079 - DNA, 1360 bp, Glycine max
  misc_feature (1196)..(1197): n is a, c, g, or t
atttactgctattctggtgaatgcaaacgataagtctaatcgtatgcttcgagccaaagcaatggagtgcattagtttggtaggaatggctgttggaaaggagaagttcagggatgactgccaaacaggtcatggatgtcttgatgtcactgcaacaatctcaactggatgctgatgatccaactgcaagttacatgctacaagcatgggcgcggctttgcaagtgccttgggcaggattttctcccatacatgggttttgtcatgcctcctttgctccagtctgcgcaacttaagcccgatgtgaccattacatcagcggattctgatactgaatttgatgaagaagatgacagcattgaaacaatcacacttggggataaaaggattggcattaagactagtgtcttggaggagaaggctaccgcttgtaacatgctatgttgctatgctgatgagttgaaggaaggatttttcccttggattgaccaggttgctttcacattggttcctcttcttaaattttacttccacgaagaagttaggaaggctgcagtttcagccatgccagaactgttgtcctcggcaaaatcagctgtagagaagggacagtcgcaaggtcgtgataagacttacgtaaaacagttgtctgattatataataccaaatttggtggaggctttacacaaggagccagaagtagaaatttgtgcaagcatgttggacgcattgaatgaatgcatacaggtctctggatcacatctagatgaaaagcaagttcggagcattgttgatgagattaaacaagtccttacggccagttcatcaagaaaacatgaaagagcagagagggccaaagaagaggactttgatgctgaagaaagagaactactcaatgaagaaaatgagcaagaagaggagctttttgatcaagttggtgattgcttgggaactttgataaagacattcagggcatctttcttgcctttctttgatgagctgtcctcatacctaactcctatgtttggtaaagacaaaacctcagaggaaaggagaattgccatttgtatatttgatgatgttgctgagctcggtcgtgaagccgctcttaaatattatgattctttttcttcctttcttactcgaagcttgccatgatgaatatcccgatgttcgacaggctgctgtttatggtgnnttggtgtttgtgcctgagtttggtgggatctgttttcagcccccttgttggagaggcactttcaaggttagatgctgtgataaggcatccaaatgcactacatgctgataacataatggcatatgacaatgccgtctcagctcttgggaaaatatgccaattc

SEQ ID NO: 3080 - DNA, 2828 bp, Glycine max
  misc_feature (712)..(712): n is a, c, g, or t
gagagagagaactagtctcgagttttttttttttttttcccattttcagtttctaaacaaaagccttcaccttttgattacactcactcttttcttcatttcacgccgccccatttgcataacttcgctgatctctcgttttcaccatctgggtctccccaattttcgcctcgattcttgttcttctcgatccattggtgatggcatcgatgggttctttaccgtttcttgtggaagccaatgccgactccactttgatgatgatgatgcttcagaacaggaatcacaagttttcttcaccaaagtttaacactgtgaatgcttcatcgttagtaagaggatgggggcgtggaagagtgaaccataggtgtagtagtaggggtttgttgtgtttggtggagaagaataagcacataagtgctttagggaagagttctgggacaagtgaggataaggatgagtcagaggaagtgcttcaggccacaattgagaagagtaagaaggttcttgctttgcaaagggaattgcttcaacagatttctgaaagaaggaaactggtttcttcaataaatagtgaaagcactcctgaaatagaaggagacagcatttcttatgagcacagtgacgaatccttgtcaagtgactcaattccgcagaaaggttcagccaaaagaggcagtgctgttgagaacgaaaatggtgttcttgtttncaagcaattatgtccaatctattgagaaggaaataccagatgtctcatttgtaggcattgatctcggtttggacaaaggtgaagaggaagatgataatctgtctcctgttgaaaaggcttcacctaggctatattttgatgaacagttgaatagcaagagatatgagacaataacacctgataccctgacaagtgaaatcccacgtagcactgaaacctctaatcgaaagattgaaatacttgaagctttgagtgaatcaagtacaaaggaggttgctaatgaaggcgacaatgtggagagtaaaggtgaaaaccccccaccgttggctggggccaatgtcatgaatgtcatattggttgcagcagaatgtgctcccttcgtcaaaacaggtggtcttggagatgttgctggatcattacctaaggctttggctaggcgtggacacagagttatggttgtagtacctcggtatagtcattatgctgacgcacaagatataggagtatggaaacgatacaaagtagatggtcaggacatggaagtaacatatttccactcttatattgatggtgttgacttcgtttttattgacagtccaaacttccgccatttacaggataacatatacaggggaagccgagaggatattctaaaacgcatggtgttgttttgcaaggcagctgctgaggttccttggcatgttccatgtggtggtgtttgctatggagatggaaatttggccttcatcgcaaatgattggcatactgctttgctgccagtgtatctgaaagcctattatcgtgaccatggtttaatgaagtacacaagatctgttcttgtgattcataacatagcacaccagggtcggggccccgttgatgattttcgctacacggacttacctgaacactacatagaccttttcaaattatatgacccggttggaggtgagcacttcaatatcttttcggctggtttaaaggcagctgaccggattgtcactgtgagtcatggatatgcatgggagattaaaacttctgaaggtggttggggtttgcatgggatcataaatgagaatgactggaaattgagaggaattgtgaatggaattgacaccaaagattggaaccccaagattgatgttcacttgaaatcagatggatacactaactacacccttgagaccctgcaaagtggcaagcgtcagtgcaaagccgccttgcaaaaggagctcggtttgcctgtccgtgaggatgttccgttacttggattcattggaaggctggatcaacagaaaggcattgatctcatagccgaagcaattccttggatagtgggccaggatgtgcagctagtcatgttgggaactggaaggccggacttagaagatatgcttaggcagtttgagtcccaacaccgtgacaaagtcagaggatgggttggcttttcggtcaagatggctcaccggataacagcaggtgcagacatattgctgatgccatcaagatttgagccatgtggattgaatcaactctatgccatgaattacggaacaattccagttgtacatgctgtcggtggattgagggatacagtgaagccttttaatccatttgaagagtcgggccttgggtggacatttgacagtgcagaaactaacaagttaataaatgcattagggaactgcttgttgaccttcaggcagtataagcagagctgggaagggctccaacggcgagggatgacgcaggatcttagttgggacaatgctgctcagcagtatgaggaggttcttgttgctgctaagtaccaatggtaaattcttggcttctactctacctaagcagactgatcaatatggagtgctctcatgctgagtgatatcaaggtctgtgcagggaaaggacttggtcaagttgttaaaaccttcatgttgcaggtcctggaggaacatttttgcccctaaactaaggattatgtaataatacacttgttatatatgtcatgtctggcacatacctatgtagctaaaacatcaatccagcaatatataaaataaggttagaaactttattgtcctttttggcttaataaagtagagtattaccccttcag

SEQ ID NO: 3081 - DNA, 1398 bp, Glycine max
  misc_feature (1379)..(1379): n is a, c, g, or t
tttttttttttttttttattattaatcacataccagttttgatctgcatttaatcatcattaatagcatccgggttgtttttttttttttttttcgtatgaagctgacatttcattaatgtaggaaaatcacactacacacttttgcattacacatggctagctcatagccctgaaattaactcgatacatggccaagctaataataccatatgatctaggcatggtatttttgatcatatacatgataatacatgtggaaacttgagatcctccaagacaagaaattgaaggtgatgttgatttgggcggtggtgtggtgtcagaaaaaacattgttgtttattatttcattcacaccaagcatctttggtcgcttttttgttcagttccaccaatgctttggcgcaccttggatgaaatggaggatagtgaaatgggaaaaccagggtgttcagtgtccctaatcacattgtaagaccaagctgctaaaaccgccccagtaataggtccaacaaaatatacccaaagtcccttgtagtatgatgtcgcaattgcaggacctaatgtccttgctggattcattgatccccctgatattggtccggctacaatgcttgctatgcaaacagaagaacctactgctactcctgatagctgtcctgtcgcgtttgagtcagtggccacggccatggaaatgaacaccatggtatatgtggtcaccatttccatgattagggcttgaatgtgtgatccagcaggtgatgttcctccaatctcatttgatggtcgtaacagctctcgcaatgtgtatgaagcagaaatggcaccagtgagttgagctgctatataaaatgggagctgtggccaaggaagatgcctgacggcggtgaaagcaagagaaaccgcgggattcatgtgtgcccctgatatgtgtccaattgagtatatcatgaccgtcactatgagtcctcctgcaagtgatgctccaagctttgacaccatcctctcatcaatcttgcttagcccagcagaaccacttcccacaaacaccaacaaaaatgtccctataatctccgctaacacctttctgggaaagccgggagggtaactttgtgcaattcttgcaagagagccaggggaagatgatgatgatatctcagggatgcttggacttggtgtctcaattgtgctagggatgaaggcaaacgtgctttggctgctggtcccctccattgttgtaagattatggaagtgctatatagcttatagttcaggaaatgtgatctctccctctctctctctctctctctctctctctctgttataagctaatagctacaagtagtggatgatcctccggggggggggcctaacctanctgaactcgaggggggggc

SEQ ID NO: 3082 - DNA, 1324 bp, Glycine max
atttaatcatcattaatagcatccgatttgttgtcctttttgcttttcttccgttgctgtcttttctttaatgtaggaaaatcacactacacacttttgcattatacatggctagctcatagccctgaaactaactcgatacatggcctagctaataataccatatgatctcggcatggtattattgatatacatgataatacatgtggaaacttgagatcctccaagacaagacattcaagggtgtggtgtcagaaaaaacattgatgtttattattttcattcacaccaagcatctttggtcgcttttttgttcggttccaccaatgctttggcgcaccttggatgaaatggaggatagtgaaatgggaaaaccagggtgttcagtgtccctaatcacattgtaagaccatgctgctaaaactgccccagtaatcggtccaacaaaatatacccaaagtcccttgtagtatgatgttgctattgcggggccgggtggccgggctgtttttttttttttttgttaaacttacccggctacaatgcttgctatgcaaacagaagaacctactgcaactcctgatagctgtcctgtcgcgtttgagtcggtggccacggccatggaaatgaacaccatggtgtatgtgctcaccatttccatgattagggcttgaatgtgtgatccagcaggtgaagttcccccaatctcatctgatggccgtaacagctctcgcaatgtgtatgaagcagaaatggctccagtgagttgagctgctacataaaatgggagctgtggccacggaagatgcctcacggcggtaaaagcaagcgaaacagctgggttcatgtgtgcccctgagatgtgtccaattgagtaaatcatgactgtcactatgagtcctcctgcaagtgaagctccaagctttgacaccatgctttcatcaatcttgctaagcccagcagaaccactccccacaaacactaacagaaatgtccctataacctccgcaaatacctttctgggaaatccaggagggtaactttgtgcaactcttgcaagagagccgccaggggaaggtgatgatgatgaaatctcagggatgcttggactaggtgtctcaattgtgctagggatgaaggtaaacgtgctttggctggtggtcccctccattgttataagattatggaaggctatagcctatagctcaggaaatgtgatctctctctctctctctctctctctatatgttagctaatagctacaagtagtggatgatggggggggggcccacattggagtcgcgccagcgggggcggcgatctc

SEQ ID NO: 3083 - DNA, 988 bp, Glycine max
tctcgagccgaatcggctcgagcggctcgagtacggctgcgagaagacgacagaagggggaggttaataaaattaaattagtggcgcacgttatccgctccagagagtgcgaggcgagagagaatgacaatatctgttttcttagttccttcgacgcctcagttgtgtaactacagaatctcatggccaattcccacttacccttctctttcttcttctaagttaactgtttcactgtgctctccttcccctccaacatctgttatcgaagagggtccttctccttcaccagaattgaccagtggttgtaaggcgtgtggaagagaagaagtggagcaaggatgcaatggtgaaggaaggattcagggtgggattgctacagtaccaggctttgggtggtggcctataaaggcttacaggccatgccctgcatttgtggcatctggtggtaggtataggcgccaaggacaaagcatggacgaggttgtctccggaagtggtaaaactaaaacacccattgccactgactccaacacaagtaacaaaaaggaaagttcgaagaaatctaagaggtaaatgtttgggaggaatattacagtcatcgctctatcgaggtgacaaaagcaagagctttaaggaagaggaggggtaaagaaaatgttgatgttgtggtctgctacaaatgttacaaataatattctgtgaggattatggaaatctatgtaagtcttatacatgcattaggaaatagggtgatgccatgtaatcatgttcactggatttccttgaatctctaccgcttttttcattcatcatcagttatctatcattatagttactttaggtttttaggttttttttatcgataaatattaattcattagaatgtgaattttgtaaacaaacgagatcgaatcttgtgatcttttttttctcccttaattatttaactcaaaataaaaaaaaaaaaaaaaaaaaaaaaaaaaaa

SEQ ID NO: 3084 - DNA, 1251 bp, Glycine max
  misc_feature (1053)..(1053): n is a, c, g, or t
  misc_feature (1060)..(1060): n is a, c, g, or t
  misc_feature (1164)..(1164): n is a, c, g, or t
cttttgttgctgtcttttcattaatgtaggaaaatcacactacacacttttgcattatacatggctagctcatagccctgaaactaactcgatacatggcctagctaataataccatatgatctcggcatggtattattgatatacatgataatacatgtggaaacttgagatcctccaagacaagacattcaagggtgtggtgtcagaaaaaacattgatgtttattattttcattcacaccaagcatctttggtcgcttttttgttcggttccaccaatgctttggcgcaccttggatgaaatggaggatagtgaaatgggaaaaccagggtgttcagtgtccctaatcacattgtaagaccatgctgctaaaactgccccagtaatcggtccaacaaaatatacccaaagtcccttgtagtatgatgttgcaattgcaggacctaatgtccttgctgggttcattgatccccctgatattggtccggctacaatgcttgctatgcaaacagaagaacctactgcaactcctgatagctgtcctgtcgcgtttgagtcggtggccacggccatggaaatgaacaccatggtgtatgtgctcaccatttccatgattagggcttgaatgtgtgatccagcaggtgaagttcccccaatctcatctgatggccgtaacagctctcgcaatgtgtatgttgctgaaatggctccagtgagttgagctgctacataaaatgggagctgtggccacggaagatgcctcacggcggtaaaagcaagcgaaacagctgggttcatgtgtgcccctgagatgtgtccaattgagtaaatcatgactgtcactatgagtcctcctgcaagtggagcctccaagccttctcaccatgctttcatcaatcttgctaagcccagcagaaccactccccacaaacactaacagaaatgtccctataacctccgcaaatacctttctgggaaatccaggagggtaactttgtgcaactcttgcaagagagccgccaggggaaggtgatgatgatgaaatctcagnggatgcnttggactaggtgtctcaattgtgctagggatgaaggtaaacgtgctttggctggtggtcccctccattgttataagattatggaaggctatagcctatagctcnaggaaatgtgatctctctctctctctctctctctctctctctttctatatgttagcctcgtgccgccttcggcacgaggcctcgtgc

SEQ ID NO: 3085 - DNA, 984 bp, Glycine max
tcagctacgtaggcccccccccccccaaatttatggtcaacaaaagcagcgaaaggcaccagaagctgctgatattgctttattgttacagaggaatgaggcactccgagttgctttcattcatgttgatgaaagtacaactgatggaaatacttcaaaagtgttttattcaaagcttgtcaaagccgatataaatggaaaagatcaggaaatatattctataaaacttcctggagatcctaagcttggggaaggaaagcctgaaaaccaaaaccatgcaatagttttcactcgtggtgaagctgttcaaactattgacatgaatcaggacaattatcttgaagaagcaatgaaaatgaggaatcttctggaggagttccatgcgaatcatggccttcgccctccaagcattcttggagtgagggagcatgtttttacaggaagtgtctcttccttggcttggttcatgtcaaatcaagaaactagctttgtaaccttggcccaacgagttttagcaaatcctctcaaagttcgcatgcactatggacacccagatgtatttgaccgaatatttcacataactcgaggaggcattagtaaggcatcacgtgttattaatattagtgaggatatatacgctggtttcaactccacattgcggctgggaaatgtcacacaccatgaatacattcaggttggaaaaggaagggatgttgggttaaaccagattgccctctttgaggggaaagtggcaggtggtaatggagagcaagtgcttagcagggacatttacaggcttggacaactttttgatttcttcagaatgctttctttcttcttcacaactgttggttattatgtctgcaccatgatgacagtccttacagtgtatattttcttatatggaagagcatacctgatattggaactttttatcttttaatcactttttcagcttaggtaggctttttctggtcttgatga

SEQ ID NO: 3086 - DNA, 1741 bp, Glycine max
ttggaaaaggaagggatgttgggttaaaccaaattggcccctttgaggggaaagtggcaggtggtaatggagaacaagtgcttacctcgggccgctcccaggcttggacaactttttgatttcttcagaatgctttctttcttcttcacaactgttggttattatgtctgcaccatgatgacagtccttacagtgtatattttcttatatggaagagcatacctggctttttctggtcttgatgaagatgtctcgaagaatgcaaaattgcagggtaacacagcacttgatgcagctttaaatgctcaatttttggtccagattggtgttttcactgcagtaccaatgataatgggttttatacttgaattaggattgctgaaggctgttttcagtttcatcacaatgcaactacaattgtgttctgtcttcttcactttctcattgggaactagaactcattattttgggcgtaccattctccatgggggtgcaaaatatcgtgctactggtagaggctttgttgttcgtcacataaagtttgctgaaaattacagactatattctaggagccactttgtcaaagcgcttgaggtggcattgcttcttatagtttatatcgcatatgggtatgcagagggaggtgctgttacgtatgttttgctaactcttagcagttggttccttgtcatttcttggcttttcgctccttacattttcaacccctctggtttcgagcggcagaagactgtggaagattttgatgattggacaagttggcttctttacaaaggaggagtaggagtaaaaggagataatagttgggagtcttggtgggacgaagaacagatgcatatccaaacttggaggggtcgtattttggagacaattttgagtgcaaggttcttcttgtttcaatatggtgttgtgtataagctgcatcttactggaaatgatacatcacttgcgatctatggattctcatgggctgtcttggttggaattgtcttgatatttaagatctttacctacagcccaaaaaagtctgctgattttcagctagtattgcgattttcacaaggagttgcatctataggccttgttgcagctgtgtgtcttgttgttgcctttactccactgtcgatagctgacctatttgcaagcatccttgcatttatccctactggatggggaatattatccttggcaattgcatggaagaagatagtttggagtctcggcatgtgggattctgttcgtgagtttgctagaatgtacgatgctggaatgggtatgatcatttttgcaccaatagcatttttatcgtggtttccattcatttcgactttccaatctcgccttctcttcaatcaagccttcagccgtggtcttgaaatctctatcatccttgctggaaataaagctaacgttgagagttagcgccattcgtcttactctgtatccctgtggggcttgtatatttagatgtatattattttgtagttcagtgttgagttatacatttagtctatgaaaaaaaatgaaagatgcctttttaagggtgtgtttgttttgccttgttcagctgtttattagttttgatacattttgtctttgatcagtatttggcatttttgcgtatgtatattattttgtagttcagtgttgagttatacattttgttttgcctacaccgagctaaatgagagtttaggcctcgaggccattgacgccattgagg

SEQ ID NO: 3087 - DNA, 1927 bp, Glycine max
taataatcacaaccaggcaccgtgaggttgcagagtcttgtaggacatcttctcttgttcaagtgcatgatcagctacgtaggccccccccccaatctttcgaattgttttgtaaaacggcatttggatctgaattagatgggcattgtccaaacaatcttaagggcatatcaactgaaattgttaaaaagtgtgaaggtttaccactagctattgtggccactggtggccttttatctcgcaaaagtagagatgcccgtgaatggcaaagatttagtgagaatctaagttcagaattaggaaagcatcccaaattaactcccgtgacaaagattttgggtttaagttattatgatttgccttaccatctcaaaccatgcttcttgtatttcggaatatatccggaagattatgaagttgagtgcgggagattgattctacaatgggtagctgaggggtttgtcaaatctgatgaagcggcacaaactttagaagaagtggcagaaaaatatttgaatgagttgatccaaagaagtttggttcaagtatcttcatttacaaagtttggcaaaattaaaaggtgtcgtgttcatgacgtagtacgtgaaatgatccgcgagaagaatcaagatttaagcttttgccattctgctagtgagcgtgggaacttgtccagaagtgggatgattcgtcgcctaacaatagcatctggttccaacaatttgacgggaagtgttgaaagctcgaacattcgatcacttcatgttttcagtgatgaagaattgtcagaatccttggtaaagagtatgcctacaaagtacaggctattaagggtgcttcaatttgcaggtgctccaatggacgattttccgcgcatcgaaagtttgggggacttatcatttttgaggtacttaagcttatgttcgaagatagtccatcttccaaaattaattggtgagctgcacaaccttgaaacattggatctaagagaaacttatgtgcatgtgatgccaagggagatctacaagcttaaaaagttaagacaccttctgagtgattttgaagggcttaaaatggatggtggcattggagatctaacatccctacaaacactacgtagagtgaacatcagccataatacagaagaagtagtaaaagggttggaaaaacttacacaattaagggtgttgggcttgacacaagttgagccaagattcaaaagttttctgtgctccttgataaacaagatgcaacacctggagaagttatatattactacaacaagttatcgtacgaagatggatttgcattttgatgtattggcacctgtacttcagaaggttcgtcttatggggcggttaaagaagttcccaaactgggttgccaagctccaaaatcttgttacgttgtccttgtcattcaccgacttgacacatgatccattgccactacttaaagatctaccaaatttgacgcaccttagtatactccttcatgcatacaatagtgaagttgtgcagtttccaaacagggggtttccaaacctaaagcaaatactactggcagatttgtatcaattgaaatccatcgtaattgaagatggagcattgccttctctcgaaaagctcaagttattcaggattcgcgaactgacagaggtgcctcgtggtattgacaagttaccaaagcttaaggttttccattgttttcatatgtcagatgaatttaaagaaagctttaatctcaacagaggacaacgtcgtcaatggataatagaaagatagtgggaatgaaaaaagtccgtctttcaaagtgagtgttttgttattcttaagctgaatataaatgttattgcaattgtcaactctttacactatctttaaatgaaattttattaagtggatttttcaaaaaaaaaaaaaaaaaa

SEQ ID NO: 3088 - DNA, 1132 bp, Glycine max
atataacctctccggtctccatcaaaacaaggcacagcaacgctcaactgcgccgtgagtggggttccgaggacgggagagagagccaacgcgccggttttgacggcgtcgggagtgggattccgtggcacaaactcttcttctcttgcacgttcagttgcgcgaagcagcgtcaggctctgcaaatgtcaatggtggatttggagggcaaagaaggttacaggccttccacggagtacgtggaagacagcaacgaaacactcattaacttgactgactcaaccgagcttttgtttcttaagttgccttcttccaatgattttttatctgacatacatgggcagaaattgtttctcactcttcataatgatggtaaactagccagcttcaaggattcgtcaggtaaagtatatgattttgtaagctattctgctcaggagccagacgaaacagtttttgtttcctctacagaaccaaaaataggaaagatttcgatgcgagtttccactgtccattaccctggtcctaaagaacttgaaaagctcaattcaactaacgcaaaacatgcacatggaaattcttctggagtcactgggacaacttcatctcgatattttcctatgcaaagtggtggagcagcttcatcaaaaggtagcagacagagaagctctctaactgaagctagtgagccatcaagtatttcaaaaagaagacacgcgtctaaatctaaatccaacttgtccgagacttcacatgagcacagcactggcatttcgtccatgtccccaaatcattctcatgaaggaaaggcaaagagaagaaaacataaggaatagtgtttcctatactcgccattggcctatttaatagtgtaatatttagaggttacattctcccaggcctttaaatatgtccggaaagactagtgctaaacttttatgttgcaaaatgataaatttaaatgtttgcattctcttttttgtcttttttttttgcaaatgttcatttgcttcagttggacaatgttcactgatgtaaggagtaagaccctttcgtgctcctatgtatacttaagggcgatgttaattttgttgtgttaaaaatgtggtttggtttttttcctccaaaaaaa

SEQ ID NO: 3089 - DNA, 1232 bp, Glycine max
  misc_feature (1228)..(1228): n is a, c, g, or t
aaaactaacatcacacacgtggtacaatcgcacgattctaccagtctgttaagccctctccgtgtaggtttcgacccagcagaatcacatcgtggaatcgccccacaaaaacgtgggagccctgaatcgtgcgtgttttgcgattctgacttgtttttcatttttactttttgggcctttgaaagcttaaaaacctaaacgcccaagactcaaaacaaggcagaaccgctcaactgcgccgtgaaactcttcttctcattcacattcagttgcgcgaagcaccatcaggctctgcaaatgccaatggtggatttggagggcacagaaggttacataccttccacagagtatgtggaagacagcaacgaaacactcattaacttgactgactcaactgagcttttgtttcttaagttgccttcttccaatgattttttatctgacatacatgggcagaaattgtttctcactcttcataatgatggtaaactagccagcttcgaggattcatcaggtaaagtatatgattttgtaagctattctgctcaggagccagacgaaacagtttttgttccctctacagaaccaaaaataggaaagatttcgaggcgagtttccactgtccattaccctggtcctaaagaacttgaaaagctcaattcaactaacgcaaaacatgcccatggaaattcttctggagtcacagggacaacttcatctcgatattttcctatgcaaagtagtggagcagcttcatcaaaaggtagcagacagagaagctctctaactgaagctagtgagccatctagtatttcaaaacgaagacatgcgtctaaatctaaatccaacttgtccgaggcctcacatggtcacagcactggcatttcctccatgtccccggatcattctcatgaaggaaaagcaaagagaagaaaacataaggaataataatgtttcctatacttgccgttggcctatttatggtgcaatatttagaggttacattctacctggcctttaaatatgtccggaaagaatagtgctaaactttttatgttgcagaaggacgataaatttaaatgtttgcattctcttttttgtcttttttttccccttgttttgcaaatgttcatttgcttcagttggacaatgttcactggcgtgtactgaagggcgatattaattttattgttgtttctcttgtggtttaaaaaaaaaaaaaaaaaanaaaa

SEQ ID NO: 3090 - DNA, 894 bp, Glycine max
tcagctacgtaggccccccccccgaagttcagaccatttcaaaattcaaatttgaaaagagcgatagagaaatagagaaatggcattagtgtccggaaacatgaagggtttttaccgacagaaaaaaaccatcgccaccaaaaaatctccgattctctccccggccatcatctccctcggcggaaaacccgacctagaagatgagcacaaggagagcgaggtggtgctgcggcaattcgacctgaacatggcgtacgggccttgcctcgggatgacgaggctcgcacggtgggagcgcgcacagaggctcgacttgaaccctccgcaggaaatcgagaggcttttgaagagtgggaaggttccgaccgagtccttgtgggatggtcgcatttaggatcccttttgttttgtatgaaaaagaaaaaaagaaaattaaatccttatcgcttattgtgtagtttttgggttttgcttaggaaaatcatcttctggctgagttccttgttattatgtgactctaaaccaagcattatggatgctggttttagaaagaaaaaaaaaatgttgttttcttgcttccggttgttagctgttgttataaatcatgatttgctctgttaactcactgggcgtccatgctgtgatgtgtgtgaatgtgagttattcataaactatgaattaatgccttctttctgcattgtgatattttgctttgttagagttaatgttgtcttagttgaaagttagatttgatgttatgagttacaaaaaatggttcatagataaggataaccgtgtgctcatagacgcccagggatagaaagagatagaagagagaagtgtaaatgtgaatatgtgatagatgatgtatgatgtaaaaaaaaaaaaaaaaaa

SEQ ID NO: 3091 - DNA, 1801 bp, Glycine max
ccacgcgtccgctttctttcttgtaacttcaacaaacggcagcttcttcaattcaaaacagaactctcttgggtgttggtgttggtgagggatctgaggcaaaggtgttgatgatatgggagcgtgtgtttaactccacaagggtgcgtgggagggaggttgagctcttccaagaagaaaaccagaaagagaaggagagtcgggcagctacgtaggcccccccctcggttgtgtaaggaatcatcggagaaagttgatgtggcagggttgcctgattgttcctttgctaaccccactttccaagcaggaagtattgaagaggcatggtttgattccattgcagtatttgactctgactgtgacgatgattatcagagtgttcctgatgatgttgtatctctgagtgggattgaaggtggatctgtatcaagttttccgtcttcaagagatgccacccgtggagtttccacagatcaggttcagaaacagaaggagttgttggcaggatccgaggcagccagaagttcagatgtccaatattttggtgtagatgtcattgattctcaacgtgagcctgtgttccttgatgaaatatcctcagtggatgcgaactccaacaaggatgatggacttttggataattgcgggattcttccaaacaattgtttgccatgtcttgcgtctaccattccttctgttgaaaagagaagatcatcaagttctagtcctcctaatgcaaggaagaaggttcctgcaaaactttcctttaaatggaaagaaggacatgggaatgctactctattttcctcaaagatgcttctacaaagaccaattgctggttctcaagtgccgttttgtccaattgagaagaaaatgcttgattgttggtcacaaattgatgcaagcactttcaaagttcgaggagtaaattatttcaaggacaagaaaaaggactttgctcctaattatcctgcatattacccatttggtgtagatgttttcttgtctccacggaaagttgaccatatagctcggtttgtggaacttcctgttatgagttcctccgcgaaatttcctcccatactagttgtaaacgttcaggttccactctatcctgccacactttttcaaggagaaactgatggcgaaggaatgagcattgttttgtacttcaaactttcggaaagttactccaaggaacttccacagacttttcaagaaagcatcagaagattgatggatgatgaagttgaaaaggtaaagggttttcctgtagatacaattgcacccttcagggaaaggttgaaaatattaggccgtgtcatcaacctggaagatcttcatttgagtgctgcagaaaggaagcttatgcaggcttacaatgagaaacctgttctttcgcgtccccaacatgagttttacatgggggaaaattactttgagattgatttggatatgcatagattcagttatatctccaggaaagggtttgaagctttcttggacagattaaaggtttgcactctagatgttggcctcacaattcaggggaacaaacaggaggagctaccagagcatgtgttatgttgtattagattaaacggcattgactacatgaattaccaacaactggggctaactcaggaccccctctaatataaaaataacaaaagcatttgcaatctttcaatttatgattaattatagtcatttctagaagcgattctttctgtgtgcaccttttttattattattgcataaaattcacttgagtttaatgaaactcaatcatgtaatttat

SEQ ID NO: 3092 - DNA, 1846 bp, Glycine max
  misc_feature (1817)..(1817): n is a, c, g, or t
  misc_feature (1825)..(1825): n is a, c, g, or t
tgggggtagtcacagaaacacataaacaagaagacacccaccaatattttgctttctcttttcttttcctgcttataactgccttttgttttggttttaattccacctcatattttatatgtgttccaaacttcttcttggaatgtcccttccttaatacccctcaaagaaaagccaccttaacatctcttctctgaaaattctctttagagagatagagagaggaagaaagaatggcagcttgcactgtctactcaacacaatctctgagcacaaattgctccatctcaaccccatcaaagacgcaactcagttttttccaccaaaagcaggtagttttctggaggaacagcaagaagggcagctgcagcagcagaagaagctatgtgataacatgtgcagcaggtgactcacagacagtggtgattggcctggctgcagactcagggtgtgggaagagcaccttcatgaggaggctgaccagtgtgtttggaggagcagcagagccaccaaagggtggcaaccctgactccaacactctcatcagtgacaccaccactgtcatatgcttggatgattaccactctttggacagaactggaagaaaggagaagggtgtcactgcccttgaccctagagccaatgattttgatctcatgtatgaacaagttaaagctcttaaggatggaattgctgttgaaaaaccaatctacaaccatgtcactggtctcttggatccccctgagctcattaaaccccccaaaatcttagtcattgaaggtttgcacccaatgtttgattcccgtgtcagagatctcttggactttagcatctacctagacattagcaatgaggtcaaattcgcttggaaaattcagagagacatggcagagcgtggacacagtcttgaaagcatcaaggctagcattgaagcaaggaagcctgattttgaagcatatattgatccacaaaagcaatacgcagatgcagtgatagaagtgttgccaacgcaactcattccagatgacaacgagggtaagattttgagagtgagattgatacagaaagagggggttaagtactttagcccggtttacttgtttgatgatggctctaccatttcatggataccatgtggaagaaagcttacatgctcctaccctggcatcaaattcttctatggacctgagacttactacggaaatgaggtgtcagttgtagaaatggatggacaatttgacagactagatgaactaatatacgttgagagccacctaagcaacctctctacaaagttctatggagaggttactcaacagatgttgaagcatgctgattttcccggcagcaacaatggaacaggtctcttccaaaccatagttggtttgaagataagagatctatatgagcagctaatagccagcaaggctgagactccagtagctgcaaaagcttaggaattgaacctgccataatatatatacatatatcgatcgagcaacgcagccaaattgagttctctcatcatcaaaatcatcattttctttcttctttcatgttttccacaattccactctatttcatgttattttgtcaattgttattaggctgttctgcatgataattaatgaaaaaaacactatgtatgtatgtacttatccgagaagaaaaagcgaggctgagattcagttatgttgatacaagattgagacaataattggcttctctttctctaaaaaaaataaaaaaaactcgcataacatattttattatcatttttttgtgtgtagtttataaattaatcaaaggggatgatntaattttntatttaaaaaaaaaaaaaaaa

SEQ ID NO: 3093 - DNA, 1787 bp, Glycine max
ctcgagccgaatcggctcgagattccacctcatatttcatatgtgttccaaacttcttcttggaatgtcccttcctaaataaccctcaaacaaaagccaccttaacatctcttctctgaaaattctctttagagagatagagagatagagagagagagaaagaaattaagaaaaaatggcagcctgcactgtctactcaacacaatctctgagcacaaattgctccatctcaaccccatcaaagacacagctgagtttcttccaccaaaagcaggtagttttctggaggaacagcaacaggggcaacagcagcagcagaagaagctatgtgataacatgtgcagcaggtgactcacagacagtggtgattggtcttgctgcagactcagggtgtgggaagagcaccttcatgaggaggctgacaagtgtgtttggaggagcagcagagccaccgaagggtggcaaccctgactcaaacacactcatcagtgacaccaccactgtcatatgcttggatgattaccactctttggatagaactggcagaaaggagaagggtgtcactgcccttgaccctagagccaatgattttgatctcatgtatgaacaagttaaagctcttaaggatggaattgctgttgaaaaaccaatctacaaccatgtcactggtctcctggatccccctgagctcattaaaccccccaaaatcttagtcattgaaggcttgcacccaatgtatgattctcgggtcagagatctcttggactttagcatctacctagacattagcaatgaggtcaaattcgcttggaaaattcagagagacatggcagagcgtggacacagtcttgaaagcatcaaggctagcattgaagcaaggaagcctgattttgaagcatatattgatccacaaaagcaatacgcagatgcagtgatagaagtgttgccaacccaactcattccagatgacaacgagggtaagattttgagagtgaggttgatacagaaagaaggggttaagtactttagcccagtttacttatttgatgatggctctaccatttcatggataccatgtggaaggaagcttacatgctcctaccctggcatcaaattcttctatggaccagagacttactacggaaatgaggtgtcagttgtagaaatggatggacaatttgacagactagatgaactaatatacgttgagagccacctaagcaacctctctacaaagttctatggagaggttactcaacagatgttgaagcatgctgatttccccggcagcaacaatggaacaggtctcttccaaaccatagttggtttgaagataagagatttatatgagcagctaatagccaccaaggctgagactccagtggctgcaaaagcttaggaattgaattgaacctgccataataatatatatacatatcgaccgagcgacgcagtcaaattgcattagttctcatcaaaatcatcattttctttcttctttcatgttttccacaatttcactgtgtttcatgttattttgtctattgttattaggctgttctgcatcataattaatgaaaaaaacacatatgtatgtatgtatgtacttatccgagaaaaaaaagtgaggctgagattcagttatgttgatacaagattgagacaataattggcttctctttctctagctttatccatactggcatcgcatattttcttatcaaactttttgtgtgtagtttgtaaattaatcaaagggaatgatctaatattctatttgttggttg

SEQ ID NO: 3094 - DNA, 1080 bp, Glycine max
cggctgcgagaagacgacagaaggggagtacaaaaatattcatctcttctaacttctaagcattcagtaaaagaactaaacatggcagagaccattcgtttggctgttgctgttcttggcaatgcagcctcagttgccctttatgctgcaccaatggttacctttagaagagttatgaggaagaaaagcacagaggagttttcatgctttccttacatcattggcctcttgaattgtctccttttcacttggtacggtttgcctgttgtgagttacaagtgggaaaatttccctctcgtcacagttaatggagttggtattgttctcgagttatcctatgttctcatttacttctggtatgcttcagccaaaggaaaggtgaaggtagccatgactgcaataccagttttgctggtgttctctataattgctgcagtgtcagcttttgcattccatgataatcatcaccggaagcttctcgtaggtagcatcggcttaggtgtttcagtaacaatgtatggatcccctttgattgtaatgaagaaagttatacaaaccaagagtgtggaattcatgccactaccgttatccatgtgctcatttttagccactgttctctggctgatttatggacttctcattcgtgatatattcgttgcgggtcctagtgcggttggaactcccttggggatcttgcaacttgtactttactgtaaataccgaaaagggagtgttgtggaggatccaagtaagggggaccttgagaagggtaacttggagaaggtggaaatggaaattgggaaagtggaaatgaatgtcacgaatcacatgaacggacactcgtgaacaatgcgtctaaggggaaagattgaagattacagaatgttctattcagattccttctttttatgttttatttcctttattttaagacaaaatgatccccccttagctttggttgtattgctcacatataaattaagttatattacttcctaataaatagtttcttttattgatggacaaaaaaaaaaaaaaaaaaaaaaaaaaaaaaaaaaaaaaaactcgagggggggcccg

SEQ ID NO: 3095 - DNA, 1936 bp, Glycine max
caacacactatggatgtttggtcatggatatgtgagctccccaactcggtggaggggaccgagtcccactcgccacccatgaagttcgaaatcgcgagtgagaagaacgacgacaagctggacaactcaactcgttccattcacctgaaagctgagcgaacctccggctcagactcggaagctgcggtgatcttcaccgtatgcttgcaaggctttcacccacacaacgctcacaagcctctatgggtctccgaaaagtgccacctctcatcagaaaagccgttcctccctctcctcctccaactcctccaggaaatcatatcccactcccccacggcgcacgatagcacctgcccccgttcccagctccagaaactaaaacccgaccccatcgcatggatcatggactcgcacacacccgagtccctctccaccttcttcaacctcgtcttcaccatgcgcctcttctggctctgcgccttccacgctccccccgaagccggctccctctacttccactccctcctcgcccccgttgtcctccgaaccttcttcatcaccgtgggcgtcgacaccgaactctgcttcatgcgcaccctcggttacatcattacaaagcttcacatgatcaaagaactcagcgttggattgggcttaaaaacgatttttccttctcccagattctcttacgccaacgagactcacggtctttggattctcaaaggttacgcgccagtcatgaccatgaaactggcgcgaagcaataacgttaaaaaaagtcaattctctggcatcgatgccaaggagtcaattctccgttactctctggcgcaccaccaactcgaggcacacgtgcagctagaatacaccgttgggtttttcgatgctttcattcaggttcgtgcacgtgtcgataacatacgcctccacgtggcgaggttgggatttacccaaaacgacgacgtggatgatttcgttgaggagaagcactttccgtcccgggttcgggtttgggtgggcccggagatcggagcgacttattgcgctgggctgagcttgggccggtcgacggagaacaaagagagcgaagtggaaactaagagggttgtggagggcaatttggagaagtcgcagggttcgaatgtgaaagcgttagccaagtcgtcgaggaggacgcggagtaggagttggagaatggatcaagacgcggaagggaacgcggcgatattcgacgtcgttttgcatgataacactacgggccaggaaatgggctcgtggaggcccataagtgaaacgggtggtgacccgggtcatgggctgagagggcgatatgcgagggcaaatagagcgtttaataaaagcgggtcggtggttattgcaggggatgaatatggagaggaagtggggtggaggctttgcaaagagatggaagggagtgtgatgaagtggagaatagggggagagttttgggttagctatttgcccaaccaagcaaagggttcttcttttgaaactaggtacatggagtggtgtgatgaagttgatttgcctcttattcatggtaaaacaacctaagcaagcatgccagtatatatatatgaaagttgaaacccttaattctctcaccaaattacccacgcgaaaaaaaggatcggaaaaggaggagaggtttcggtaaaaatgcatgtaatagaactaaacttagcgactagcatggttagtatatgcctatatgatactgctgtttaggtgctatatatatcaatatatgtggaatagccattggtgcactatctaattaagaaaatgcttcatctatagtgtctggttccatataggattccttagttaaaatgtctaaaattgagtaaagctagctataatatataactcttggttaaacttttaagggcacgtttagtttacaatattaatt

SEQ ID NO: 3096 - DNA, 1422 bp, Glycine max
tagggaatttggccctcgaggccaagaattcaagcgcttgaattcaagcccgttccgttctccaaacggcgtcgtccaaactcgcatcctccgtcctccgaactttcttcatcaccgtcggcgtcgacaccgaactctgcttcatgcgcaccctcggttacatcattacaaaacttcacttgatcaaagaactcgacgttggattattaggcttaaaaacgcttttgccttctccaaaattctcttacgccaacgaggctcacggtctttggattctcaaaggttacgcgccagtcatgaccatgaaactggcgcgaaccaacacagttcaaaaaactcaattctctggcatcgatgccaaggagtcgattctccgttactcactcgcgcaccaccaacttgaggcacacgtgcagctagactacaccgttgggttttacgatggtttcattcaggttcgtgcacgtgtcgataatatacgcctccacctcgcgaggttaggtttcagccaaaacgacgacgtggatgatttcgttgaggagaagcactttccgtcacgggttcgggtttgggtgggcccggagataggatccacttattgcgctgggctgagcttgggccggtccacggagaacaaagagtgcgaagtggaaacaaagaggattgtggagggtaatttcgagaagtcgcagggttctaacgtgaaagcgttagccaagtcgtcgaggaggacgcggagtaggagttggagaatggaccaagacgcggaagggaacgcggcgatattcgacgtcgttttgcatgataacactacgggccaggaagtgggctcgtggaggcccaagggtgatgacccggctcatgggctgagagggcgctatgtgagggcaaatagagcgtttaataaaagcggatcggtggttattgctggggatgaatatggggaggaagtagggtggaggcttagcaaagagatggaagggagtgtgctgaagtggagaatagggggagagttttgggttagctatttgcccaaccaagcaaagggttcttattttgaaactaggtacatcgagtggtgtgatgaagttgacttgcctcttattcatggaaaaacaacctaagcaaccacgcaatcatatcaaactttaaacccttctcacctaattataaccaccaaaagaggacgcacaagtttgtgtaaaaatgcatctagtactaaacttagccactagctggttagtatatatacatatatatggcactgcagtttaagtgctatatatcaatatatgtacaatagccattactaagcaaatgctttatctgtagtgtctggtttcatatacaattcccaagttataaaatgtcaaataaatgaataaagcaataatatataactcttgtttaaacttttaaaaa

SEQ ID NO: 3097 - DNA, 2108 bp, Glycine max
ggcttgtgacaaaatgacacaggagaatttgagccatcctaagcaagcagcatgagtcacagatttcattctctctccaactgataagaaacgtagttccatgtgggctcttaggatccactcacttaactctaaactcgtcgtgtgtgttccttctttccacttcaaacttgtgacccagaaaaaagaccctttccattctcctccttttcttcctcctccactggctgcacctcgctgccgtgtctctgcctagcgtgaaattggcctcatttcccatctgggtcctgtgaattgcgattggaaccgcgttttccccgcttctgggcttggctcagaagtagtcagaatgatgtctgtcacaggcaaaagcattgattttgctggcaaaaacttggtctcttgtggctgctcttccaatgcttcttcgtttgataggtacactgtgaggaactatgccaagctgaatagtaataattctaaagggtgtggcagagatcatggggctcgtaaattggtttgttgtaagaagaggagcactcattgtcgggtttcttctatgaagactgcacagcctacggtgaatggggggactcatgcatttgaaggccttaccacaggattggacttgaagggttattcagaagaccccatttcccctgctaggctttttgaagtggttgccgatgatctgctaactctcaataaaaatcttcagtcgattgtaggagcagaaaatccagttttgatgtctgcagctgagcagatttttagtgctggtggaaagaggatgagaccagctttggtgttcttggtgtcaagggcgactgcagagttacttggcttgaaggaacttactgcaaagcatcgacgtttagcagagataattgaaatgattcatactgcaagtttgatacatgatgatgtactagatgagagtgaccttcgacgagggaagaaaactgttcatcaaatgtttggaacaagagttgcagtgctggctggagacttcatgtttgcacagtcatcatggtatctagccaaccttgaaaatattcaagtcattaaactcatcagtcaggtgataaaagattttgcaagtggggaaataaagcaggcttcaagcttgtttgattgtgatgtacaacttgacgagtatctaattaagagctattacaagacagcatccttgattgctgccagcacaaaaggagccgcgatctttagtggtgctgacagcagcgtgactgagaaaatgtacgaatatggaaggaatcttggtctatccttccaagttgtggatgacatattggatttcactcaatcagccgagcaactgggaaagcctgctggcagtgaccttgccaagggcaacctgactgcaccagtaattttcgcactggagaaagaaccgaaattgagggatatcatcgagtctgaattcagtgaggttggttcccttgaggaagccatcaatttggtcaagagttgtgggggcattgaaagagcacaagagttagcaaaagagaaagccgatcttgcaattcaaagtctccaatgcctacctcagagtgtatttcgtttagcccttgaagatatggtggcatataaccttcaacggattgcataagcttgtgcatgctgatgacacattgttaaagaaaaaacacaaaaagattcttttggtcctaatatagggatgagagagccttgaactttttgtcatttcaagaatttcaagcaaatctacacttgtgctacttttggggtacttttatagtcattgaagggcaaagcaagcgcgcattctcatcatttaatatatttgcagcttcctgcaaagtacaagaacataatatattccattattgtatcaatacaagtctgcagtatattctttccccccattcttcctttctgggatcttgaaaacagtaaaataaaaaatgataattgatgtttcttttttttttttttctgtttctttttcttctgtattttctgagggtagtataaaatttggcttgtaaactcaatctcgtcttggccttgctcattcattgtcatactttattctatcttatcattgcaaaagattttcaattttt

SEQ ID NO: 3098 - DNA, 1123 bp, Glycine max
ggcattcaactgaaaaaggaagaggaaaacctctcattttctctctctctctctctaaacacagatttcatttccaattctctatctctagaaaatgggaacaacaattcttcgttcccacgattgcctccaaggccggttcctccacaacgaagccttcgccattgccgcatcacgtgtcgcatcgcgaagaaactctaatcctaacaataatagcttcgcctcctccgccaaaccaaaccgctgccggaagcggagtccggtcaccaatcgagaccgccgtcgatctccggcgaaggccaccttgccggcgaatctcgtcatgggacacgttaagatcctgaagcgaggcgagaaattgagcctccagaataataccaaccaaagactcgcggagaacgtttcgatgaagaacgatatgggcctggatttgttattgggctcgacggatcggttgggcccggatccattaaccatgcagaagcatattagggtttcagatgctaacaacaacggcgtgtatgcgggatcggcgttcgtctcgtcgccgcatccaagttccgttccggtgccgggatttctagggcggaacggcgcagccaccagcgatttgcgacggttgctgcgactcgatttggaatgatattatttcggtgtttgcagattatattgtgtacttatgcaatgattaggtgaagatggatgatgattagctcgcatggtctctgacgcgcttcctttattttttcaagaggatagccgcagggtgcgggcacgtgaagaagaaacggagaaagcaatgcttgaaggtttttagggagtggagatttggtgttcggtttctgaaagggggtgttagtttgttagatagtgatgccgttagtttttaaacgctgttaaaagacggaagggtggggttaagaaatagaaatgttggtctgatgcatgtgaatctagaatgtgtagttgatggggtttcgtatgggtagaaagaaagtttgatgcgttgtctgttttaggtggtgtttgtatgatgttcagttctcattatcgtgctgataatatgtagttgtgaatctttatattagtaatacaagaatgtttctgatattaaaaaaaaaaa

SEQ ID NO: 3099 - DNA, 1136 bp, Glycine max
ccacgccgtcctcaaaagtaaaagaaaacctctcgttttctttctctctctctaaaacacgatttccaattttctttctctagaaatgggaacagcaatccttcgttcccacgattgcctccaaggccggttcctccacaacgaagccttcgcgatcgccacgtcacgtgttgcatcgcgaagaaaccctaactctaacaacaataaccataatagcttcgcctcctccgcaaaccagaattgccgccggaagcggagtccggtcaccgatcgagagcgccgtcgatcgccgccgaatctcgtcacgggacacgttaagatcctgaagcgaggcgagaaattgagcctccagaataaaaaccaaagactcgctgtttccgcggagaacgttttggtgaagaacgatgtgggcctggatttgttattgggttccacggatcgattgggcccgggtccattaaccgtgaagaagcagattagggtttcggatgcgaacaacaacggcgtgtacgcgggatcggcgttcgtttcgtcgccgcacccgagttctgttccggtgccgggatttctagtgcggaacggcgccgccaccagcaatcttcgacggttgctgcgactcgatttggaatgatgattaattcgattatatgatttcggtgtttgcagattatattgtgtactttgcaatgaataggggttgatggatgatgatgatgatgattgctcgtgtggtctctgacgcgcttcctttattttttcaagaggataggcgcagggtgcgggcgcgtgaagaaaaaacggagaaagcaacgtgtgaaggtttttagggatggagatattggtgttacggtttctgtaaggggggttagataggtaggtagtgatgtcgttagttttaaaacgctgttaaagacggaagggtggggtataagaataagaaatagaaatgtgggtctggtatatgtgaatctagaatgtgtagtttgatgggggtttcgtatggtagaagaaagtttgatgcgttgtgtatgttttaggtgatgttggtgtgatgttcagttcttattatcatgctcataatgtgtagttgtgaaaacttatattagtaatacaacaaagtttctggtattagcttt

SEQ ID NO: 3100 - DNA, 1686 bp, Glycine max
  misc_feature (5)..(5): n is a, c, g, or t
gcatnatgctattatcatatgctccccggtttactcctctctgtctgcttctcatcccccatatgacatatgttccttcgatccccttctctattttcctttatcccattgtccgaattcacgttctttttcgtcccaatccttaagctttaagctctaaactggatccaccccacccacatacccagtcttcccttttttgaggtaaacgctatgctatattactcaatataaaatattcattcattcttgcgtgtgcgtgtgtgttgcgataatgacgactcaaattcgataattcccaattgttttttatttcaaatgtaaacgcaaaatgaatacccattttccccttttccattcttcaaccatcacaaacccaccaccgccccaaagttgaatcctttctgtccccacaacatcaagtgcagcttcttcggatgccccgaattctgttccgttatggatgtgcgaggagatgggattttcccggatgaggtggttattcagattctagcaaggttgcctgtgaagtcccttttcagagtcaaggttcgagcatcttgtaatggcttgctgtgctgctctagtattcctgataagggtgtcttctatgtctgcaatccggttactcgcgagtacaggttgcttcccaagagtagggaaaggcatgtgactcgattttacccggatggcgaggctaccttggttggtttggcctgtgattcagcatatcggaagttcaatgttgttctagcgggataccatcgcatgtttggtcataggccagatggaagtttcatatgtttggcgtgtgattcggagttgaacaagtggaggaagttcgtttcgttccaagatgaccattttactcacatgaataagaaccaggttgtttttgtcaataatgctctgcactggttgactgctagctctacttatatacttgtgcttgatttaagttgtgaggtttggaggaagatgcaattaccgtatgacttgatttgtggaacgggaaataggatttatctcttggacttcgatggctgcttgtctgttattaaaatttcagaagcatggatgaatatatgggtgctaaaagattactggaaagatgaatggtgtatggtggataaggtgagtctgaggtgtatcagaggaatggtgccaggcatttttccaatcagtcagactggtgaatgtgtttttttggcaactcataagcagattttggtgtatcatcgcaagactcaaatttggaaagaaatgtactctgtgaagtataggtcaacactcccattatggttttctgctcatgcatatcgcagcacaatgttctcatgtaactgagtcatggtgactgcatcaaatgacttatgtgcatatatttctagttgcaagtgttttatatttagttaagccattgttatttgctcaagatatcatttgtttctgatagtcatgttaaaactgtgatattggctttgccattatattgcttcaccattgtctcttgtaactggggtgtggcttcaataaatggcctttgtacatacatttctaaaaacaacttgcaagtatttaatactcatttgctcattgttatttgctgaagatattgcatttttctgatacagtatctttattgtaaaactatttcattgactttgccatgtaggggcctatctc

SEQ ID NO: 3101 - DNA, 1323 bp, Glycine max
  misc_feature (1151)..(1151): n is a, c, g, or t
  misc_feature (1162)..(1162): n is a, c, g, or t
  misc_feature (1219)..(1219): n is a, c, g, or t
  misc_feature (1222)..(1222): n is a, c, g, or t
  misc_feature (1245)..(1245): n is a, c, g, or t
  misc_feature (1253)..(1253): n is a, c, g, or t
  misc_feature (1257)..(1257): n is a, c, g, or t
  misc_feature (1298)..(1298): n is a, c, g, or t
  misc_feature (1314)..(1314): n is a, c, g, or t
  misc_feature (1316)..(1316): n is a, c, g, or t
ccacgcgtccgaaacgctatgctatattactccaatataaaatatattcattcttgcgtgtgcgtgtgtgtggcaataatgatgactcaaattcgataattcccccccaaaaaaaaaaattcaaatgtgaacggaaaatgaaaacccattttccccgtttccattcttcaaccatcacaaacccaccaccgccccaaagttgaatcctttctgtccccacaacatcaagtgcagcttcttcggatgccccgaattctgttccgttatggatgtgcgaggagatgggattttcccggatgaggtggttattcagattcttgcaaggttgcctgtgaagtcccttttcaggttcaaaaccgtgtgcaaactgtggtataggttgtctttggataagtatttcattcaactctacaatgaggtgtctaggaagaaccccatgattctggtggagatttcggattcgtccgagtccaaaactagcttaatctgtgttgataatttgaggggggtgtctgaattttcactgaatttcttgaatgatagagttaaggttcgagcatcctgtaatggcttgctgtgttgctctagtattccagataagggtgtcttctatgtctgcaatccggtcactcgtgagtacaggttgcttccaaagagtagggaaaggcatgtgactcgattttatccggatggtgaggctaccttggttggcttggcctgtgattcagcgcatcagaagttcaatgttgttctagcaggctaccatcgcatgtttggacataggccggatggaagtttcatatgtttggtgtttgattcggagttgaacaagtggaggaagtttgtttcgttccaagatgaccattttactcacatgaataagaaccaggttgtttttgtcaatattgctctgcactggttgactgctagctctacttatatacttgtgcttgatttaagttgtgacgtttggaggaagatgcaattaccgtatgacttgatttgtggaacgggaaataggatttatctcttggacttcgatggctgcttgtctgttattaaaatttcagaagcatggatgaatatatgggtgctaaaagattactggaaagatgaatggtgtatggtggataaggtgagtctgaggtgtntcagaagaatngttcccagcatttttcccatcatcagactggtgaatgttttttttttgcaccctaancanatttggtgttcaccgcagacccnattggaanaaantacccgtgaaatatagtcccccccccttttggtttcctgcncctgccttcccacccnangtcccct

SEQ ID NO: 3102 - DNA, 1047 bp, Glycine max
  misc_feature (1031)..(1031): n is a, c, g, or t
gtcaatgtggagcccatccttgtaatgatatctatgcacaacttggtcttagtcttgtatgtttggaactggcccgctttagtatagtttgggaagtcgaaaactttgaaccgcttctccgggagacaaaaaagggaatttttgcagaaaacgctaaccaattacccagacacacccattctaaccaaagcaaaaaaagtcttctcaaaacgccagagtcagagagcagagttcaaacctcacgcctttgaactaactctaagcatttactccaatagctatagctagccccaacccaactcagagtacatcatttcaataacgcttccttttcactcttttctggaactccctcttctgtcttatatatttgctcagtgcaaaatcaaaaacccactcactattttgggttcaagctggatttgatcttagcaagcaagaaagaagctgtcttgatggcgaatcgttggtgggccgggagcgcgacggtgaagcccagtgaacaagacaacggtgacaacaacggtactcccaccaacagtgggaacagtaacaccaaagttaacgcggttctcgaggacgacgcaaacaccaacgagcgcgacggcgaagagcagaccctcagcggcgggcggcggccgcgtggcaggccgccagggtcaaagaacaagccaaagccgccggtggtgataacgaaagagagccccaacgcgctctgcagccacatccttgagatcagcgacggcagcgacgtggctgagtgcattgctatcttcgccacgcgccgccaccgcggcgtctcagtcctcagcggcaacggtttcgtcaccaacgtcacgctccggcagccggcggcccctggaggggtcatcaccctccaggggcggttcgagattctctccctctccggcgcgttcctgccggcgccttcgccgccggaggccaccggactcaccgtgtacctcgccggcgggcaggggcaggtggtcggaggaagcgtggtgggaccccttgtcacctcggggccgggngattgttgttgctgct

SEQ ID NO: 3103 - DNA, 546 bp, Glycine max
ctgacgcggcggcggcgccgccgaggcgcccggggccctacctccgttatcaaaacgcagccaagtctctgttctgtattctagggtttggattctgagtttcgtttcagtttttgatcaccatgagagctaagtggaagaagaagcgtatgaggaggttgaagaggaagcgccgaaagatgaggcagagatcgaagtagtgtgcttgtttccccagcaactattgctactagttttgttttatttcagctatgtttttgtttccaaatgttacgatacatttttattggtttctcttgcttttgtcttacctcaaaaaagatgctcttaccgcaaattaattagatttaatatttgaatctaaaaaaaaaaaaaaaaaaaaaaggtttaaaaaaaaaaaaatttcgatatttcgcactttcgcgcattacactgtacataaggtgccatttttttgaagaattaattaactgcaattgtttggtccctgttcttgactatgttaaagtccaggttgaataaaacaactgtttcgtcattgaaaaa

SEQ ID NO: 3104 - DNA, 1277 bp, Glycine max
  misc_feature (30)..(30): n is a, c, g, or t
  misc_feature (35)..(35): n is a, c, g, or t
  misc_feature (37)..(37): n is a, c, g, or t
aaaaacttcccacgtaacaccaatacacgnaggcntnccctcctgccacgtcacccatcacaagtactttccgtaatcaacgagaacttcccaatctacccccactccccctccaaattcaccaacccaccctcccctcatataaaccacgcgtcccgcagaacgcacaacactcccgagggaccctaatacccatttcggtaataacacaatcgcaatccgttactcactctcttccatggcgacggggttactgaagagggcggcgcagcgtgtcccctcctcgccggcgttcaagctggccattctccgggcccacgcgtcggaggcgcaggcccagcaggtggagcccaaggcccgcgaaaccccgaccctcaaaaccttccaaatctaccgctggaaccccgaaaacccctcaaagcccgagctcaaggactaccagatcaacctaaaggagtgtgggcccatggtcctcgacgcgctcatcaagatcaagaacgagatcgacccgagcctcacgttccgccgctcgtgccgcgaggggatctgcggctcctgcgcaatgaacatcgacggctgcaacggcctggcgtgcctcaccaagatcccctcggaaaaaaactccgccgccacgacgatcactcctctgccgcacatgttcgtgatcaaggacctggtcgtggacatgacgaacttctacaatcagtataagagtatcgagccctggctgaagaggaagaacccaccggtgccgggaaaagagattctgcagagcaagaaggagagggagaagctcgacgggatgtacgagtgcattctctgcgcctgctgtagcacctcttgccccagctactggtggaaccccgagtcctatctcggtcccgctgcgttgctccacgctaataggtggataagcgacagccgtgatgagtacactaaggagagattggatgccattaatgatgaattcaagctctatcgctgccacaccatattgaactgtgctcgtgcctgcccaaaggggttgaacccaggaaagcaaatctcacatatcaagtcacttcagcctaaagcttaaaattctatttttagaggcatgatgatgtttgcatttgatcatttgtgttggaactttgtatttcttcaaagttggggatgatttagctatattcttgattaataaaacctgagccccttttgtaaaacttgggttttaagtttttattgactttgtgtttctgaaataaatgtcaatagcaaacagaaccccatcgcat

SEQ ID NO: 3105 - DNA, 1332 bp, Glycine max
aacccacccatccctcatatataaaacaaagaaccgccgaccgcccatcacaaacacaacactcccgaagaatccccaatacccatttcggtaaataatataatcgcaatccttcttcactcgcttcgatggcgacagggttactgaagagggcggcgcagaggctcccctcctcgccggggttcaagctggccctcctccgggcccacgcgtcggaggcccaggcccagcaggtggagcccaaggcccgcggcaccccgaccctcaaaaccttccaaatctaccgctggagcccggagaacccctcaaagcccgagctcaaggactaccagatcaacctaaaggagtgcgggcccatggtcctggacgcgctcatcaagatcaagaacgagatcgacccgagcctcacgttccgccgctcgtgccgcgaggggatctgcggctcctgcgccatgaacatcgacggttgcaacggcctcgcgtgcctcaccaagatcccctccgaaggcgccgccaccacgatcacccctctgccacacatgttcgtgatcaaggacctcgtcgtcgacatgacgaacttctacaatcagtacaagagtatcgagccgtggctcaagaggaagaacccaccggagccggggaaggagattctacagagcaagaaggagagggagaaactcgatgggatgtacgagtgcatactgtgcgcctgctgtagcacgtcctgccccagctactggtggaaccccgagtcctacctcggtcccgccgcgttgctccacgctaataggtggataagtgacagtcgtgatgagtacactaaggagagattggatgccattaatgatgaattcaagctctatcgctgccacaccatattgaactgtgctcgagcctgcccaaaggggttaaacccaggaaagcaaatctcacatatcaagtcacttcagcctaaagcataaaatcctattgttagaggcatgatgatgtttgcatttgatcatttatgttgcaactttgtattttcttcgtagttggggatgatttagctatattcttaataaaacctgagccccttttgtaaaacttgggttttaagtttttattgacttgtgtttctctgaaataaatgttaatagcaaacagaaccccatctcataaaattggctgtagctatgttggatttagatatacaagctaaatactccctggatttttccccccaaaagatttgcactggaaactgggaggcacgcatgtttctttttgtcttaaataaaaatttcaaagttctcttctgagctaaaaaaaaaaaaaaaaagcgctctagag

SEQ ID NO: 3106 - DNA, 1612 bp, Glycine max
cggaattcccggctcgagccacgcgcgccgcaaaaactggggcgggcacgcagagcagagggaggaagaaagggtcgaagagaatgtgggaatcaattgttttgacggtggttgccactgccggcaacaacatcggcaaaatccttcagaagaagggcaccgtcattcttccccctctctctttcaagctcaaggtcataagggcatatgctttgaacaaaacctgggtgataggttttctaatggatatatttggggcactgttgatgttaagggcattagctcttgcgcctgtctctgtcatccaaccagtttctggctgtggactggcaattctctcagtcttttctcatttttatctcaaggaagtcatgaatgttgttgattgggtgggcattaccttggcaggttttggcacaataggagttggtgctggaggtgaggagcaagaggctgctgctctatctattttccacataccgtggctggcatttgttgttttcatcttgtttataatgcttaatggatggcttcgtatattcaaacgtaatcgaagagaacaagagatgatggaatatgatgttgttgaggaaattatttacggcttggaatctggaattttgtttgggatggcatctgtaatatcaaagatggggtttctgttcttggagcaaggcttccccaagctgttggttcctatttgcatcatcataagtgtctgttcaagtggtacaggcttttactaccagacacgtggtctaaaacatgggagggctattgtagtttctacatgtgccgcagtggcatctattttgactggtgtacttgctgggatgcttgctttgggtgagcgactcccttcggccccaaaagctcgctttttacttcttcttggatggctacttattattgttggcgtgattttacttgttggttcaacaaagctagtgagattctttcgattttcttcacaccactttaaaagaagcagcgttgataagaattatggccctagaagatctggaacttcccgtgttagggaacctagcccaactgctgtcattcaagcggctaccttaaatcatttactctcatcatcttccaaagaaaaagcttgatttgacttgagctggaaaatgatccttcatccattctcaggattcaccctcaccccttaaagaagaagaccccttttgtaaggctagattgtttgtgtacagtggttgctttatcagagggcatgaatttttagggatcgttccttccgactcacgtattttgcgtgaaaaatcattatcttttctgatgccacttgtataattcatgaacttccaatatttctcgatattgtatatgaagatggtatagcaagatgctgaatgctagcattgcatggaaacaaattgcagggtgcagtgcagaacaatttattcctaatttcctatgctaatgtagtagcagtgttctttgagattaggtctgatttctgttaccaagtaatacgagaaggctgtactttatcctctccgttgaagggaaatataatggaaagtttactatttgacatttcaaaaaaaaaaaaaaaattatatttccttttaatttaaagtta

SEQ ID NO: 3107 - DNA, 1328 bp, Glycine max
tcgagtcagctacgtagggccccccccccagatgaagtaggcgaaggctgaaggaaacctctggaattttctttggccaacggcgattccactaataaatatacgtttgttgtgtttccgaggcctgtgaatcggaattggggtttcttcaatcggaatcgcgaacaacatggaagtgagaattgggcaaagggtgtctcgcggaatgctccctctcctcgctctccacaccgtcagcgagtattaccgctccgaccacaaacctccgttcaccgccgccctcatcgccgccaacaccctcatctacctccgcccctccttcctcgatcccctcattccccccattgaacaagtctggttcaacccccacctcatcctcaagaacaaggacttgaaacgcttcttgttgtcgccgttttaccatatcggagaaccgcacctggtttacaacatgctatcccttctctggaaggggtttcagttggaaacctcaatgggaagcgtcgatttcgcttccatagtcgcttccttgctcgttctctcccagggcgtaaccctaatgttatccaaatcactgcttctgttcttcgactacgagagatcctactacagcgaatactccgtcggattctccggcgtcctcttcgccatgaaagtcgttctcaactcccaatcggagaactacacctccgtctacggaattatcgttccgtcccgttacgctgcgtgggctgaattggttctcgctcagcttctcgtgccgggcgtgtcgtttctcggccatctcggtggcattctggcggggcttctttatctgaagctgaggagtacttattcgggttctaaccctataaaagttctcatcagagggattgttgatgctgtgaagtggccttttaagttcttgcggcggaggcggggacggatcaccggaaggggaacagttggaagtaacagggcgtggagatgccagacgtgtacctatgacaacaacaatggttccctgagagtgtgtgagatgtgtgggacgattagggttgtcaatggagtgtcctcttttcagaggagctcccgttctgatgggcttcctttggatgagttgcgccgccggagaatcgacaggtttggaggcaggtgatcgtggttagttttgagttcgctgcagcttctggtaaataatactattggatattgagattcaacacatgttagacttttttgtttcgacatatatatgttagttgtagaagtatgacgactgagcaatgaatgttttcatgctatgctagattgtttggcattttcaagaaaaaaaaaatgaaatttgg

SEQ ID NO: 3108 - DNA, 1638 bp, Glycine max
  misc_feature (1458)..(1458): n is a, c, g, or t
  misc_feature (1469)..(1469): n is a, c, g, or t
gctcggcccgtcgttttcaccccctataataaaaaccttacccccacccctcacattcgacgccttcgctcagctactcctatttacacccctcaaatctgctttcaactttcacactcacaccaccaccatgacccttcctcaatcatttggctgtggacttgtgcaagcacccttggtgacaagctctggtcttcttactaaagtttggagtgttatctcttctcgtgatgaagacatagtttcatactcaggaaataatggactgtccttgaaagtttctgaggattcgggtttgacggttgttgcgtttgaggtcaacccggattttgatcttcaatctacagttgtttctttctctgatcccaaggagaataatttgaaccgctttgagtttctttgtaccaagaaacatccagatttctctgtcaacaagtctgtagttgatcttttttctaaaaatcttccgaggcttgatgagttgaagtccaagattgatagctcccctcgattgattgttactggacgtggtcttggaggaccaattgcttctctcttcactttatcgctattaggtaacaagaattcctctgagaaaaagaaaccccctctctgcatcacctttggttctccccttgtcggtaacaaaaagtttcaagaagccatatcacgtagttctacatggagttcttgctttctacatgtggtctctatcaaagacccatttctcaaaagattgaatcctgacatcaaggattacatgccttttgggacatttctcttctgctctgatataagttctacctgttttgagaaccccaagtctgttttggaacttcttgtgatctcaatcaaagatcaaaatcaagcatttccgtccatagattatggcaacattgtgggaaatctctatattaaagcaatttgcaaggactttaccccacgggggcaggactttactgattctaattcactgcgtgcaagtatccgtttgcagttgtgggcagcactaggattgacaccagatatgcagcaacaacacctgaacattgatataaatgctttggtaacaaagttggaaaagctggagaaggaagtgatcttccagaaggggaacaaatttgatccatccaagaaattgaatgtgatgaagatagaaatggccaaacttgagtggtacaagaagtattccaaaaataataagattggctactatgacagcttcaagaggggtatctcaacaagcgacctagatgttgttcagtgccagaaaaccctcagaaattactggattgacatggttgcagaggcagagctgaaacctcagacagaaggtgcagcttttcgtactccctggctttttggcggaactaattacaggagaatgtttgaacccctagatattgctgagtactacgcgaatggtggtaaagactatgaggctaagggaagatctanacattatatantgttgcaggagtggctggaagaggataagaaagaaaaaagcaattcaaacagtacaaacaaaaaggatgttggaatctattttaacttttgactcttgcttttgggcacatgttgaagaagctatcctttcctgcaaagtgttggaggatgaacaatctagtgtgacag

SEQ ID NO: 3109 - DNA, 2025 bp, Glycine max
tcagctacgtaggcccccccccctttttgacacaaaaaaaaaaaaaacaaaactttggtgggatttgagggtatttaggttgtggattgagttggattgttggggttggaagaatccatagccatgaatgtgatgcgaaggttgaaaagcattgcttctgggaggacttccatttcatcagatcctggaggggattgtaccacaaaaagagcaaagtttgatcaagacaccgaaggaaaggtcaatgaggaaacatatcctaatgagaggtgcggaaaagatcaggaacaccatgtagattccaatgttccttcagtgcctagaactgagaagtcaggttatgatcagcttccaaaagaattaaatgaaatgaagattggagatgacaaaggcaaaaacaacaatgagaaggatatggaagcaactattgtgagtggtaatggaacagaaacctgtgaaattattacaactgctattggaggtcgagacggacaaccaaagcggacaatctcatacatagcagaacgtgtggttggcactggttcttttggtgttgtttatcaggctaagtgccttgaaactggtgaagcagttgcaataaaaaaagtgttgcaagacaagagatataagaatagggaactgcaggttatgcgaatgcttgaccatactaatgttctcagactaaaacactgtttctattcaactgctgagaaagatgatttgtaccttaacctagttttggagtatgtacctgaaactgtctacagagtttcaaagcactatgtcagaatgcaccaacatatgcctatcattaatgtgcaactgtatacataccagatatgtcggggtttaaattatttgcatcatgtgattggagtctgccatcgggacatcaaaccccagaatctattggttaatccccagactcatcagttaaaagtatgtgattttgggagtgcaaagatgttggtgcctggcgaacccaacatatcgtatatatgctcgcggtattatagagctccagaacttatatttggtgcaacagaatacacaactgctattgatatttggtctgctggttgtgtgttggctgagcttcttctaggacatccaatgtttcccggagagagtggggttgatcaattggtagagatcattaagatcttgggaacaccaaccagagaagaaataaagtgcatgaatccaaattacaccgaatttaagtttcctcagataaaagcacacccatggcataaggtttttcacaagaagatgccttcagaagcagtggatctagtgtcaaggatgcttcagtattcaccgaatctacgatgcactgctttggaagcatgtgcacaccctttctttgatgatctgcgagaaccaaatgcatgcttgccaaatgggcgaccattgcctccattgttcaacttcactgctcaagaactggcggatgcacccgatgagttgcgtaggcgtctcattcctgagcatgcaagaagttgaattcattcttgagctttgtacatgggtttttggatgaatagataaccacaccagcaatgctaccatccctaacagtctaggtctctgtagtccaccttgcacaatcattgactatacagctcataggaaccttaaaaccatgtagcttatttatcaaggacccacacgccacaatcccgtggatgaagtagtactgcctggtgatggggttgtaaccattttttaagtagtttgtgattgatgcatgcctcatttgtaaaagataatgagttcttgcaattctttgctcatgtttcatatagttcaagctgcttgtttctcaaaaaaaaaaaaaaaaaatcatcagatgagtaggcatcttttttttgacccctttttattttgtttttgttacttttgtaacaatgaagtcctttcttctttgttgctgtgtttgggtaaacacgagcttattatataagttttcatggataaaaaaaaaaaaaaaaaaaaaaaaaaaaaaaaaaaaaaaaaaaaaaa

SEQ ID NO: 3110 - DNA, 1022 bp, Glycine max
cccgcggtcgacccacccctccctacggctgcgaggagacgacagaaggggtcaaggaagggatttacgaggaaaatgtggaaattccaagctataagaccaacattatgatgcttggcgatggaagtgatgtctctttcataactggtaacagaagcgtcggtgatggctggaccactttcagatctgcaactctagctgtttctggtgatggttttctggcacgtgatatagccattgagaacagtgcagggccagagaagcatcaagcagtggcattgagagtaaatgcagacttagcagccttttacaggtgtgcaatttatggctaccaagacactctatatgttcactcctttagacaattctatagagagtgtgacatttatggcaccatagattacatatttgggaatgcagccgcgattctacaagaatgcaacatcatatcaagaaaaccaatgcctggccaattcacagtaatcactgcacaatcaagagatagccctgatgaggacactggcatctcattccaaaactgctcaatcatagcaacccttgatctctattccaactctagcagcttcaagagctaccttgggaggccatggagggtgtattctcgcactgtttaccttgagtcctacattgatgacttcattgacgcaaagggttggacaaagtggtctaatgagcaaggattgaacactttgtattacggagagtatgacaactatggacctggttccggcacagagaagcgtgtgcaatggtttgggtaccatttgatggattatggtgatgcttataatttcacagtttcgcagttcatcaatggagatggttggcttgatactacgtccgttccttatgatgatgggatttgagcaatgtataataagtttagttcgttaattgttaaggtacttacaattgtcactatcctctggagtatgactactaaggtacttactaaagtaacattgtaaaataagaaaagttcatggctaattacacagggg

SEQ ID NO: 3111 - DNA, 920 bp, Glycine max
ggaccactttcagatctgcaactctagctgtttctggtgatggttttctggcacgtgatatagccattgagaacagtgcagggccagagaagcatcaagcagtggcattgagagtaaatgcagacttagcagccttttacaggtgtgcaatttatggctaccaagacactctatatgttcactcctttagacaattctatagagagtgtgacatttatggcaccatagattacatatttgggaatgcagccgcgattctacaagaatgcaacatcatatcaagaaaaccaatgcctggccaattcccagtaatcactgcccaatcaagagatagccctgatgaggacactggcatctcattccaaaactgctcaatcatagcaacccttgatctctattccaactctagtagcttcaagagctaccttgggaggccatggaggatctattctcgcaccgtttaccttgagtcctacattgatgacttcattgacccaaagggttggacaaagtggtctaatgagcaaggattggaaactttgtattatggtgagtatgacaactatggacctggttccagcatagataagcgtgtacaatggttagggtaccatttgatggattatggtgatgcctataatttcactgtttcggagttcatcaatggagatggttggcttgataccacttccgttccttatgatgacgggatttgagcaaagtaaaataggtttagtttgctaaattgttaaggtacttacaatttgtcactatcctctggcttaaggccactaaggttgttactaaagtaacattgtaaaataagaaaagttcacggctaattagacagctgatttgcccaaaaaaaaaaaaaaaaaaaaaaaaaccaaccggccgctctagaggatccaagcttgcgt

SEQ ID NO: 3112 - DNA, 1600 bp, Glycine max
ctatacagagcaaggtacgaaagtttcgtgttcttggcacatacaactaccccaagattcagaagttggatagagaagaatagaagagtttgatcaaattgaagttcaaatcctttctgctgagctgttgttccagcaagtttgtgatatatatcatcaattagcatgtcaaccaagtttggaagattggtgcctttggttttttccaaaaggggattttccacctccaccagtattcaaaagggtggttctgaggaaggtttaaaatcattgaacctctgttctgcaattaatcaggctcttcacattgccttggacactgatccccgttcttatgtttttggagaggatgtcagcttcggtggggtcttccgttgcaccactggattagcagaccaatttggtaaaaagagggttttcaatactcctctctgtgagcagggtattgttggttttggcattggtctagctgccatgggaaatcgagccatagcagaaatccagtttgcagattacattttccctgcttttgaccagattgtcaatgaagctgctaaattcagataccggagtggtaaccaatttaattgtggaggtttaacagttagagccccttatggagctgtgggccatggtgggcattaccactctcagtctcctgaggctttcttctgtcatgttcctggtatcaaagtggtcatccctcgaagtccacgggaagcaaaagggttattgctatcttgcatacgagatccaaatcctgtagtattttttgaaccgaagtggctttatcgtttggctgttgaagaagtaccagaggatgactacatgctgcctttatctgaggccgaggtaattcggcaaggaagtgatgtaacacttgttggatggggagctcaattagctataatggaacaagcttgtcttgatgctgaaaaagagggaatttcttgtgaattgattgatctgaagacactaattccttgggataaggaaacagtagagtcctcagttaacaagacaggaagattgcttgttagtcatgaagctcctataactggaggttttggtgctgaaatttcagcttctattgttgagcgttgcttctcaaggttagaggcccctgtagcaagaatttgtggtctggacactccttttcctttggtttttgaacctttctacatgccaaccaaaaataagatattggatgcaattaaatcaactgtgaagtactagtgagcttaatcaccattttttggtcatctataaggtcctgatgccattgagtgatgcattagtatattgcaccatggagttggaaggttatacaaaaatgaaatataaatgatcagcaaaaaaagaacaatgggcatgcacatgtaacactattaattttctcttacgaggccctgtgtactgagaaacatcaaatatttgaagggagtgatccccattagtaaatctcctacaataaatggacgttttccctttaaatgtgaagttgataactcaaatcagtcaaatgtctacgtcctgccaattgtagcttgcacgatatatatatatatatataaatttcataattttagatacgtttttc

SEQ ID NO: 3113 - DNA, 1614 bp, Glycine max
agcatagcaaaatgatagagtactgcgagtaaggaaggttccaagcctcatatcacagatttccaaggaaacaacgaacccatctcaatctgcttcttccctataatcgaacccttcaaatcgcagatcaaaatcgaagcttattatacagtgatgatgaccgtgaagcaaggtttcttctctctgcgaggctcactcctcttcttcgcaatcctcacccttctctccttcacctacctttctctcaaatactccaccccaacaccccaggttgccaagctctcggtcgagaacctcaacgatgcgccggtaagcgagaaagaagagaaagaagaggttccggacacgtaccactcgccgcgcgtgttcaagctgaactatgaggaaatggagaagaagttcaaggtttatatatacccagatggggatcctaacacgttctaccagacgccgaggaagctcaccggaaagtacgccagcgaaggctatttcttccagaacatcagagagagtcgcttctgcaccgaaaatcccgatgaggcacacctcttcttcattcccatctcgtgtcacaagatgcgtggcaagggcacgagttatgagaatatgacgataattgtacaaaactatgtggagagcttgatatccaaatatccttattggaacagaaccttgggtgctgatcacttctttgtcacttgtcatgatgttggcgtgagggcaacagaaggacttgagtttcttgtgaagaattccattcgagctgtgtgctcccccagctatgatgttggattcattccgcataaagatgttgctctccctcaagtgctacagccatttgctcttcctgctggggggaatgatatagaaaacagaactactcttggattttgggccggtcatcgtaactctaaaatcagagttattcttgcacgtgtgtgggaaaatgacacagaacttgatatttcaaacaatagaattagtagggctactgggcatctagtgtaccagaagagattttacaggagtaagttttgtatatgtcctggtggatcacaggttaatagtgctcggatagcagactctatccattatgggtgtattcctgtgatattgtctaattactatgaccttcctttcaatgatattcttgactggaacaaatttgctgttgtactcaaggagagtgatgtataccagcttaaacaaatcctcaaaaatatatcagatgctgagtttgttacccttcataataatttggtaaaggttcagaaacacttccaatggaattcgcccccaatcagatttgatgctttccatttggttatgtatgacctctggttacgccatcacacgatcaaatactgatatttagactcttagagactcttattttgtatacaaattacagttgtagcaactgagagcgctgtaaatatagccaattacagcttttttatacagcagctggtttttctatattcttgcaccctgaacgtttctgttaatttgtttgttatttgtttgtggtaaggttctttgttaggttgaaactactacatgaccaagctattgaattaaggcaggtgcaattgttagaattgttcaaaatcc

SEQ ID NO: 3114 - DNA, 1701 bp, Glycine max
  misc_feature (60)..(60): n is a, c, g, or t
  misc_feature (70)..(70): n is a, c, g, or t
  misc_feature (136)..(136): n is a, c, g, or t
caatttgatggtccaggtgagaattttccgtcttgacttgatattggcttgttacactgnaagtactganccaatgtttggaatggtttcagaacagagattgtgcattggttgggacagtgagtagattttctanaacgaaagtgtacaaaatatttgttattttgatcctcaatgtgaattcttttctctttttaagtgaatatatttagaattttctctttgtcctttgtagttaaatcttttccatgtttcccgtgttcttactgaacagataacttcttacagaacacatactcatctgcacatgttaatcttgtttaactccattccaagttctttctatgtttcctgtttggttttaatggttttatatttttgattcactctatgatggatgttctgtaatttgatggttcaggacttctttgaggatgtcggaccactgcttagcatgcagttgggaggccaagctctcgaaggattgtttcaagtatttaactcctatgtgaacatgctcataaaagcattgcctggatctatggaggaagaagcaagccttgaagattctggaaacaaaattgtacgcatggctgagactgaggcccagcaaattgcgttgctagctaatgcctcattactagctgatgaactacttcctcgtgcagctatgaagctttcccccataaatcaggctgcatacaaggatgataatcgaagaagaacctcagaaaggcaaaatcgtcatcctgaacaaagagaatggaggagaagacttgttggttcagttgacagattgaaagatacattttgtcgtcaacatgcattggacctaatttttacagaggaaggtgatagccatcttactgctgacatgtatataaatatggatggaaatgcagaagaagttgaatggattccatctttgatttttcaggagctttttgtaaaactgaaccgaatggccaatatagcagcagatatgtttgtggggagggaaagatttgctacgctgctcttgatgagacttacagaaactgttgtgttgtggctttcagaagaccagagcttttgggatgatattgaggaagggccaaggcctttaggtccccttggtcttcaacagttctatttagatatgaagtttgtcgtatgttttgcctcccatggtcggtacttgtcaaggaatttgcaacgaattgtcaatgagatcataacaaaagcgatggcagcattttctgcaacagggatggatccatatagagaactgcctgaagacgaatggtttaacgacatatgtcaagatgctatggaaagacttagcggaaaaccaaaagaaataaatggggagagggaccttaacagccctacctgcatctgtctctgcacagtcaatttcatctgtaagatctcatagtagttcgtgaggctagtttcatccttgtaaattaagtctatcttgaaattgctagaagattcttgtactcttaaagatgtcctgacctcacgctgcaatcagtttccccatcatttttttattttcctaaatttttttgggaataacccagcattgtgtagattaagctttccatagtcaggtgtttggcaatattttttctcctgtcaatttgtccttcggtttgtaaatgttggctttgattatttggttcttattctttcgaaataagtgtacttaatgga

SEQ ID NO: 3115 - DNA, 1891 bp, Glycine max
ctcgagccgaatcggctcgaggcccagccacgttggccccccccccattgggataaagtgcgtgcgacctcagaccgtgctactgtgtgggaccagatcaaatcaagctcctttcagttaaatgaggacatgatggaatcgttgtttggatgcaaagccacgaattttacccccaaagaacctcccagaaaaaaatcagttcttccttcggttgatcaggagaacagggtgttagacccgaagaagtcacagaacatagctattcttctcagggctttgaatgtgaccagagatgaggtgtctgaagctcttttagatgggaatcctgaaggtttgggcactgagctattggaaaccctagtgaagatggctcctactaaagaggaagagataaaacttaaaaactatgacggcgatctctcaaaacttggagctgcagaaagatttcttaaagcagtgcttgatattccttttgcctttaaaagagttgaagctatgctatatagagccaactttgacgcagaagttaactaccttagaaagtcttttcaaaccatggaggctgcaagcgaggaaataaagaacagccggttattcctcaaactccttgaagctgttctaaggacaggaaacagaatgaatgttggcactaatcgaggggatgctaaagctttcaaattggacacacttctaaaacttgtagatataaagggaacagatggaaagaccacattgctccactttgtggtccaagaaatcattagatctgaaggtgctggagctgaatctgcaaatgataatgtgaagatggattccaaatttaatgaggatgagtttaagaagcaaggtttgcgggttgtggcagggctcagtagagatcttagtgatgtaaaaaaagcagcaggaatggattcagatgtcttgagcagctatctttcaaagcttgaaacaggccttgataaagtgcgattggttttgcaatatgaaaagccagatatgcaaggcaatttctttaactccacaaagctatttctgaaatatgctgaagatgaaattgtaaggattaaagcagatgagagaaaagccttgtaccttgtaaaagaagttacagagtactttcatgggaatgcaacaaaggaagaagcccaccctctcagaattttcatgattgtaagagactttctgaatatcttggatctagtgtgcaaagaagtggaaaagatgcacgatagaatcgttggtggttctggcagatccttccgaatacctccaaatgcatcattacctgttctcaacagatacaatcatccaaagcaggatagaagctcagatgaggagagctcatccccctagtgttgtgaatatgaaagaaaccataggctttcagaataacagtgaaagtaaatgaatgaatgttttgcaaatttaagttgatagcctgcattccaggattggattcattgggttttatgccattacactattaatggtgaaagaaagtcttccctgagactgaacatcaaacacttcaaatgcatggtggggggtggggataagaaagtgaacccactgttgaacgaatttcctggtttacagaaatgggctgcaaaggttcatagcatcctcatcctacttcatatgaagaagaataaataaaattttaaatggggggtggagtgaatgcatcattttgtttcttcagctccaatacatattctacagtcaaaataggttttattaggtcaaagttccacacaattgtcatattgtagaacgtttccattttacttaagaggttcttatgtgtattttttaaaccaattattaataataaatagcagttttgcagctattcctttaaaaaaaaaaaaaagaaaaaaaaaaaaaaaaa

SEQ ID NO: 3116 - DNA, 1375 bp, Glycine max
tcagctacgtaggcccccccccccccccccatttcttaaacagtgtttctaatgactcattcattgttggtgttacctttctgaccctcatttcttgttataatatccctttgaggattaaaatcttttcttttcaatttggtagagctttcttttcttgaattcaaaattccattaatattagaaacttggaaatcttcaatatcttctgttaacttattatatttttaaagacaaatatctagtgtgaaatttgttgcatcctaaattgatttcacacattcatgatcctggaatactcttcgaatttataatttcctgtagatgtgttgtgagtggttctgggaagatcgcaatgcatgtcttggagaagctaattgcttatggtgctcttcccatttcagtatcagattctagaggatatttggttgatgaggatggatttgactacatgaaaatatcatttttgcgagacatcaaagctcaacaaaggaagtttacgagactattcaaagacctatgctcggtccaaatattatgatgaagcaaaaccttggagtgaaaggtgtgatgttgcatttgcctgtgcttcacagaatgaaattgatcaatctgatgccattaatttggttaattctggttgccgtatactagtagaaggttcaaacatgccttgtacccctgaggcagttcagattctgaggaaagctagtgttctcattgctcctgcaatggctgccggtgctggaggggttgtggctggagaacttgaactgaatcatgaatgcagtttgatgcactggtcaccagaggactttgaatctaaattgcaggaagcaatgaagcagacttatcagagagctatgaaagctgcaactgattttggttatcaaaaagaaagccctgaggctctggtacatggagcagtcatctctgcctttctaaccattgctcaagccatgactgatcaaggctctatataggggttcatatcgcaaagttttgaatgcatccaaatactgatgttaaccaattagcactatggttggaaatctgcattcactgaatagtccagatcattgttgatgctgcagtggaaattgtcaatgataggatgacacactattgccaaagcatatttccttgtaaaatatgtaaaaaaaaaaatagacttagaaaagaaaaatatttggaggacaaattttagtttcacaacagaataggcatcctttagtattgccaagaaaaaggagaaattgtccttggcttattaaccctgcttgatgcctgttccaaactgaagaaatatttgaatattcagatttgaaataaaaggttagtgttcaatttgaatattaaaaaaaaaaaaaaaaaa

SEQ ID NO: 3117 - DNA, 2614 bp, Glycine max
catcaccatcacatacatgatgatacgttcatcctcgccactcttcactccccccactttctccgctcgcggaaataccttacaaaacaaacagtcccagaaacaatcattaaactcccaattttgtcttgttctactcatcactcattctctaacctcaatttcaaataaaagtttcattcttttcactgctccaatctcccctctttgatctcactccaaccacgagatgctcaaaacttctgcttttcaagtttgccactttcgttctaattctcgagaaagcaaagtattttaaatttgttgagagggttgtgatgctgaatgttgtttccaaccagtggagtaaggatgaattctgcaatggatgatatgaatttgattcagcaaacccagagacatcacttggttgtgagggagattggcgaggagattgatttagaaataggagctggggaggatgacccgtcatttggtagcactactctgattggtgcaccgatgcgggaatcttctgtagaagaacatggtgagagcaagcagatggggatgatttctcagcttcctaatgatgctcaagatatgtccaagacccaacaagggaaaaggaagaaaaaggttgttaaaagatggagagaagaatgggcagacacctataagtgggcttatgttgatgtgaaggatggtacaccgaggattttctgctctgtctgcagggagtacggtcggaagcatagaagaaatccttatgggaatgagggcagtcgtaatatgcagatgagtgccctggaagaacacaacaacagtttgcttcacaaagaggctcttcgtcttcaaatggcctccaaagataaaattgtggtcgacaagcctgtttatgtaaaagttgccatgtcaaaaacagcaggatcaattcttgaagctacactaaaaagggatcctcatgaggttgaattcattcaggcagtccaagaagcagttcaagcccttgaaagagtcatagcaaaaaattctcgttatattaacatcatggagcgcttattggaacctgaacgaatgattgtttttcgagtttcatgggtggatgataggggtgggacatgtgtgaatcggggctttagggtacagtttaaccagtcaatgggtccatgtaggggtggtattcgttttcatccatcaatgaatttaagtgttgccaagttccttggttttgaacagactttaaagaatgccttatcaccatacaaattaggaggagcagctggtggaagtgatttcgatccaaaaggaaaaagtgataatgagattatgcgattctgccaaagtttcatgagcgaaatgtatcgctacctggggcctgacaaggaccttccgtctgaggaaatgggtgttggtactcgagaaatggggtatctttttggacagtataggcgtctagcaggtcattttcagggaagctttacagggccaaggatattttggtctggctccagtcttcgacctgaagctactggctatgggctggttttctttgcccagctcatgcttgctgacatgaataaagaacttaaaggattaagatgtgctgtgagtggttctggaaagattgcaatgcatgtcttagagaagctaattgcttatggtgctcttcccatttcagtatcagattctagaggatatttggttgatgaggatggatttgactacatgaaaatatcatttttgagagacatcaaagctcaacaaagaagtttacgagactattcaaagacctatgctcggtccaaatattatgatgaagcaaaaccatggagtgaaaggtgtgatgttgcatttgcttgtacttcacagaatgaaattgatcaatctgatgccattaatttggttaattcaggttgtcgtatactagtagaaggttcaaacatgccttgtacccctgaggcagttcagattcttaggaaagctagtgttctcattgctcctgcaatggctgccggtgctggaggggttgtggctggagaacttgaactgaatcatgaatgcagtttgatgcactggtcaccggaggactttgaatctaaattgcaggaagctatgaagcagacttatcagagggctatgaaagctgcaactgactttggttatcaaaaagaaagtcctgaggctttggtacatggagcagtcatctctgcctttctaaccattgctcaagccatgactgatcaaggctctatatagaggttcatattgcatagttttgaatgcatccaaatactgatgttaaccaattagcactgcttggaaatctgcattcagtgaatagtccaaatcattgctgatgctacagtattgccaaagcatatttccttgtaaaaatatgtaagaaaatttagactcagaaaagaaaaatatttgaaggacaaattttagtttcacaacagaataggcatctttattattaccaagaaaaaggagaaattgtccttggcttattaaaccctgtttgatgcttgttccaaacttgagaaatatttggatattgagatttgaaataaaagattagtgttcagtttgaaaaaaaaaaaaaaaaaagggggggggccgccgattattg

SEQ ID NO: 3118 - DNA, 1489 bp, Glycine max
agaaatctcgtgcaaagactgttactaattttcccccattctcttttaaagccactttgacctcactttactcccaagcagattcagatttccaacacaacttttttcacataaatgcccaaattcttgctcaaacaaaactgagagtactatatatctgcctttacttgagatctgatcatatccttcaataaagcagcaaagcagcaatgagatccaaaacaacccaattcacatgtaccttcaaggtagcccttctcagccttgcggttttctgcctcttcatcttggtattcaggtcatccatattctcattgtctcctcaactcacctcacaaaccaacatgtcaagctcagacacaatagtaccagtgtcaccacaagaaacagaaaatgcaggcacaccatcatcatcatcatgcccaaattcaccccccttgaaccccccatgcaccaaggcccctccatcattagccaatgccatcatccactatgcgaccgccaacgtcacgcctcagcagaccctccacgagatatcagtctcagcaagggtacttgagaagaagtctccatgcaacttccttgtgttcggccttggccatgacagcctcatgtggacatcgctaaattatggcggccggacggttttcctggaggaggacaagtcctggatcgaccaaatccaggagaaggtaccctctttggagtcctaccatgtcatgtacgacacacaggtccaccaggctgaagagctcatgaaaactggaatgaaggaggattgccagaaggttacggacccgagattctccaggtgccctcttgcacacaaggggctcccgagtgaggtttatgacattgattgggacgtgatcatggtggatgcacccaccggctacttcgatgaggcgccagggaggatgagtgcaatctacactgctggcttgattgcccggaacaaggaacgcggccaaaccgatgtttttgtgcatgatgtggataggaaagtggaggacatgttctctaaggcttttctctgtgaagggtatttcaaggagcaagaagggaggatcaggcacttcaacattccaagccacaggtctcgtttgtggaggcctttttgcccagagtagttgaagaacacaatttgctccctttatttcatctcacatgagccatttattattgttatcatcaaaacttatataattactatatgatatgatgtgttgtggacgtacttctattttttgcgattgatatttggaattcattctgatttacacaagtcattaatggctctggagatgtcatcaattcagggagttgctttgttggaacgaacaattgttgcttatacctgcccctgcttgaccatagtctgattcaaaagtctttatatactactattattccagaaataatgtagcaattgaaatcattctatacttacattttattaattcttgcgaaaaaaagagcgtcctttcct

SEQ ID NO: 3119 - DNA, 1685 bp, Glycine max
  misc_feature (1685)..(1685): n is a, c, g, or t
cgacgatgctgcattgctttggtaattgcatttgctggtgagaggtgaccccatctctcttttatctctctcttccaaaaagcaccgatttttgcgcacgccaacgcgaatcgcgaagagggtctcaccgagaacaaaaaatgggtgtttgtgggtcgaggcccaaagtgaacgaagaagacctctcatcaaagaagaagaacaacaacaacaacaatcatcgaagaagaagaaggagaatcctcagaagacgcgtatcttctagaaagatcgaagccaacaacgtttctcactctaattcagctcttcaagcttctaatcgcgcttctgatgctgcttggtttgattctacttcggcgttggattctgagtgtgatgacgaattttacagtgtctatgatggagaagtgtctacaggtcatgcagatgaaattggagaggacagaaagctgtcccttgaccattgtgggattctgccaaataactgtttgccttgcctcacttccaatgcaattgctgttgaaaaaagaaggccaatgagtcctgatacaccaagttcacggagaaagtcactttctaaactctccttcaaatggagagaagggtcttcagatatgactttactttcccccaaggcatttaaacaaaaacatttggcaggttcatctgttccattctgtcctctagagaagcaaacccctggttcttggtcacaaattgagccaagttccttcagagtcagaggcaaaaactaccttagggataagaagaaagagtttgcttcaagcagtgctgctttttatcctcttggtgctgacctctttttgtcttctcgaaaaattgatcatattgctcgttttatacaaattccttcaataaacatacctggggacgccccttctattcttattgtaaatattcagataccattgtatcctgccgctatcttccaaagtgaaaatgatggtgaaggaatgaatgtggttttgtactttaaactatctgaaaaatactctaaagaccttccagaccaattccgggaaagcattagtaaattgatcaatgatgaagtggagagagtaaaaggcttccctctagacacaattgcaccctttagggagagattaaaaattttaggcagagtggcaaatttggagaatctgtctttaagcacaactgaaaagaagcttatgaatgcttacaacgaaaaaccagttctctcacgtcctcagcacgaatttttcttgggagaaaactatctcgagatagatttggatgtacacagatttagctatattgcaagaaagggatttgaaggcttcattgaaagactgaagctatgtaacctagatttcggtctgacaattcagggaaacaaggccgaagacttgccagagcatttattatgtgcaatacggttgaataaacttgactacagcaacttcaaccagtttggcttttaagtctaagctttaacataaagcgttttaaccgtattatatctcataatgattacaagtgttgaaatgagattcggtagctaaccgcaatgtatctttgaatttcttgattcattgatataaaatttgttcaatgtacagtaatgagaataatcaaattagaaattatcaatgtgcaatttatctttctcaaatacaaaaaaaaaaaaaaaaaaaaaaaaaaan

SEQ ID NO: 3120 - DNA, 1863 bp, Glycine max
gctagcatatataacaagcatcagctacgtaggccccccccccagcgaagaagaagggagaaattgatgttctttaatgtgaaaaagggttggaacggttttcgattttaataagcctgcaaagagccttcctttgtttttctctttttgagaagaaggctctttgttgttgtttttgaagaaggaaggaagaaagaaaaaaaatgttgaggctatggatttcttatctgcaattgttggagcttttcgtgagttcgttggttcacatgctttatgggttttacatatttagctccgctgttgctggggatctctcacaggttctcaatgaatattttcacaaggctaataataatgtgaatgttgaggtcaaagaggaaatttccaagctcaataatgctaatgatcttcctcctattgtgttggttcatgggatttttggatttggcaaagggagattgggggctttatcgtactttgctggggcagagaagaaggatgaaagagttcttgtccctgatttggggtccttaaccagtatctatgatagggcacgagaattgttctattatttaaaaggtgggcaagttgattatggtgaggagcacagcaaggcttgtggacactcgcagttcggacgaatatatgaacaagggcattaccctgaatgggacgaggatcaccctattcattttgttgggcactcagcaggagcacaagttattcgtgtcttgcaacaaatgcttgctgataaggcattcaatgggtatgaaaacacctcagagaactgggtattaagcgtcacttccttatcgggagcgtttaatgggactaccagagcatacgcagatggcatgctgccagaagatgggagaacattgaaacctatttgcctgctacagctgtgccgcattggggtgataatatatgattggttcgacattagctggctgaagaactactacaatttcgggtttgatcactacaacatgtcttggagaaaaatgggcatatggggtcttgttgactgcctattggggaatgcaggtccatttgcttcgggagattggatcctccctgatctcacaattcaaggctctataagactcaactaccatatacgtacatttccaaacacatactacttcagctacgccaccaagcgcacaacaaagatcatgggtgttaaagttccttcaagcatacttggaattcacccattgcttttcattagagttttgcagatgtgccagtggcgttttcctccagatgttcctcccccttataagggatacagggatgaggactggcaagacaatgatggagcactaaatacaatatccatgactcatcctcgcctcccaattgaacaccccaactgcttggttgaaaaggaatcagactgccaacccttacaacctggcatctggtactacaaatatgtggagggtgatcacatactattcattattaatcgtgagagagcaggagtgcagtttgacttaatctatgacagtattttccaacgctgtaggaagcacgtttttaggaagaagcctccaacaatgcctaatgaaatcaatcactagcacaccattctttagtctcccatattcaaattaaaagagatgtatgaaaagaaacacaggctattcattttcagttaatacccattcaccttcgtaaatgtaaatattttcccctcatttttataccaccattttctgtattttgtaggattgtgagagacgtcagaggccatagtcaataggatgtcacaatcactatagtgtaacacaattattgtctcaatattaaatatcatgaaatgaattgttgaatttcgaacttttaaaaaaaaaa

SEQ ID NO: 3121 - DNA, 1668 bp, Glycine max
aattcggctcgagaaagaaaattacgacatgggtctagcagtaccatctttgtgtgttacttagtagcggtaagaaaggctttgattcctccacatgagaagagaaacgaccaacggttcttatttaaagcaatcagctacgtcggccccccaagagaagagataaataataactagttgtagctgctggggagagtggaacataataaacatgacaatgaagctgctgcttttggtagccgttgttgaagttgcatgcttagtttctgggatcttgtcctttggatctgagacactctctgagctttctttcttagaaaacgatgtcgtctcaacagcaagaccttcctcttcatctcaacctcttatggtcgacctcactctcattcaaggagctgattctaaaggagctgtctgtttggatggaacggtgcctggataccatttggatcgtggatttggatctggtgcagatagttggctaattcatttggagggaggaggatggtgtaataccatcagaaactgtgtctatagaaaaaatactcgtcgtggatcctcgaaatacatggaaaatcaaataccattcacgggaatattgagcaacaaacctgaagaaaaccctgatttctttaactggaatagagttaaattacggtactgtgatggggcgtctttcagtggagatagtgaagatgagtctgcacagcttcaatttcgaggacaaaaaatatggctagctgcaatggaggaattaatgtccaaaggaatgcagaaagccgatcaggcacttctctctggatgctctgcgggtggtctggcatcgataatacactgcgatgagttccggagcttggttccaaaatcttccaaagtcaaatgtttgagtgatggagggttttttcttgacgtaatggatggatctgggggacgcacactgaggactctttttggaggtgtggttcagttgcaggagttacaaaaaaatctgccaaaaagttgtcttgaccaactagacccaacttcgtgcttctttcctcagaatatgatcgaacatgttgagaccccattgtttctactcaacgctgcttatgatgtgtggcaggtccaagctagtttagccccaccttcagctgaccgccttggctcttggaatgaatgcaaatcgaaccatgcaaattgtagctcatctcaaatgcagttcctccaagacttcagaaatcaaatgcttagtgacattaaagacttctcgagctcatctcaaactgggctattcataaattcttgttttgctcattgtcagtctgagagacaggagacatggtttgctgatgactctccccttatcgaggacaagccaattgcagttgctattggagactggtattttgatcgagaagttgtcaaagctattgactgtgcttacccgtgtgacaacagctgccataatctggtgtttaactttaagtgaacaaaatttgttgtctcctcgttccactttaatccttgtaactgcaatgagtattccacaattaccattcattgattattatggaaagaccattcttagtttaaaaaaaaattcattagtagtcatttatctacttttggttagaatataaaaaaatggacagtgattttaaaaaaaaaaaaaaaaaaaactcagac

SEQ ID NO: 3122 - DNA, 1641 bp, Glycine max
ggcaatcagctacgtaggccccccccccaacagataaatagagtgtgtgaataataataagtagttgtagctggggagagtggaacattgtcagcttcataataaagatgacaatgaagctggttttggtagttgttgttgaagttgcatgcttagtttctgggatcttgtcctttggatctgagacactctctgagctttctttcttagaaaatgatgtcgtctcaacaacaagaccttcctcttcatctcaacttcaacctcaacctcaacctcaacctcttatggtggacctcactctcattcatgaagctgattctaaaggagctgtctgtttggatggaacggtgcctggataccatttggatcgtggatttggatctggtgcagatagttggcttattcatttggagggaggaggatggtgtaataccatcagaaactgtgtctatagaaaaaatactcgtcgtggatcctcaaaatacatggaaaatcaaataccattcacgggaatattgagcaacaaacctgaagaaaaccctgatttctttaactggaatagagttaaattacggtactgtgatggagcatctttcagtggagatagtgaagatgagtctgcacagctccagtttcgaggacaaaaaatatggctagctgcaatggaggaattaatgtccaaaggaatgcagaaagccgatcaggcacttctctctggatgctctgcgggtggtctggcatccataatacactgtgatgagttcgggagcttgtttggaaaatcttccaaagttaaatgtttgagcgatggaggtttttttcttgatgcaatggatgtatctgggggacgcacactgaggactcttttcggaggtgtggttcagttgcaggatgtacaaaaaaatctgccaaaaagttgtctcgaccaactagacccaacttcgtgcttctttcctcagaatatgatcgaacatgttgagaccccattgtttctactcaatgctgcttatgatgtgtggcaggtccaagccagtttagccccaccttcagctgaccgccttggttcttggaatgaatgcaaatcgaaccatgcaaattgtagctcatctcaaatgcagttccttcaagacttcagaaatcaaatgctgggtgacattaaagacttctcaagctcatctcaaactgggctattcataaattcttgttttgctcattgtcagtctgagagacaggagacatggtttgctgatgactctccccttatcgaggacaagccaattgcagttgctgttggagactggtattttgatcgagaagttgtcaaagctattgactgtgcttacccatgtgacaacagctgccataatctggtgtttaactttaagtgaacaaaatttgttgtctcctcattacactttaatccttgtaattgcaatgagtattcaacaatcaacattcattaattattatggaaggacaattcttggttatcatcattttcactgatattaagttatgtcaataagattcattagcaaaaaaaaaaaaaaaaaaggttataaatatccaaaaatggacaatgaattcgtgcattggttgctacctttttatcgttcacaatattaattttttcccttaacg

SEQ ID NO: 3123 - DNA, 1317 bp, Glycine max
ggacgcgtgggtgaatttggttattgcctggctgtcaatgcggatactgctctttcagagttgagaagcaaaatgggacatggaaattcccaggaattggtgctttccaatgctatgacaagtatatgttgagtagcttaaaacccgcgcctccgcccccccgtccgcctgaatggggaagcacaggccctactgatgctggccactataacaactggccagaagacactcaatttttccgcaaagaaggtggtggctgggatggtccatatggtgagtttttcctcacctggtactctcagatgctgttggaccacggtgacaggattctctcatcagccacgtcgatctttgacaacactggagtgaagatctcagtgaaggttgctggcattcactggcactatggctcaaggtctcacgccccagaactcacagcagggtattacaacacccggttccgtgatggctacatccccattgctcaaatgttggcacgccacggtgccatcttcaacttcacctgtattgagatgcgcgatcacgagcagccacaagatgccctttgtgcacccgagaagcttgtgaagcaagtggctctggcaacgcagaaggcacaggttccacttgctggtgaaaatgcgctgccacggtacgatgagtatgctcatgagcagatcataagggcatcacagttggatgttgatggtgactctggtggaagagagatgtgtgcattcacttacctgagaatgaacccgcatttgtttgaaccaaataactggaggaagtttgtggggtttgtgaagaaaatgaaagaagggaagagtgcacacaagtgttgggaagaggtggagagggaagctgagcattttgtgcatgttacacagcctcttgtgcaagaagctgcagtgctgatgcactgagaattgttgaacaatcttgtgctgatagatggcttagaaaaggtcacaagtaggctgtgtgaaagttttagtgaaccagcagcccaggtttgtggctttgaagatgtaaaattttgtattatattgttgttttatattctatgcacctaaaacttctatttgttacccttttatattgtgtacgtaatcattgactttggggtactattttcttaaaagcccccctactttgtacaagtagttacttatttctgcatcatgaaactgttacaaggcgtaacagcaacaagagatgctattttcttctatagggaaaaatgaatttaaaatcaatgattttcgttgtgtttaatttaagcaaccttcaccggtcttgaatctttaatttgct

SEQ ID NO: 3124 - DNA, 2139 bp, Glycine max
cccaggctattcgctaaacccaaaacactattttattatcttcttcgtctgttctttgcattgaagaaaatttctttgaattgaagaaaacttgaaatcgaattgtgaaacagaaaataaaccaaaggaaatttttactgattgaattgcagagattggaaaaatggcgttgagtatgactcaacagatcgggaccctagctggtgcgacggtgccggattcctcggccggagaatcgaccgcggcggtgagtgccgccgcggtgtggaagtcaccgacggcgagtctgaagtgcaaggtaatgaggacggatggctgcgcggaggggctttcgccgccgctgagtccgtgcaggtcgccggtgctgcgggcggatctgtcggcggcgtgtcaggcattcacggcggaggtggcggaggaggagtacgttgccggagggaaggaggagaaggggaaggggaaggagggagtgccggtgtttgtgatgatgcctttggacagcgtgacggcggggaacgcggtgaaccggaaaaaggcgatgaacgcggcgatggctgcgctgaagagcgcgggggtggagggggtgatgatggacgtgtggtggggtttggtggagagagagaagcctggggagtataattggggagggtacgtggaactcatggaaatggcgaagaagcatggcctcaaggtgcaggctgttatgtcatttcaccaatgtggcggtaacgtcggagactcttgcactattcctttgcccaaatgggttgtggaggagattgataatgaccacgatcttgcatatactgatcaatggggaagaagaaactatgaatatatatcacttggatgtgatactttgccggtgctcaagggacgatccccagttcaatgttatgctgatttcatgcgtgctttcagagacactttcaagcacctccttggtgataccattgtggaaatccaagttgggatgggaccagcaggtgagttgcgttacccttcgtacccagagcaaaatgggacatggaaattcccaggaattggtgctttccaatgctatgacaagtatatgttgagtagcttaaaagctgctgctgaagctcacggtaagcctgaatggggaagcacaggccctactgatgctggccactataacaactggccagaagacactcaatttttccgcaaagaaggtggtggatgggatggtccatatggtgagtttttcctcacttggtactctcagatgctgttggaacatggtgacaggattctctcatcagccacgtcgatctttgacaacactggagttaagatctcagtgaaggttgccggcattcactggcactatggtacaaggtctcacgccccagaactcactgcagggtattacaacacccgattccgtgatggctacctccccattgctcaaatgctggcgcgccacggtgccatctttaacttcacctgtatcgagatgcgcgatcacgagcagccacaagaggccctttgtgcacctgagaagctggtgaagcaagtggctctggcaacgcagaaggcacaggttccacttgccggcgaaaacgcgctgccacggtacgacgagtatgcacatgagcagatcataagggcatcacaattggatgttgatggtgagtctggtgatagagagatgtgtgccttcacatacctgaggatgaatccgcatttgtttgaaccaaataactggaggaagtttgtggggtttgtgaagaagatgaaagaagggaagagtgcacacaagtgttgggaagaggtggagagggaagctgagcattttgtgcatgttacacagcctcttgtgcaagaggctgcagtgctgatgcactgagaattgttgaacatccttgtggtaatagggcttaggaataagtcacaaggaggctgtgtgaaagttttagtgaaccaacagcccaggtttgtggctttgaagatgtaaaattttgtattatattgttttgtattgtatgcacctaaaacttctatttgtgacccttttacattgtgtacgtaatcatagactttggggtactgtttccttaaaagttactctactttgtacaagtagttacttaatctggtttaaaaaaatgtcat

SEQ ID NO: 3125 - DNA, 1082 bp, Glycine max
tcgagtcagctacgtaggcccccatcttagatttgactcttggttgagagtgagtttggaacttgaaagaaactagaatggccactttagacgaacgcccttctgcgaaaaggtggcttcctctcgaagctaaccctgacgtcatgaaccagttcctttggggtcttggccttccagtggatgaggcagagtgcggtgatgtgtttggcttagatgaagagcttctggaaatggttcccaagccagttctcgccgtgctttttctttatccaattaccgcgaagtctgaagaagaaaggttgcaacaggaaaacgtaaaaaaggattatagcagtaaagtatatttcatgaagcaaaccgtgggtaatgcttgtggtacaatagggctgcttcatgcacttgggaacataacctctgaagtcaagcttgttgagggttcattctttgataagttctttaaatctactgcaagcatggatccattgcagcgggctgtatttcttgagaatgacagagagatggaagttgctcattcagtagccgccactgctggtgatacagtggcatcagataatgtggacactcatttcatctgctttgcttgtgtggatggtgaactgtatgagcttgatggaagaaagtcaggaccaatatctcatggtccatcctcaccaagtactttgttgagggatgcagctaaagtcatccagagcatgattcagaaaaatccaggttctctcaacttcaatgtcattgcaatatcaaagaaatccaaggatggacattaaggcagtctatttgggtgaagtaattcttgaagttatctgcagtataatccccagtcatccatgcagctttattcactttccctgtatgtttgtatgctcggatttttattttcagtcagtggcatatcaggttgagcatttttcgtttcaaatagatgcagtgcgagtaactttgagctaaaagaacaaactgagctaaaagttgggttaactggcgttttgattttaattttttttaataaaaaataattcaagcaagcaaaaaaatgcgaaaaaaaaaaaaatccaagcgct

SEQ ID NO: 3126 - DNA, 1009 bp, Glycine max
cccacgcgtccgtacggcgggaacacgtctgaaaatcaaacacacttctataatggatcggaaaagcctcctctccctcgcaatcatcgccattgtcgtcgccgccgtcggaggacagtctccagcggcgtcgcccaccacttctcctccggctgccaccaccactccctttgcatccccagccacagccccttctaagccaaaatcaccggcgccagttgcttctcccacgtcatcatctccaccagcttcgtcccccaatgctgcaaccgcaaccccacccgcttcatctcccacagtagcatctcctccgtctaaagctgccgctccagctccggtggctacacctcccgcagccactcctcctgcggctacaccaccggcagccacacctcctgccgtgactccagtgagttcgccgccagcgccagttccggtgagttctccacctgctcctgttccggtgagctctccacctgcactcgcaccgacaactcccgcacccgtggtagcacccagcgctgaggttccggcacccgctcccaagtcaaagaagaagacaaagaagagtaagaagcacactgcaccagcaccgtcgccgtcattgcttggccctcccgctcctccggtaggagctccgggatcaagccaggattccatgtctcctggtccagctgtatctgaggacgagagtggagctgaaaccatcaggtgcttgaagaaggtcattggatgcttagccttgagctgggctacccttgttttgttcttctagagaagaggctgaggcttcattgctgctgttacatagtattattgtatcatttattgtcttttttggaccctgtcggggggctaaaattaaatttattaccattgttttcttcaatctcttattactttataattgatgatgtttgttgacactattattattttagtactccttgctcccttgcttcgtgtaaaaaaaaaaaaaaaaaaactcgagactagttctctctctctc

SEQ ID NO: 3127 - DNA, 1936 bp, Glycine max
  misc_feature (1907)..(1907): n is a, c, g, or t
  misc_feature (1915)..(1915): n is a, c, g, or t
attacccggcgtcgacccacgccgtccgcacacaacacacaacaacacaaaaattctcaaaggctcaaactcaaacggtacttacaaaaaaaaaaaaaaaaacgaaacgaaacccactctcaccatgatagcgtacctagaacactttgtgcacggaaatgacacagaatcgatgccaaacgacgacgtttcagctctcgatggagcttttcacttcggcgccaccgccgccgccggcaaggacttcggcgggatgaaatccgttaagccgcgggcggttattcgccccgccttggccggcgacgtggagagggcggtgaaggaggcggcgcgcacgacttacctgactgtggcggcgcgcggcaacggccactccatcaacggccaggccatggcggagaagggcctggtcctcgacatgcgcgccatggaggaccacttcaccctcctctctctcgacgacgggtcactatacgtcgacgtttcgggaggggcattatgggaagatgttctcaaacgctgcgtttcggagttccgcctcgcgccgcggtcttggaccgattacctcggcctgaccgtcggcgggacgctctccaatgccggcgtcagcggccaggccttccgctacggcccgcaaaccgccaacgtaacggaattggaggtggtgagcggcaaaggcgaaaccttagtctgttccgaatcacaaaattcggaactcttcttcgccaccctgggaggattaggccagttcggcatcataactcgcgctcgagtcccggttcaacaagccccggacatggtgagatggataagggtggtgtacacagaatttggcgacttcactcgagacgcagagtggctggtgactctccgagagggtgatggttttgattacgtggaaggtttcgtttttgtcaacagtgacgacccttgcaacggctggaccaccgtccccgtgggccccaaccaatacttcgacccggttcggattccttcaaccgccggcccgcttctctattgcctagaacttgcccttcattatcgtaaccaagaccatccttccgctgttgatatggaggtggatagattacttggacggctacgattcgtcgagggtctaaagttctgcgtggatgtgacctacatggaattcttgctacgtgtgaagcgtgtggaggaagatgcaaaagccaatggaatctgggacgcaccccacccatggctgaatatgttcgtctccaagtccaacatcgctgaatttgatcgtgaagtgttcaagaaaatcctcaagcacggagttggtggccccattctagtgtaccctcttttgcgaagcaagtgggatagtcgacactcggtagtggtgccggacagcaacattttctacattatagccttgctccgatttattccaccacccccaaagggaccacctacagaactgttggtggaacaaaaccatgagattattcagttatgctacaacagaggctttgatttcaagttatatctccctcactaccagtcacaggagaactggatgcgacactatggagataagtggaccagattcgtcgagagaaaggccaattttgatcccttggctattcttgcacctggacagaaaattttttcccgaatccctcaacccttgtctatcacttaaatattaattattttagattaatatattgctttttttttctttttctttttctcaacccactgtgaccattttgtcttgatttcatttttttttctctctttctcttgactcccccctttccttttgtttctgtccccaatcgctccaaccatttaccacaccgttgtagccatattgtaaatgaatattttgggggtgaaattaatatcaatcttgatcttttgtactgccgattaaatanaaataaanaataaaaaaaaaagcggccgc

SEQ ID NO: 3128 - DNA, 816 bp, Glycine max
caagaactcaagggatgaagggattggtaaggttcctgaagatgttgtgatagagatattggtgagagggggaataagggagtgggagcagatatcatgcgtgaagaagcagtgggcatctcttttccgctgcgattgcgaatgcttctggcaagctgcactttccttctattatccacaccaactcccactccctccccctccaacatggcctgttcctttacccaacaactccaagaggagattcattgctttatatattagtcaacacatctttgcctccgatcctccacacgagatccttggccacacctatctcttcttgaaagatcagcttcaaccttctattatgcctcctcatagtggaatacttcacggaaccatcattgatcagttcattgcttgcggcaagtccagggacgttgctcacgaacttgcttctcggatttggcttgctgtcgtcgacaatttggaccaaaaccatcactccttctccttacttaaacgccttgcccatgaaggggatgtttttcttccatacccttacaccagatcagtcaaagtacaatggagactgtttgagaagctttttactgatttccgtgattgcttcaaccatgtagattattatgatatgttgggatgtgccaagagcaggtttcacccaataccatctgcttggttaggttactagttagcaaattctaatgaagcctgccttatcaattctcttgtttaggaaaattgtttaccttccttcatgtgtaactgaagtcaatcaattctcattgtgaaaaatctcttatttttcacatg

SEQ ID NO: 3129 - DNA, 1092 bp, Glycine max
gtctgtcgttaggagcgtgagagcacagcagtgtacgaaatgcctccgcggcggtgcacggcggcgtattcggcagtggcgcagatgggcagcaacacgagcgagagcgacgcggaggagctggtgatgcggtgcctctcgtgcgaggaggagtacgacgtggacgactcgggaacctgcagggagtgctaccaggaggccaacgaggccgaggaggagctccgccacgagatcgaggagctcaaatccaaagtctccttcctcactctcccctctcccaatcttaacgcttccaccgccgatgtcgtcctcgttcccgtcgacgactccgacgacgctcccattcccgctcacaagcatcttctggttagtcgctctcctgttttcagagcaatgctcaagaatgatatgacagaaaggcggagtggcaccatcaagatttctgacgtatcatatgatacccttcatgcttttgttaattatttatacactgctgaagcgtcccttgataatgaattggcctgtaacctgttggttttaggagaaaagtatcaggtgaagcatctcaagacatattgtgaaaagtatttgatcgccaaaatgaattgggataaagctatttctaactatgcctttgcatatcaatacaattgcaaacaattacaaagtgtgtccttggcagtgatcttggaccacatggactcgctcactcaaaatgaatgttatgcggagctggtggacactaatcctcgtcttgttgtggaaatatatgaaacatacattggcaggctattaaatactgcaggcgcattttaggttataggaacagagctaaggaagctagtgaaatcatctttaagctggggtttgatacttcagttgggattatattcttgattggtaattagtctgttttagtattttaattgtacattatcatgcactaacagttaaacatgcaattggacctaacacctctttcattatagtattgttctttctagattaccttttggctcttggtagattggatacctggtattattaatttttattagtgcagtgattatggatggaaaaaaaaaaaaaaaa

SEQ ID NO: 3130 - DNA, 1126 bp, Glycine max
aagttaaaaaattcgttggtatgttctggataagagttgatcatttcttgatcaacattttttcctgctcttatgtttttcatagttttatattgaaaatccttaaacgtacgccattcctataataataataagcgacactataagaataggtacattgtcaaggtttcattcaccgactccttttggttgctacagagacagggagacaagacagagtagtacagattactaccaatggctaccaaggtttacattgtttattattctacgtatggacatgttgagaagctagctagagagatagaaaaaggggctgcttctgtggagggagtagaagcaaaactgtggcaggtacctgaaacattgcctgaagaagtccttgctaagttgggagcacctccaaagagtgatgttccaattattactcccaatgagcttcctgaggctgatggctttttgtttggttttcccacaagatttggatctatggccgctcaatttaaagcattttttgatgcaactggaggcctttggcgtacacaggcactagcaggaaaggccgcagggttcttctatagcactagttctcaaggaggaggccaagaaactaccccgttgacatctattactcagcttgttcaccatggattgatctttgtccccattggatacacatttggcggtggcatgtttgagttggagaaggtgaaaggtggctccccatatggtgcaggaacttatgctggagatggctcaaggcagcctagtgaattggaattggctcaagctttccatcagggaaagtactttgcgggcattgcaaagaagctcaagggatctcaatgatttttatcctccatatatctcccacaccatattctgtgtcaaataaaatgagatgttagaagcaaaaataaaataaaagtgtgagagaataaagtaatacttcatatatcttcgatacaattgttgtcaccacttgtcatcgtcgtatcctgtaatgcagtttttattgtcaataacaagaatttggtaattaatactggaaaaaaaaaaaaaaaaaaattgatcaccatcagccatctaaaaaaaaaaaaaaaaaaaaaaaaaaaaaaaaaaaaaa

SEQ ID NO: 3131 - DNA, 1089 bp, Glycine max
gtacgccattcctataataataataagtgacactataagaataggtacattgtcaaagtttcattcaccaactccttttggtttatacagagacagggagacaagacagagcagtacaggttactaccaatggctaccaaggtttatattgtttattattctacatatggacatgttgagaagctagctagagagatagaaaaaggggctgcttcggtggagggagtagaagcaaaactgtggcaggtacctgaaaccttgcctgaagaggtccttgctaagttgggagcacctccaaagagtgatgctccaattattactcccaatgagcttcctgaggctgatggttttttgtttggttttcccacgagatttggttctatggctgctcaatttaaagcatttttcgatgcaactggaggcctatggcgtacacagtcactagcaggaaagcctgcaggcttcttctatagcacaagttctcaaggaggtggtcaagaaactaccccgttgacatctattactcagcttgttcaccatggattgatctttgtccccattggctacacatttggtggtggcatgtttgagatggaaaaggtgaaaggtggctccccatatggtgcaggaacttatgctggagatggctcaaggcagcctagtgagttagaattggctcaagcttttcatcagggtaaatactttgccggcattgcaaaaaagctcaagggatctcaatgatttttatcctccatatatctcccacaccatactctttgtccagttaccatattttcaaacaaaatgagatgtcagacgcaaaaataaaatatataagtgtgagagaatagagtaatacttcatctacaatacaattgttgtcagcacttgtcatcggggtattctgtaacgcagtttttactgccaataacaagaatttggttattaatactggaaactaggtgctaataaattgatcactatcagccatctaaatattgtgtgcttattggtaaattgattatttagataatttggcaataaattcttgttccagtcatatttcaatgaataaagttggagggaata

SEQ ID NO: 3132 - DNA, 1178 bp, Glycine max
  misc_feature (1173)..(1173): n is a, c, g, or t
catcgcaaacactcaaactagttaacacatgggagtgccagagggcgggtgcgaaagttgaaagttgaaaccctaaacggcgggaaaaagagaaacgcccctggcgggaatcaacataaaaaacgacacccacttcgcatgaccaacacttccaattctctttctttctccctctctagggtttcgaagatgttctcgggatcccaattcgacgccaccaccgccttctccggaggcggtttcacgtcctcccagccgtctaccctcaacgattcttctcccgcgccgtcaaacagccgcgaaactccgggtttggtgccggtgacagtgaagcagataagcgaggcctctcaatccggtgatgaaaagtcgaatttcgtgatcaacggtgtagatctgaacaatgtaacactggttgggatgatgtttgagaaagttgagagaaatactgatgtcagttttgttttggatgatggaacaggacgaatcaaatgtcgaagatggattaatgaggcttttgacacaaaggaaatggaggcagtgatgaatgatatgtacgttcgtgtttatgggcatttgaaaagctttcaaggtgttaagcaacttgttgccttctctgtcaggcctgtgacaaattttgatgagatcccttttcactttattgattgcatccataaccatcttcgctccaaaataaaggtggaaggaatcacttctgcaaatccttcatctggctcatctttggaaactcctgtcaaaagtgcaccaaatagatctcaggcatcaaatccagtatgtgcacaacatagcgtggatggacttaagggtattgataaattggttatggactacctggagcagcattcagataggtcagatggacgtggaatacatgttgatgaactatcacgggagctcaagcttccaattgaaaagatcaagttgtcgctgaagactcttgcagatgatggtgaaatatactccaccatagatgacgaccattacaaaaaagcctgatattttatgtaatctgaggaatatagctaaggattgagctggatactataggacatgaaccatgatctattttgatttcaagtttcgggatatgtagatatgtttctggatgaattgatattttatgctcaaactaaaagaatcacttctgttaancgctt

SEQ ID NO: 3133 - DNA, 1500 bp, Glycine max
  misc_feature (27)..(27): n is a, c, g, or t
gtgattctcaatctcggcgactgcggngctctgttgagaaccgttgaagaagcgcaagagcacgccgaactcacttcccactccaacttctccgagtccaccgaaccggttctcaacctcatctgctccgtttgctccaaaccctgccgatccaaaccgagagtgatttgccccccgagtcagccgcccacgcccccccccccgacaagacttccgaggccgtcaaaccgattagtttggaggctccgaaggtggatgcaactgcttcgtcggaaaacccttccgctgctgcatccactgacaaaaatgaagaaatggttgttcccgaagtggacaagaagctgctcaaggaacttgaatccatggggttttcaacggcacgggcaacgcgggcgcttcattactctggtaatgctggccttgagtctgccgtaaattggatagtagagcacgagaatgatcctgacatagatcagatgcccttggtacctaccaacaccaaaattgaggctcctaaaccttcgcttaccccagaagaattgaaggccaaacagcaggaactaagggagagagctcgtaagaagaaagaagaggaagagaagagaatggagagggaaagagaaaaggagagaattcgcattggcaaggagttgctggaagcaaagaggattgaagctgacaatgagaggaaacggttgttggccttgagaaaagcagagaaagaggaagagaaaagtgctagggagaaaatcaagcaaaagttggaagaagacaaggcggaaagaaggcggagacttggattgcctccagaggaaccctcagcagccaaaccttcacctgcacctgttgtggaggagaaaaagagttttgtgcctgttaggcctgccacaaaagccgagcaaatgagagagtgcctccgttctctcaagcagaaccacaaggaggatgacgccagagtgaagagagcattccaaactcttctaacttatgtagggaatgttgccagaaatcccgatgaggaaaagttcaggaagatacgtcttagtaaccaatcttttcaggacagagttggttccttgagagggggaattgaatttctagaaaattgtgggtttgagaagatcgatggcggcgagtttttatttttgcctagggacaaaattgagatggccgtcctgaattcagctggatctgaactagactctgcaataaagaatcccttctttggagttctttagatgaggcaactgttataatccagagtctcgataattatagtttcatgtttcgaagtctgagtgctaccgtttgtttattaaacatactgtttttttttttatttaccttaacttttgctcaaaggtatctatagagagatttgttacttgactgtcataagtttacgaggtttatacaaatttgtttcatgacttcatcttatgtctaatgattcagtttaagcagaatttataatgtaaaaattgaactagtgcccctttg

SEQ ID NO: 3134 - DNA, 2168 bp, Glycine max
ccacgcgtccgagcggtgttgttcgcgtcagctacgtagccccccccccccaaaaagcccaagcagtcgtcttggtgctgccgattggtcaaaatatataaatccatttgttgaaatttgttactgtattgcattgcgtttgctgcacccatcaatggcaggcgtttctctcaagtgcggtgactgcggtgctctgctgagaaccgtagaagaagcgcaagagcacgctgaactcacctcccactccaacttctccgaatccaccgaaccggttctcaacctcatctgcaccgcttgctccaaaccctgccgatccaaaaccgagagtgatttgcacacgaaaagaaccggccataccgagttcgttgacaagacttccgaggccgttaaaccgattagtttggaggctccgaaggtggatgcaactgcttcatcggaaaacccttccgctgctgcatccactgaccaaaatgaagaaatggttgttcctgaagtggacaaaaagctgcttgaggaacttgaatccatggggttttcaacggcacgggcaacgcgggcgcttcattactctggtaatgctggccttgagtctgccgtaaattggatagtagagcatgagaatgatcctgacatagatcagatgcccttggtacctaccaacaccaaaattgaggctcctaaaccttcgcttaccccagaagaattgaaggccaaacagcaggaactaagggagagagctcgtaagaagaaagaagaggaagagaagagaatggagagagaaagagaaaagggttcctaacaaagttctggataagttggtgagcttacagtgcaggtttctgtggggaggagggatggagcagaaaaagattatgtgggtcaagtgggatacagtgtgcctaccaaaggagaaaggggcccggggaattagggacatcaagaatttcaatctactctcttcttggaaaatggagatggaatctattccatcaccaatgggaactgtgggctcaggtgttggattcaaaatatggcggttggaggaatttggatgaggataggagaggcaacaatgaatcattctggtggcaggaccttagttcaatgtttcagcctttgcaggagggtaactggtttcaaaatgggatatcttggaaggtgggttgtagagctagagtgagattttgggaggatcggtggaaagatgatggtgtaccgctaatgctaaaataccctaagttatatctcatttcctgtcagcaagaacagttcatacagcaaatggggagattctcaaatgcaggctgcgagtggagctttcaatggaggcaatcacgttttgatgctgagattgatgtggctgataagttcttgggagacacagaaggcatctcaattcatcctggccgataggacaagtgggtgtggaagggagattcaagtggtaattattcaatggggagcgtgtacaagctacttttgggagattccatagacgtgattcaagatggagttttcaatgagtgtggaatgtaaagattccaagcaaaacatccttttttgcttggagattaatcagggacaggctgccaacaaaatcaaatttgcgcaggagaaatatcgaaatcaatgactctttctgtccattcttcagaaacaatgaagaggatgcagctcatttatttttcaactgcagcaaaattcttccggtttggtgggaatcggtgtcttggtcaaacatttcgggtgtttttccgcagactccgaggcatcatttcctccaacatggttttgggaggccttctggagtcaggtctcagagatggcagatctggtggatagctttatcctggagtatatggcagcataggaatgggatcattttctcaaatgatagcttcaatggcagtaaattgatggaggatgccattttcctttgttggtcgtggtttaaaaacttggaaaagggttttgaaataccttttaatcactggtccagtaatttgagagagggattttgtaatcaggggagggatacatacataggatttgggtagattatagacaacaatgcagtcagatttatggttttctaattctagtattaaagcctgtattaggaaaccataattctgctaatcttggatatcaattgtactccttcagta

SEQ ID NO: 3135 - DNA, 1842 bp, Glycine max
cgagacggcaaaaagcccaagcagtcgtcttggtgctgccgattggtcaaaatatataaatccatttgttgaaatttgttactgtattgcattgcgtttgctgcacccatcaatggcaggcgtttctctcaagtgcggtgactgcggtgctctgctgagaaccgtagaagaagcgcaagagcacgctgaactcacctcccactccaacttctccgaatccaccgaaccggttctcaacctcatctgcaccgcttgctccaaaccctgccgatccaaaaccgagagtgatttgcacacgaaaagaaccggccataccgagttcgttgacaagacttccgaggccgttaaaccgattagtttggaggctccgaaggtggatgcaactgcttcatcggaaaacccttccgctgctgcatccacggaccaaagtgcagaaatggtttcagctacgtaggcccccccccccccaagaagctgctcaaggaacttgaatccatggggttttcaacggcacgggcaacgcgggcgcttcattactctgagcatctatttttgcttttttgaagggaactttatgatattgttggaagctagggtgggttaacagagagaagtgagaagaatatagccaggaaagggacttgtttattaaaagtttataatatttatatatgatggaaaatttgatttaaaacttattagatttaaatcttagtttccgtagttacgcgtgacagtctttggatctaggatacatgaccagtcagtttaaagggtaatgctggccttgagtctgctgtaaattggatagtagagcacgagaatgatcctgacatagatcagatgcccttggtacccgccaacaccaaaattgaggctcctaaacctttgcttaccccagaagaaatgaaggccaaacagcaggaactaagggagagagctcgtaagaagaaagaagaggaagagaagagaatggagagagaaagagaaaaggagagaattcgcattggcaaggagttgctggaagcaaagcggattgaagaagagaatgagaggaaacgtttgttggccttgaaaaaagtagagaaagaggaagagaaaagggctagggagaaaatcaagaaaaagttggaagaagacaaggcagaaagaaggcggagacttggattgcctccagaggaaccctcagcagccaaaccttcacctgcgcctattgtggaggagaaaaagagttttgtgcctgttaggcctgccacaaaagctgagcaaatgagggagtgcctccgttctctcaagcagaaccacaaggaggatgacgctagagtgaagagagcattccaaactcttctaacttatgtagggaatgttgccagaaatcccgatgaagaaaagttcaggaagatacgtcttagtaaccaatcttttcaggacagagttggttccttgaaagggggcattgaatttctagaaatttgtgggtttgagaagatcgatggtggtgagtttttgtttttgcctagggacaaagttgaaatggcggtcctgaattcagctggatctgaactagactctgcaataaagaatccattttttggagttctttagatgaggcaactgttataataagaggctcgataattgtagtttcttggttcgaagtctgagtgcttccctttgtttattaaaaaaatactcttatttatttaccttaatttatgctcgaaggtatctgtagagagatttgttacttggctatcataagtttatgagttttatacaaatttatttcaaaacttcatcttaaaaaaaaaaaaaaaaaaaaaaaaactcgagactagttcc

SEQ ID NO: 3136 - DNA, 1339 bp, Glycine max
ctccgcgacgtcggccccccccgcgaccaacaacatgttgatgattcaaaacagaaaaaaaatgaggttttttacagtgaaagtagctctgtgctgtgtggtggttatgctactaaccctctcagatgcacagctagataactctttttacaaggacacgtgtccaagagtgcattctattgtgcgtgaagttgtcagaaatgtttccaaatctgatccccgcattcttgccagtctcataaggctccactttcatgattgtttcgttcaagggtgtgatgcatcaattctgttgaacgacacagctacgatcgtgagcgagcaaagtgcaccaccaaataacaactcaataagaggtttggatgttgtgaaccagatcaaaaccgcggtggaaaatgcttgcccaggcatagtttcttgcgctgatatccttgctcttgcagctgagatatcttctgttctggctcatggccctgactggaaagttccactaggaagaagagatagtttaaattcaagtttttctcttgctcttcaaaatcttccgggtttcaatttcacccttgatcaactcaaatctacatttgatagacaaggcctcaatacgactgatctagttgctttgtcaggtgctcatacaattggtagatctcaatgtagattttttgctcaccgaatatacaatttcagtggcaatggcaacagtgacccaactctcaacactaccctctcacaagcactacgagcaatatgtcccaatggtggacctggaaccaatctcaccaatttggacttaactactcctgatagatttgactccaactactactcaaatcttcaacttcaaaatggcttgcttcggagtgatcaagtgttattttctacaagtggtgcagagaccattgccattgtcaatagtttcggtagtaatcaaactcttttctatgaacattttaaggtgtcaatgataaaaatgagcatcattgaagtgctaacggggtcacaaggagaaattcgaaaacattgtaactttgtcaatggggattcttctaatctggctactctagccaccaaaaaatcttcagaggatggtatggtgagctcaatctagatgagttaacaaaagatatcctaatgcaaaaatgaaaggtcattaataaaggggttatataggaagatacatgttgtgtgctaatggtgaatcataatatcgtttgtaccttgtattagctacggataacaactacttattttgtaatatattattattagaattaaaaaaaaaaaaaaaaatgggtttggaagtgataccattcaatggatgaaatatagttaaaaa

SEQ ID NO: 3137 - DNA, 1591 bp, Glycine max
gacgacagaagggtacggctgcgagaagacgagccccgcccatcctctgcaacggcaacagactaagttgtttctctctctagccctagggtttcgttctctactaccgttctttcatcagatcgctgccgtttctggcgtcattccgataattcggcggcatgaagctaacagtgaagactttgaaagggagccatttcgaaatcagggttcaaccctccgatactgttatggctgtcaagaagaatattgaagatgtacaaggaaaagataattacccatgtggacagcaattgttgattcacaatggcaaggttttgaaagatgaaactacattagtagagaataaagtctctgaagatggctttcttgttgttatgcttagtaagagtaaaacatcaggttctgctgcagcttcatctgttcagcctgccagtaatcctcctacgactgtatcaacgtcaaattccacccctccttctgatcctccagtgcaaactcaagctgcaaacaacagtacatctagcacagatgccccaactacaaatgtgtctgcagatacctatggtctggctgcttcgaatttagttgctggtagtaatcttgagcagactattcaacaaattatggacatgggtggtggcaattgggacagagacacagttagtcgtgctcttcgagcagcttataataacccagagcgtgctatagattacttgtattctggaatccctgaagcagcagaagttgctgtgccagttcctcaaacagctgggatttcttctggagcagttcctgtaggacctaattcatctcccttaaatatgtttccacaggagacgatttctagcactggtgctggacttggatcgctagacttccttagaaataacccccagtttcaagcattgcgttcaatggtgcaatccaatccacaaattctacagcctgtgcttcaggaacttggtaagcagaatcctggtcttttaagactgattcaagagcatcatggggagtttctgcagttgataaatgaacctgttgatggttctgaaggagatatatttgagcagcccgagcaagacatgccccatgccatcaatgtgactccagcggagcaggaggcaattggaaggctcgaggctatgggatttgatagagcctcggtgatagaggcatttttggcatgtgaccgtgatgagcaattggcagccaactatttattggagaatgctggagactttgaggattaaatgactctcggaaggaaataactactgatttcctggcgaagcttggagttaggagctctctctctctaagttatagatccactcctcccccttatttgcttgcagatgccattgggggtaactctgctgctgcggctttagttctttttcatttttatgtgccaaaaaaagagtctctaacttacattacttccattgattcatagttttgtttggcccttttttccttaatttttttaaactttaatgtgacttgttggataatatatggagtagagtttggatttaaaaaaaaaaaaaaaaaagtaagctcacataaattaaaaactgaaaaaaaa

SEQ ID NO: 3138 - DNA, 1315 bp, Glycine max
acgagctcatcgtcccgatacggctgcgagaagacgacagaaggggacagaacaatactgcaatagagaaagaggcagatagaaaaaaagagcgacttttgagttcaaaagatgactaacttcccattgatcaacttggagaagctcagtggtgaggaaagaaacgataccatggaaaaaattaaagatgcttgtgaaaactggggattctttgagctggtgaatcatggcattcctcatgacatattggacactgtggagaggttgaccaaagagcactacaggaaatgcatggaagagaggttcaaggaattagtggcaagcaaaggtctagatgctgtccaaactgaggtcaaggatatggactgggagagcaccttccacttgcgtcacctccctgaatcaaacatctcagagatccctgatctcattgatgagtacaggaaggtgatgaaggattttgctttgaggttagagaaattagcagagcagctgctggacttgttgtgtgagaatcttggcctagagaaagggtacctcaagaaggctttctatggatcaagaggaccaacttttggcaccaaggttgccaactaccctccatgccccaacccagagctggtgaagggtcttcgtccccacactgatgccggtggaattatccttctcttccaggatgacaaggtcagtggactgcagcttctcaaagatggccagtgggttgatgtgcctcctatgcgccactccattgttgttaacattggtgatcagcttgaggttatcaccaatggtaagtacaagagtgtggagcaccgtgtgatagcacaaacagatgggaccagaatgtccattgcctcattctataaccctggcagtgatgctgtcatctaccctgctccagaattgttggagaaagaggcagaagagaaaaaccagctctacccaaaatttgtgtttgaagactacatgaagctatatgctaagttgaagttccaggccaaggagccaagatttgaagcctttaaagcatcaaattttggtccaattgcaactgtttaaatatttttactatagtctaccacatgcttgacttgggaagagtgtaacaaagtacctgatgcatgtgtttactaaaagaatatatgtatgtgtgtttttgttttcaactttggttttatgtaataaattgattttgagtttgtaattgatcattgaagtaattttatgtaatttttactttagataaaaaaaaaaaatacaataaattttattattttagaaaaaaaaaaaaaaaaaaaaaaaaaaaaaaaaaaaa

SEQ ID NO: 3139 - DNA, 1273 bp, Glycine max
cggctcgtcagctacgtaggccccccccccggcacagagcaatactgcaatagagaaagaggcagatagaaaaaagagctgagttttgagttcaaaagatgactaacttcccagtgatcaacttggagaagctcaatggtgaggagagaaacgacaccatggagaaaataaaggatgcttgtgaaaactggggattctttgagctggtgaatcatggcataccccatgacttattggacactgtggagaggttgaccaaagagcactacaggaaatgcatggaagagaggttcaaggaatttatggcaagcaaaggtctagatgctgtccaaactgaggtcaaggacatggattgggagagcaccttccacttgcgtcacctccctgaatcaaacatctcagagatccctgatctcattgatgagtacaggaaagtgatgaaggattttgctttgaggttagagaaactagcagagcagctgttggacttgttgtgtgagaatcttggcctagagaaagggtacctcaagaaggctttctatggatcaagaggaccaacttttggcaccaaggttgccaactaccctccatgccccaacccagacctagtgaagggtcttcgtccccacaccgatgccggtgggattgtccttctcttccaggatgacaaggtcagtggcctacagcttctcaaagatggccagtgggttgatgtgcccccaatgcgccactccattgttgttaacattggtgatcagcttgaggttatcaccaatggtaagtacaggagtgtggagcaccgtgtgatagcacaaactgatgggaccagaatgtccatagcctcattctataaccctggcagtgatgctgtcatctaccctgctccagaattgttggagaaagaggcagaggagaaaagccagctctaccctaaatttgtgtttgaagactacatgaagctctatgctaagttgaagttccaggccaaggagccaagatttgaagcctttaaagcatcaaattttggtccaattgcaactgtttaaatatttttactatacaccatgtttgctttgggaggagtgtaacaagtacctgatgcgcatgtgtttagtaaaagaatataatagcattactactattatatttgttatgtgtctatttgatttcacatccattctattaagaaattaattttgagtttagaatgaatagtgagctagaaaaaaaaaaaaaaaaaaaaaaaaaaaaaaaaaaaaaaggggggggcccc

SEQ ID NO: 3140 - DNA, 1658 bp, Glycine max
cgcgtccgtacggctgcgagaagacgacagaaggggactcacacctaccttgacacattttaaatgtagccactactaactttatcataccactcactcttacatcattgtccctaaatggcggaaaccctgatccaaatcggcgtggttgggtgcgccgacatagcccggaaggtctcccgcgccatcacgctcgcccccaacgccgccctctgcgccgtggcgagccgctctcacgacaaggcagccgcattcgccgccgccaacggcttccctctctcagccaaagtgtacggctcctacgagtcccttctggaggaccccgacgtggacgccgtctacatgccactccccaccagcctccatcttcactgggccgtgctcgcggcccagaacaagaaacacttgcttctggaaaagcccgtcgcgctcgacgtggcccagttcgaccgcattctcgaggcctgtgaatccagtggggtgcagttcatggataacaccatgtgggtccataacccaaggactgctgccatggcccacttcctcaacgatgctcaacgttttggtaacctcaaatcggttcgcacctgctttacatttgcagccgatcctgattatctaaacaccaacattcgcgtgaagtcggatcttgatgctcttggttctctgggtgatgcaggatggtattgtattagggcaatcctgttggctgccaactacgaattgcctaaaacagtagttgcttcatatgaacctgtacttaacaaagatggggtgatattggactgtggggcatctctatactgggaagatgggaaagtagcaaccttccattgctccttcttggcaaacttgacaatggacataacagctattggcacaagaggaactcttcacgtgcatgattttgttatcccttatcatgagaaggaggcatcgtttttggctggtacagaaaccggctttaatgatcttgtcacagggtgggataaacagccgagtaagcatacagtaaccactgatctccctcaggaggctcttttgattagagaatttgcccggttggtcgcagaaatcaaattcaaaaactctaagcctgacaagaagtggccaacaattactaggaaaacacagctggtattggatgctgtgaaggcttctatccagaggggttttgagcctgttcagattcaggagtaaacaagtctcgccactgtgtctgattgtctaccctgctggagtgacacgatcctttttctgttgtgcattgatattccaaataaaattccattctacattgtatgtatttgtgagctgttcatctctgcaatgcggtgggaaaacaggttatgtaaaatacaatcattctaatggtcaaatttcatgtctttcgaggatggtgattgatcggtgaactaaactgccttaacagaagaccagtgacgactagaataactagtacattggtcttcatcttcatcgtataaccagttagttgatctgttatgcatgtatcaaaatgacttgtaatataaatgatttatttctccttgacatacagtccatgtgtagaaacttaaatgaaaaactatttgtaaggtataaaaagtatacaatttttttaaaaattaaaaaaaaagaaaaaaaaaaaaaaaaaa

SEQ ID NO: 3141 - DNA, 1400 bp, Glycine max
cggacgcgttttcggaccatttccaagttatcccacacatgccacgtcactagactcacaccagaaactctcaatggctgaaactcccacaatccgtttcggcgtcatcggctgcgccgacatcgcgcgcaaggtctcgcgcgccatctccctcgcccccaacgccgccctttacgccgtcggcagccgctccctcgacaaggcgcgtgccttcgccgccgccaacggcttccccgccgccgccaaggtgcacggctcctacgaggcggtcctcgacgatcccgacgtcgacgccgtgtacgtaccgctccccactagcctccacgtgcgctgggccgtgctcgccgcgcagaagaagaagcacgtcttgctcgagaagcccgtcgcgctccacgcggcggagttcgacgagatcgtcgaggcgtgcgaatccaatggggtgcagctcatggacggtacgatgtggatgcaccacccccgcaccgccaaaatgagggacttcctctccgattctaaccgtttcggccaactcagatcgattcacactcattttacatttgctgctgatgccgatttccttgagaatgacattcgtgtgaagccagatcttgatgcacttggctctcttggcgatgaagggtggtattgtcttagagcaatactctgggctgccaactatgaactccctaaaactgtaatagcctcacgcaatcctgagcttaataaagctggggtgatattgtcttgtggggcttctttacactgggaagatgggaaagtagcaaccttccactgctccttcttgaccaacttgacaatggatataactgctgttgggacaaaaggaacactacatgttcatgacttcattatcccttatgaagagaaggaagcatcgttttatgcagctacagaaacaggctttgatgaccttgtgtcaaagtggatcccacagccaagcaagcatataataaaaactgatatccctcaggaggctcttatggtaacagagtttgctcgtttggtggcagatatcaaattcaacaactcaaaacctgagaagaagtggccaacaattagtaggaaaactcaactggtattggatgctgtgaaggcttcaattgagaggggttttgagcctgttcagattcaggaatgagatgtatgtattgtttctgtggcttgttgaactgaggtctttgttccattagtgcatctcaaaagtcatttctattttatttgtatttttaagcagtcattgctgacctgtgcatagaggaggaatgcagggtctgaagactcttacacaatgcacatttttatgtacttcaaggatggtgacggggaatgaaccaaataaatagttctaacaacttccttaaaaaaattcatttgtgacc

SEQ ID NO: 3142 - DNA, 1809 bp, Glycine max
  misc_feature (158)..(163): n is a, c, g, or t
gtcctcaaatacacacttggcgctataacaggtgcacgtcgatgatacacaccatagacctcgattgcaggaaagcacgtaactcgaaaagtcgtgctccccacgcgaaatggagtgcacccatcaagggtccctcgcgttccaatttcagccttcgnnnnnncctcctttctaatcagctacgtaggccccccccccatcttcatctttatcgtttttcctccaacgacgtcgtttccatcgcaacgctccatcatcctcatcgaagattttatgattcatccaacacactctcacggcataaataaacgacgtcgttatcgcaataattcttcgtcatcggcgatttattaaaatcaaacgcctactgaaacgacatcgtcaccattgcgattctcatcggtgattctgattcatctaattcacgcgtggaacgtaactttttcgaaacgacgtcgttgtcgtagcaatgccgttcgcgcgatgcaacagccagattccggcgccgctgccgtcgccgattccgaccgggagaggcacgcggtccgccgcgaacgagatcttcagccagtttctcgagaagacgctgcagatcccggagctgacgctgccgggaccgcacctcccgcccgcgccggcggagatcgacttccggtcgctgactcttgtctccaccgatctgatgctgcgctctgccagggagttcggcgcgttccgaatccggtgccacgggatctccggcagcgaactcggaaccatggcggacgaagccgaacgcgtcttccagaaatcgcgaaacgtcgtcgtcgtggagcgcaacggaactggcggagagatgattccctgtgttcgctccagcaaaggtgcactggaattcgccgctcagacgattaccggcgaccaaacgcatcggaacttttgggttcacatggggaacgttgcaagtagattggatactatagttgagcaagtgactatggttctacaacacaaaacatctaaagagtttaaggagcggattcaagatacagagtcttggatttgcttgtgcaggtatccgcatgataatgttcccaaacaaaacgaagacacctcggttaagaaaaaagacaaattatgtgatcatgctttgcgcttctaccttcctatggagcaatgtatattttacgtccaaactgaaagaggtcccctgtcatttgacgcaggtccagagaacatagttgtcaccgttggcaaacaactagaggagtggagccacggtgtattcaaatgtgttcctggggaaatgatcttcatgccgagtttccagagtagccctgcctctttctccatagagcttgtgtgcttggcctcttcaaatgatctaagtcacagtttagacaattctgacaactgtgacaagataatatccttggctgatcaaatccttattgtattttgtctggtatttttatacaattttttatacttcgttttttcctgattctcaggacatgattgcaccgttttcatttatttggatgcctgttgcgtggtcatgatgtagctctcacccagttacacgattttttttccctgtattttatttataaaagccattctggtgtacagtttgagtgtaaagattatgggtaaaacaccagttacgacatgttgacatgatgttgtgggttgaaagtagtgaaaatgctgtcttcttacatattgaatagtgtaaaaacacaggaagcaaagatttgtagattgacaatttaattaattttatcaatcatggtttgtattattattattaaaaaaaaaaaaaaaaaa

SEQ ID NO: 3143 - DNA, 716 bp, Glycine max
gtttggcactagcctccaaagtcgaaacccaaaagcttcttccagccaccaaaaaccagtgtcgtgaacgtgtacaattccacaaccactttatttactctccttctctcctctcccttgagcagattaaaatcatgggtccgatgctgctgagccaactcgccaccggtctaagcgttctcgccggagcggttcttgtgaaatcggttatggaccagaagcccatggcaggcccattcactcgctgccccacgtgcaacggaaccggtcgagtcacgtgcctctgttcgcgttggtccgacggcgatgtcggatgctccacatgctccgggtcgggtcggatggcctgcagcagttgcggcggctccgggaccggtcgtcccttgccggccaaaatcgcgattcgcccaccgaaccgcccaattaattaggtcacctattcgttgggctcgctcgccactactccttttagcgttagtataacattttatttttatttttatatcaatcaattatcaattattatgtaatataaagttgaacgttaccacctaagcaaattaattgttaggttccaatcatatactactagtattactgtaattcgtattcttgatttcttatacaagcatagatttttgctcctaaaaaaaaagatgctctaacaaaaaaaaaaaaaaaaaaaaaaaaaaaaaaaaaaaaaaaaaaaaaaaaaa

SEQ ID NO: 3144 - DNA, 1399 bp, Glycine max
agaccgttagagtttaagcgggtttctggacgttgtcgtttagacgtcactgctttgcttcgttcctattccacctcacgttccttatctttcttcttcttcttcttctcaaccgtcgtcgattctcagtttccgattgcagaatttgatttcagaatccaaaaaaatgaacacgttaatctcaccgccttctacaaaccgttacctttgtggggtcccttactctttcctctctccgcttcgacacaacaacaacaccaaccttaaccttccgaggttccattccacagttgctaccaacttcttgtcacactctccggttcgggccacgctctccgcacgtgccacttccgatgaagtagacacgcaaacggtggttgaggaactttcagaggagaataaagtggaagagaacaccaacgaggacaacacaaacacgtccactttttctgctccaattgacaaagaacttaaaaaggttgctcagaagactgctgctacctttgcaccaagggcttccacggctacaaaaaaccctgcagtgcctggaactgttttgtacagtgtttttgaggttcaagggtatgtttcaatgttgttgggaggagctttgtcttttaatctcatattcccttctgatgaacctgacatttggagattaatgggaatgtggtccatttggatgttcacaattccttcattacgagctcgagattgctcaaagaatgagaaagaagctctcaactatctttttctcctcgtcccattgatcaatgttataatcccattcttttggaagtcctttgctgttgtttggtccgcagatgtagtagccttcttgggaatgtacgcatggaagtttggatggcttcagagaacggattaaggaacccaaatttggttagtaaaagttatcaatgcttgttggctttgtctttctcatggatctcaattttgtataacacgcagcaatgagatgtgacattccttgtagcacttcatggcccccaactcatggatgagtgatttctgtgttaaaagtttgagtagcctttgcatctactaggggagcaagataccatgttgcattcgttaaacatcaaatgaagagaatgttataggttctttaaaaagtttagcatgttgtattattgccgtgtctcacgttgcaggaaatttgaaattcccgaatgtaatcaagaacctccaaaagatgaaatgtgaagtcatgatacatatatttttgtaccactgagattttcgatggctgtaacgtattttcttaactggacgaaaattaaaatttagaagacagatgtatcctggtttgtatctgatgaatgaagagtaagggttgttattaaaaaaaaaaaaaaaaaactcgcctcgtgccgaattc

SEQ ID NO: 3145 - DNA, 795 bp, Glycine max
gttttgcactgacaacaaaccaaaaaacagagctagctagcaagactaaaatggcagaaactgcagtgtccttggcaggtcagcaggcgcttccaaaaatattggaagctgtcaaaatgttgagagatctcccaaaagaagttagagacattacagatgaacttgaaagctttcaagatttcatcaatgatgctgataaagtggctgaagctgaagaagatgatggaaggcgtcatagaataaaagaaagggtgatgcggctgagagaagcagcttttcgcatggaagatgtcatcgatgaatataacatctcctgtgaggataagcaacctgatgatcctcgatgtgcagctttactatgtgaggctgttgccttcatcaaaactcaaatccttctccttcaaagtgcgtataagattcaggatgttaaatcccttgttcgtgctgaaagagatggtttccaaagccattttcctttagagcaaagacaaaccagttctagaggaaatcaagatatcacatggcagaaacttagaagggatcctctctttattgaggaagatgaggttgtggggcttgatggccctagaggtatattgaaaaattggttgacaaagggaagagaaaaacgcactgtcatctctgtggtgggaattgcaggggtgggaaaaaccactcttgccaagcaagtttatgaccaggtgcgtaacgatttcgagtgccatgcgttgatcacagtttctcaatccttctctgctggaggattgctgaggcatatgtttgaatgagctttgc

SEQ ID NO: 3146 - DNA, 1041 bp, Glycine max
gaatgggtaacgggcccccccctcgagtcagctacggcggccccccgacgctccaacactgaagtgaagagagaaacaatggccaatgtttcaattccactcccacgaaacggtttctccaaacccaattactcgacaaaacgcccatgtttcaccccttcagcttcaacactcagaatttcttgctctggagtggctgagtttgatggatctcatcagaaaaaaggaggtttgtttaatttcaatggaatcaagggcgtggcttgtggtattcttgcagcttgtgctgttacttctgctgcatttcctgttactgctgctactcagaggcttcccccattgtcaactgagcccaatcgctgtgagcgtgcatttgttggcaacacaattggtcaggcaaatggtgtatatgataaaccattagatctccggcaatgtgatttcacaaatgagaaaaccaaccttaaggggaagtccctgtctgctgcactcatgtcagatgctaagtttgatggagctgatatgacagaagttgtaatgtcaaaggcttatgctgctggtgccagctttaaaggggtggacttctcaaatgcagtcttggaccgtgtgaactttgagaaagctgatcttgaaggagctatatttaagaacacggtattgtcaggatccacctttgatgatgctaagctggacaatgcagttttcgaggacactatcattggttacattgatctccagaaactatgcacaaataagaccattggtgatgaatggagagttgaactaggatgtcgatgaaaagcaaagtcttcactgtcttctatttctagtatgctgctatgctatgacatgacacaaatattttgatgagggtaactagtggatgaatgctacgtccagaagtaaattcaattccttgcttttcctgtatgatattgtataacttatattattccctgtgattttaacatacaaattgaagacgctggtataattaataattctacttgtattttttttactaaaaaaaaaaaaaaaaaa

SEQ ID NO: 3147 - DNA, 776 bp, Glycine max
  misc_feature (24)..(25): n is a, c, g, or t
  misc_feature (28)..(29): n is a, c, g, or t
aaccctcccggaacatattcagcnnagnnaaaccaaagtaaaacgcggccgcccttttctgctttgcttaataatgaactgtggtccaattaaatcaaatgctgataagaatgtttcaattttcaagagatatagccaatattcggctgtttttttttcagaagcaatgcaaaatgaacaaaatagcattgcagaccaatgtagcctacattatttgccaaagatacagcacttcctgcatggcagaactaaatgaccgaaaattaaatctccagaactttgaaagcacactgcaaaaattgaatgtatgaaaatgtataatcactgtgcagtggattctctcagatatgcaataagatcagcacgttcctgaggcttcttaagaccaggaaataccatcttggtccctggaatatactttttggggttaagcaagtaatcgtatagtgtcttttcttcccaagtaacagccatgttcttgttagctgaagagtaagaataaccgggagtagtgccagattgccttccaaacaaaccattcagattgggtccttgcttgtgaccggcacctttttcgacggtgtgacactgagcacacttggtcctgaagattttgtcaccggatttgacatcgccgggaggtgcctgatcgaacgacgccattcgcagacaaaggcgaaaaggattggggaaaacaagaggtgaaagagttgtgcggaaaacttgcaatgaagcggccgtaatggccgaatccgcggtatatatatgaatgcgag

SEQ ID NO: 3148 - DNA, 767 bp, Glycine max
tacggctgcgagaagacgacaggaagggaagagaaagagatttggatttgggggaacatttggttgattagggtttcttcgggtgctaatgctcttgttttctcacagtcacacagcaatggaagcaatcacagagggagtgaacaacatcaacatctccgattcttacaagaagaatcgcattcaggtctccaacaccaaaaagcccctcttcttctacgtcaatctcgccaagaggtatatgcaacagcataatgaagttgagctctcagcactaggaatggctattgctacggtggttactgttgctgaaatcttgaaaaacaatgagcttgctgttgaaaagaaaatcacaacatcaacagttgacatcaaagatgattctagaggcagacctgtccaaaaggccaagattgaaatattactggggaagactgaaaaatttgatgagttgatggctgctgctgctgctgctgctgcagaagatggtgaaaacggagatgttgaagagcacgccgcataagttcatcgaagttatacctgtcttgggtgaagatatgcactctttaatgaactgcactgatgttgttagtatgtagcaggactagtaaagcaaagaactcgttatatagactgtcatgcaatattgaactatgcaattccttcatttcttttccctataaatagaggcttttttcgtgtcttaaaaaaaaaaaaaaaaaaaataaaaaaaaaaaacacacagaacccaagaaaaaaaaaaaaaa

SEQ ID NO: 3149 - DNA, 1651 bp, Glycine max
  misc_feature (11)..(11): n is a, c, g, or t
  misc_feature (19)..(19): n is a, c, g, or t
  misc_feature (1592)..(1593): n is a, c, g, or t
tcgagtcagcnacgtaggncctagaacatatatgtaatagaaggtgtcaaaggatttcaactttaggctccatctaaaaaaaatggctggtttggctagcaatcttcctctaattgttatgataggtctgcaaattcattatgcagcacttgccatattcacaagagccgctctcttagatgggttgagtacaacggtgtttgtagtatacaggcaaggcatagccactttggctttggcgcctatatttttctctcctaagaggagacaatcagtgaaagattctttgggattcaggagcttctttttgatgtttgtgaccgctcttgttggagtcacggcaaatcagaatgcatacttcaaaggattattttatgcatcttctactgcagctaccgctatgagtaatctgataccggcattaacgtttgtaattgcagcaattgcgggatttgagaaagttgacataagcttaagaagcacggccaagatattagggacagtttgttgcgtggctggagccttaaccatggcattggtcaaaggacagaagctgttacacacggagttccttccttctatacatctcaccggcagtcaaggtgatgattggctgctgggttgcctattgctcttagcaagcagtgttttttggtcatgttggatgatcctgcaggtaccaatcacttcgtgctgcccagaccatttattatcaaccttttggatgtgtctgttttcaacaatacaggctgccctatttgccctgctttcagagtcggatcttcaagcatggattttgcaatcacctttacagatttcatgttctttatatgcaggaatcggaatagcggttagcttcttcattcaatcctggtgcatctcagaaagaggtcccctgtactgtgcaatgttcaaccctttggcaacagtcatcactgctttgataagtgcaactttcctagaggaagaggtgtacgttggaagtttggtaggggctgttggagttattgccggtttatatgttgtgctttggggtaaagccaaagagtttgctgagattaaaccagaggcaccacaatcatcaaacttactagatgatgagataagtagtaggatagatttggaacaaccccttctatcagagaaattgtctgaacatgcaacagaagcagatagcaaggtgtagccatgatgattaaacaaatagaagttttggtgaagttttgatcatttcagaattgaagaaactgaaacatggaacaagttgcagcttaaacaaatttggcttaatttctttcaccaaaatttctaacgaatagagtgtgaaaataaattcaagctcatggcctggactaatggtaattatgtaagagtgataatatgttttaggagaaaaaaagatatgaattaaattttgtttccttccatctcgttttcttacatccgttattccgattatgctgggaaaattaggagtgctgagctcggattattattttttttcccggaaattgtttcccccaaggttgtggtttattttccaaaaaaaaaaaaaaaaaaaaaaaaaaaaaaaaaaaaaaaaaaaaaaaaannaagggcggccgattaaaaagaatccaggttacggacgggggcatcaagggctggatag

SEQ ID NO: 3150 - DNA, 1086 bp, Glycine max
  misc_feature (6)..(6): n is a, c, g, or t
ccgggnaattcggccattacggccgggcctccacgaaaggcaatcctctctgtatctttggttcagcagccattagcgatttcccttatctctctccatcttaactccaagcacaagaatcatcttcccatttcgtttctgaccaatggcttccctcactgtcccaaaccattgtgttcccactttgcttcgcactcactctctcaactacccatcttcccaaaacctcccacttccttccgcgccatcaaattctcaattttttggcctcaagctatctcattcttccttttccacaattccctcttcttcttcttcactcaaaggctccattttcgccaaggtgactaaaggttcaaagccaccgaattttacgctaaaagatcagaacgggaagaatgttagcctctccaacttcaaaggaaaaccagtagttgtgtatttctaccctgctgatgagacccctggctgtaccaaacaggcttgcgctttcagggattcatatgagaagttcaagaaagcaggagcggtggttgttgggataagtggtgatgatgctgcctctcacaaggcatttgccagcaagtacaaacttccatttactttgttgagtgatgagggtaacaaggtgaggaaagaatggggagtgccaggtgatttctttggatcattgcctggaagagagacttatgttcttgacaaaaatggggtggttcagctcgtctacaacaatcagttccaaccagaaaagcatattggtgagaccctgaaaatacttcagagtctttgagacattctgattcttttgttggctatcttagctggcctgattcagagtcagacaagtatgtaactatgaattgtaagtttgtaaccactgtaattatgtagctgattttggagcctttgatcacattcacatgggggtgatgatatgtattctcctatagagagcaaacatttataacctctccggatggaataatgccttcatttgccacaaatacaatcagattatatctgtatcttttgcaaaaaataagtttagcttcaattgacaaagtgaccatccattataatttctaa

SEQ ID NO: 3151 - DNA, 1137 bp, Glycine max
cacccgacctttacctcgcactgcctgatccataaattgtgtggatgaggacagtgtagtgtagtgccattgagaagcattaatgatactagttagccatatccaagctccttgcgtaggagccatgttttcaaagtgttgttctctattgtctctacccaaattcatcactgttacaaacccaccaacgttttccaaccctgtacctaatttcatcactagaagaataagctccacaagaccctttcatctcacactcgccaaagcagagggaaacctcgattcagattcaccctcaacctccacttcttctccttctccttctccttttgccactgaccaaacggttttcgtgactggcaaggatgttccattggagggtgtcatccagttcgagaaaccagcctcttctcctccttttgaaaaatgggggcgtgtggctctgctagctggtgcggatgtgttggccttgtttgtgttttcgacaattggaagatatagtcatggactttctgttttggaccttgagacaccgcgcactgctgacccttttattgcggggtggtttttgggtgcttacttccttggaggttttggggaggatggccgcgggatgaacggtctctcgaagggtgtcgttgctactgcgaagtcatgggctgttgggatccctataggaatagtaataaaggcagcaacatcgggtcatctaccgaattatggttttgtatttgtgagtctgggaagcactgctgttttacttgttacattcagagcattattatatactattcttccagttgacaatagtaagaagagcgatgactatcgccgcggcagtccctttgaactctttgagctgctaacatcattagtacggcggtggtagcaatggtttgcatgttcaaggcaccataatgtgtatgcatctaaacatcagtttccatcgctagtctccttgtactatctgctcgtatgaaaaaagtaagagtagatgtttactgcagttgaattttattcaactaaatgtgtatactattattacacctttgatcaatcaaaagtgcattaactatcaagtcatttatatcaaaatcaagattcgcacgagaccattacacaaaaaaaaaaaaaaaa

SEQ ID NO: 3152 - DNA, 1288 bp, Glycine max
tcagctatcagctacgtaggcccccccccccccagacagcgttttgttcttttccctgtgtttgtgagtgagttgatatctgacaaaaaatgggcggaggaggagcaatgaggtcggcggcgaagatcgccggcatcggcatttccaaggcggcgctccgtccttcggcgctcccgacggagcaggcggtccacaacgcgtcgagaccgacatcggttgtcggagtgaagggggcgaaatccactgaggttgcgccgcttcacgcggcagcgccgtgggacgactgggacttggccgacgacggcgatttggtcgtgccgaggatggtgttcggctctgtccccactttcgctgaagctaaggaagccaccgcagaattgaaggatgctattgatcaagtatatctttctcctgagtcctctcaatattcatctcgtggtggtcaagtctctgctttgtctcctactggtggtcaagtctctgctttgtctcctactctttatgagccagtgaacagatcttgtgtagttgatgctatttcagattcttcagcgccaaagcatgccattcaggcttttcatttgcttagcacaagtcgtgaggcccaggctgttgtggcttcacttgcttgtgacccaaatgtatggaatgcagtcatggaaaatcctgctgtcagtagtttcttccaatcacaacagtcagtggctgatcttggagcagcaggaaatactgaggaattggataagttctcaagttgtacttctgaaacagttgaatcccctgaaaaattgggagtgtcagctgagtctcacccgggaaatgggattttcgatttcatggatcttctacagaatgtaaagctaaccgttattgaattggtaagtagggtgtctggtttccttcagaacatattcccaccacctgatgctatgaaagagaagatgtctggtgatgtcgatgggaacactaaagcaagtttcatggatagtaaaattagcatgggaggaaccttcacaggtttggcaataatagtgataatggtgatagtgacaaagagagcttaagactcttggaagcaaaactacaatttgttgacttttctgatctttttaaaaccatgtaatcaagtctgaactgtttttaaattgacgatgtgtcgcactcggtaatttatttccattaacatttgaaagtcttattggatagttatttatttatttttaaaaaaatgtttattttgaccagccttgtttgtcttttgggtcctgtgattggatagataaagtta

SEQ ID NO: 3153 - DNA, 1168 bp, Glycine max
  misc_feature (1079)..(1079): n is a, c, g, or t
  misc_feature (1122)..(1122): n is a, c, g, or t
  misc_feature (1149)..(1149): n is a, c, g, or t
tcagctacgtaggccccccccccaacaatggattatatttgtttgtccatcatcatacagaaagaaaaaacttctccagcggagtccacgccttcaattcaaagcaaagatgtgcactttggagaagagaggcagcatattcatcctaacactcaccggcgatggcgagcaccgtctcaacccaacactcctcgattccatccaatcctccctccgccgcgtccgccaagaagccaccgcctcctccgccctcgtcaccaccgcgcacggcaaattcttctccaacggttacgacatcgcctgggcccgatcctccgatgaggtcaaagagcgcatgatcctcatggactccctcctccgctccgtcgtctccgatctcctcaccctcccgatgccgaccatcgccgccgtcaccggccacgcctccgccgccggctacaccctcgccctcgcccacgaccacgttctcatgcgcagcgacaggggattcctctacatgagcgagcttgacatcaacctcgttattcccgcgtggttcgtggctctcctcgaagccaaaatcggctcgcccgcggctcggcgccacgttgtcctaaacgcggctaagctcactgccaaggaggcgctgcggctcggcgtcatcgactcggctcacgacagcgccgctgagaccgttgaggctgcgctcgctttagccgcggatttggtgaagagaggatgggttggacacgtgtacgctcagaatcggaaggtctttctgggtcgcgtgattcgagccgttgaagatacctctgagagaaagtcatacactacttcacggctttagccttttaggataggggctcgtgtgacatgaagacatttattgggccgctttgtaattcttagtatgttgggctctgaagtccaatagttcagtgattgttttaacgtttttaatcactctgggcctattttatttgtaatatgcactgttgcttgttgtaccttcctggcacccccattacattacggattatatgggttaaaagtatatttttagtagatcaaaatacgattatgtttatttttcacctccnaagtttaaaaatgtaattatttctcaagttaactctattaaantaaatgctgacatgactaatggaatgncaaaaaaaaaaaaaaaaaa

SEQ ID NO: 3154 - DNA, 2107 bp, Glycine max
attcggctcgcggtagtagagcactgaattggatatgtgtctatcacctaatctaagtcatcgtgtggtggtggttttggtcggtggcaaagagagaagaaacaaagcctgttcttcttaccatgtcggatcatcttccgcgcgaagtgctaaccgaaatcctctcccggttaccggtcagatccctactgagattccggtcaacgtccaagtcatggaagtccttaatcgacagccagcacttgaactggcttcatctgactagatccctgaccttagcctccaacacgagcctcatcctccgtgtggactccgatctataccagaccaatttcccaaccctagaccctcccgtatcccttaaccaccctctcatgtgctacagcaacagcataaccctcctcggttcctgcaacggccttctctgtatatccaacgtcgccgacgacatcgccttttggaacccctccctccgccaacaccgtattcttccttacctccctgtcccccgccgccgtcaccccgacacgacgctctttgccgcccgcgtctgcggcttcggcttcgaccataaaactcgcgactacaagctcgtccgcatctcttatttcgtcgaccttcatgaccgctccttcgactcccaggtcaagctctacacgctccgcgccaacgcctggaagacacttcccagcttgccctacgcgctctgctgcgcccgtaccatgggcgtcttcgtcggaaactccctccactgggtcgtcacgcgcaaactcgaacccgaccaacccgatctcatcatcgccttcgatctcacccacgacatcttccgcgagctcccgcttcctgacaccggaggtgtcgacggcgggttcgagatcgacctggcgctgttaggtggttccctctgcatgaccgtgaactttcacaaaacgagaatcgacgtttgggtgatgagggagtataaccgtagagacagttggtgtaaggtgttcacgctcgaggagtcgcgtgagatgagatcgttgaaatgcgtgaggccgttgggctactcgagcgatgggaacaaggttctgttggaacacgacaggaagaggctgttttggtatgacctggaaaagaaagaggttgcccttgttaaaattcagggtttgcctaatttaaatgaagccatgatttgtttgggaaccctcgtaccaccatacttcttacctcgtcaaatttgtaggaagccgcgtgctttaggatgcgaacgtcccaggaagacgagggatgacttcctgtcgcagggtttcaaattgacattatgaggaagtctaagaagaagaagcaatggtacatgggggtagctgaaactggctcggcgggtttgttttgcagttgattcaagccaaagggaggttgaggaaaagtaagaaaatgttgcttccgttacaatgactgtaatgtatagttaaattaatactatcagctacatattttactttgggatgtgtgccacgtttgacgaactctgaaacaaacatgctcttattggttacttgctgagttatctgactctgatgatgaaattcgtggccctggttcacaggacgagttaaattgatcaagagcaggaacagagacaccgttttgcctgttaagatataagactctttccttgtacagtttttgcaccttttgttttcttagcgatttaggggcgaacaaagccccccaccaaagtgaaagaaagggctgcagacctgccattcagaatgttgaagaaggaaacaatgactgaagaacagataccaaatatacaaatgctgctttcctcacttattaacagtctccaattactaagatcccgtaagacactcgctttccgcaatagaaaaaaaatggcctatatggttttgtctaagcttggattgcctcagtggtttggttgtaaagaagtgtcatgtatgtacgtgtgttaatctggttgtaccagcaaactgtaattaaatttttgcagttaacttgacatgaaatattgttgtttttgtttattggtaggtggactttgcaaattgaatgcggaaaggttgacaatttacattaacgaaggaaaaaaaaaaaaaaa

SEQ ID NO: 3155 - DNA, 2171 bp, Glycine max
ggctcgagcagaaatgaacgccctcccttcctcttcctcttccaccttcactttcttaactcagtccaaaaaccccaactaccacttcaagttcacacacaaagtacccattttacccctacactcgccttctccatgttggctccctgagtgactcgtcctcctcgtcgaccacggtgctggacaaaaatgccctttcacccgaacagaattctcgcattgcaggttcgccagaagactcgagctccaaggaaaacctcgtggttcgccggccggtgacggatttttccggcgaagactccggcaaggaggaggaggaggaggaagaagaagaagatgacccgaaggcttcggtgatcgacgagggtctcgcgagtctcccgcgtaggccccccccccccgagccggagaggatggaatccaaagagaggccactcgcaattaatttggacttggcgttatacagggcgaagcttttggctagaagaacatttcagtatgatgaagcagagtcactacttaaaaagtgtataagcttttggcctgaagatggtcgaccttacgtggtacttggaaagattttgagcaagcaatccaaaacaagtgaagccagagagatatacgagaagggttgttaggctactcagggtgaaaatgcctacatttggcagtgctgggctgttctagaaatgcaaatgggaaatatcaggagagcaagagagttgtttgatgctgccacggttgctgacaagaggcatgttgctgcttggcatggatgggcaaatctagaattaaagcagggaaatctaaagaaggcaaggattctacttggtaaaggtcttcaatattgtggacagaatgagtacatataccaaacacttgcacggcttgaagctagagcaaatagatatctgcaggctcgatatttattcaatcaggccactaagtgtaatcctaatagttgtgctagttggcttagttgggcgcaaatggaggtggagcaggaaaactaccgtgctgctaggaaattgtttgagaaagcagtacaggctagtcctaaaaataggtatgcttggcatgtatggggcgtttttgaagctaacatgggcaacattgacatgggaagaaaacttttgaagataggacataatctaaatccaagggatgctgttctacttcaatctcttgctttattagaataccaatactcaactgcaaacgttgctcgggttttgttcaggagagcatctgaattgaatccaaggcaccagcctgtttggtttgcttggggttggatggaatggaaggaacggaacttgaataaagccagaaaattataccaaaaaactttatcgattgatcaaaacagtgaaactgctgccagatgtctccaggcttggggtgttctggagcatagggttggcaatctttcagctgctcgtcgattatttaaatcatcgttgaatataaattctcagagttacgtgacatggatgacttgggcatcagtggaggaagatcaaggaaattctgtgcgtgctgaagagattcgtaacctctatttccaacagcggaccgaagttgtagatgacgcttcatgggttatgggattcctaggtatttttgacccggccattgatagtttaaagagaatcctcaagctgaacccaaattcgtacaacatgccactggattctttgaggaacattgcgggaacaaataaaaacagagttgattcttctagtgacgatgaggatgatgatgatgcaaatgggaaaaatgacttcgatttggatgctttcattaagcaaaagctaaccttagatttgtccaatctagaaattcagttggaaacaccaaaattttattctgtgaagagaagtaagtctcctagaaggatatggcgacgatcaattaatggaattgccgaagtgcaagtcacacagtaatgtagtttagggtgggatcttgagctttatacatgttggtgtcttgtaaaaattgttttgaatagtatgaccgtggcatgagaggtgtaattaccttgtgttgaacacggcattataagaaatattttttaatgaaaagaaaatatactaaattgctgacaaaaaaaaaaaaaaaaaagaggaaaaaaaaaaaaaaaaaactcgagactagttctctctctc

SEQ ID NO: 3156 - DNA, 1745 bp, Glycine max
  misc_feature (2)..(2): n is a, c, g, or t
  misc_feature (4)..(4): n is a, c, g, or t
tngnctacgtaggccccccaaccaaacaaaaatggaacaagaagacacagtagtgttgtatccagccccaggcataggccacattgtatccatggttgagcttgctaagcttctccaattacatgctcattcaatcacaattcttctcaccacgggtctccttgaccacccctctatcgacacctacatacaccgaatctccatctctcacccttccatcttcttccaccgcctcccccacacatcactctccaccaccaccaccgtgagcatggccgccaaagccttcaacttcatcaacataaacacccccaacgtagccaccaccctcacccaaatcaccaaatccaccaatatcaaagccttcataatcgatctcttctgcacctccgcaatggaaccggcttcttcattgggaatccccgtctactacttcttcacctccggcgccgccgttctctcgcttttctcttactttccaaaactccaccaagagacccacgtgtcgtttaaggatatggtcggggtagaactgcgcgtgccgggcaacgcgccgctgagggccgtgaacatgccggagccaatgttgaagagggacgaccctgcttactgggacatgctggagttctgcacgcgccttccggaggcgcgtgggatcatcgtgaactcgtttgaagagctggagcctgtggcggttgatgccgttgcggacggcgcgtgctttccagacgcgaaacgtgtgcctggtgtgtactacataggaccactcatcgctgaaccccaacaatcagatgtaacaacggagagtaaacaatgtttgtcatggcttgatcaacaaccaagtagaagcgtggtgtacctgtgttttggaagccgtggatcgttctcagtgtcacaactgagagaaatagcaaatgggttggagaagagtggccacagtttcttatgggttgtgaagaggccaacacaagacgaaaaaacaaagcagattcacgacacaacaacaacaacaacaacaatggatttcgatttgagttcggtgttgccaagtgggttcatcgagagaaccaaggacaggggcctggtggtgagctcgtgggccccacaagtggaggtgctgagccgcggctcggtggctgcgttcgtgagtcactgcgggtggaactcggtgctggaaggggtggttgccggggtgccaatggttgcatggccgctgtacgcggagcagcacgtgaacatgcacgtgatggtgggtgagatgaaggtggctgttgcggtggagcaaagggaagaagatgggttcgtgagtggggaggaagtggagaagagagtgagggaggtgatggagtcagaggagattagggagaggagtttgaagctgaaagagatggctttggctgcagttggggaatttggatcctctaaaacagcacttgcaaatttggttcaatcatggactactcatgtgtaacatttttttttatcattaaaaattgaaagaccaaaaaaacaaaacaaaaggcatgatatttacaataattcacgcatatgtcttgatattctgatatatcctagtgttgtaaaactgctttgtgttctcaagtgggtttaaactatgattacttggattgtagtttgtatgttagtggcattaataatgttgaagtggttaatatcatctttctaaatatgtatatcaaatttgatataatttagatattcattattatattatttctatttaa

SEQ ID NO: 3157 - DNA, 921 bp, Glycine max
atgaggcgttaagataaagaaaagcccaaaaggcccaaaaaggttgcacaccaccgcctcaatcggtgctatcggctcagctacgtaggccccccccccgaacacaaaggaaaacgtgatgtgatgtgatgtgatgtgatggagtctacaaaggaacaatctggaatgctgcacaagatcctacctccacgtctagaagatgccggcctcgaagatcctgcccttccacccgattccatccacgaagcttttctgaaggccgccgccgccgtcaaatcacgcgccgcctccattttctcctccaccgacgacgacaacgacggaggttgcgtcagcgacccgtggcccagcgccaaggacgcctccgatgcagtcatcggagtcgaatcggaaaacgaactgccgggatcctgcatcgtagagaggggagtcgagcccgtcgccgacgaagtcaaagttgctggtgaaggaggcgacgcctccgccgacgtggtggtggagggaggagacaaattaggagaggatgtggaagcgtgcgttgatgagttgcaagggttggatatcaaggatgtgaagaaaggtggagaagaagatgatgaagaagaaaacaagaaacctaccttggttgaaggctatgtgtgaaaaaagggttaaatctttatgttcttgttctttacccacttgtactagtagttttctgtaataatcttttaagtgtcttaacgtttgtaatatgaagaaagtttcttcaatgttcataatcaatgccttcgtttcacataatctatagtctttttgtattactatatagctggctaatatgctcatattttatgagcttttatttagttagtccaatctgctagaatcacattgtaaggcttgttttttgtgtatgagaaaaaaatgtttgattcaggg

SEQ ID NO: 3158 - DNA, 786 bp, Glycine max
gtgcacggctgcgagaagactcttataaagaaccctagctagggtttctgagtttatgtggttgcgcctctgcctgtaagagtgaaaaaaccttctcttttccttctctcaagtctcaagagatttcatcatggctccaaagaaggacaaggctccaccaccttcctccaagcccgccaaatctggcggtggcaagcagaagaagaagaagtggagcaagggaaagcaaaaggagaaggtgaataacatggtgctgtttgatcagggcacctatgataagctcctttctgaagctcccaaattcaagctcatcactccttccattctttctgatcgtttgaggattaatggatcacttgcaaggaaggctataagagaattgatggctaggggttcaatcaggatggtgtctgcccatgcaagccagcaaatttacaccagggcaacaaacacctaggtgtggaactgatcttagcttacggagtattggtaggaatagtaatgaagtattgttcttttgcactttgggaagcatctcatatggttctatcagttctagattgtcgctgaatccgatgctcagattgtatttttggtttccttcaatgttttatcttcttcaatattctggcagttgtcttatacttgttttgtttacttgaattgttaatgtggcagagattctttttggaagaaaaaaaaaaaaaaactcgagactagttctctctctctctctctctctctctctctctctctctctctctctctctctctctctctctctct

SEQ ID NO: 3159 - DNA, 2118 bp, Glycine max
ccacgcgtccgtacgccgccgcgtaggcccccgcccccgacgcattttctgttctgttttgttctcattctgtgactctgtgcttagttaacgttaacagtgacttaagatggcggattctgcagatgtcacccacgatgttgtgtccctcctctcttctcctcaaagggactttcttcttcgaaacaacggcgatcaggttaaaattgacagcttgaagggtaagaaacttggtttgtatttttcggcatcctggtgtggtccatgtcaaacatttacgccaactttggtggatgtgtacaatgaggttgcaaaaaaaggtgacttccagatcgttttcattacggctgatgaagatgatgagtcctttaacggttacttttccaagatgccatggcttgcaatcccattttctgattcagacacacgcagccgccttgatgaattgtttcatgtgagggggattccccatcttgcattacttgatgaagctggcaatgttgtcactgaagatggagttgatgttatacgcgaatacggtgttgaaggatacccgtttacatcagcaaggatccaagagttgagagatcaagaagaggaagctaggaggaaccagtccgtgagatctctcttggtctctccatctcgggacttcgtaatatcatctgatggaaagaaaacacttgtctctgagcttgagggcaagacagttggtctgtatttctgcgtgaagtcattcggatcatgcagtgactttaccccaaagcttgtggaggtttatgagaagctgaaggcccagggggagaactttgaggttgtgctgatacccctagatgatgatgaagagtcattcaaggaactattagaaagtgtgccttggttatccttgcctttcaaggacaaaatctgtgggaagctagctcggtacttcgagctttcaaccctccccactttggttattattggaccagatgggaaaactcttcattctaatgttgctgaggcaattgaggatcatggggttgctgcatacccattcacccctgaaaagtttgctgagcttgatgaaatactgaaggccaaagaggcagctcaaacccttgagtcaattttggtgtctgacgatcaagattttgtcattgggaaagatggggtgaagattccagtgtcagaattgaaggggaaggttgtcctcctctacttctcagctcactggtgtcctccatgccgtgcattccttccaaaacttattgatgcatataataagattaaggaaaagggcaatgcattagaagttgttttcatctcaagtgacagagatcaaacctcctttgatgaattctttgcgggaatgccatggttggcacttccctttggggactcgaggaagaaattcctgagtcgcaaattcagggtatctggcatccccatgcttgtggccattgcatcaagtggtcagacattgacaacaaaagctcgagatctggtttcactctatggagcagatgcatatcctttcaccgaggagagaataaaagaaatagagacagaacaagaagagactgcaaaggggtggccggagaagctgaagcatgaattacatgagcatgagcttgtgttgacgcgccgcagggtgtattactgtgatgcttgcaatgaagagggacatatatggtcctactactgtggagattgtgactttgatctccatccaaaatgtgcattggaaaaggaggacaaagaaggaagcaaagatgatgccaaggaagaaaagtccaaagatgaatgggtttgtgatggagaagtctgcaaaaaagcctaaaagctgcttgtcaagggttttggtgatgaataatctgaatatttggatgaagtattgtgaacgcccttcctagtatgttttatgagttgtgcagaataatctgaatatttggatgaggtattgtgaacgcccttcctagtatgttttgtgagttgtgcagaataatctgaatatttggatgaggtattttgatgttaattatggtctttaatatatatggtataatggtttactcttaaacctaataaaaaacgaatgaattactacttactgggcaaaaatcgtgtctataaaaa

SEQ ID NO: 3160 - DNA, 1239 bp, Glycine max
tctttcttcccgtgccccaccgcccaaacaaaccttttccttttccatctgttttctcttcgcctttattgtttttttttctttcactcttgttccttttaaattcctcgcgacacaaaccaatgcaaacggaaaacgcagaatcgcaactcacgagagtcacacctccgccatgaacaaatcgcagtcgaagaactccgagtcgtcgactcagttcgactcgccgcactgggacggcaccgagtcgccggaaaaatcgccggagaagcgcgacaactccgtggccatcgtgaccgttggcaagctcaagcagttcacaccggagaagcgcgcggagcaccgggaaccgccggaaaatccgccgtcggcggcggtggtgatgttcaacgaccaggcggcggaggaggatcagaggacggcggaaaaggcggttccggcggtcggcggaggagaacggagatcaaggtcggcggcggcggcggaggggtggaagacggacgagacggtgagcaaggcggcgctggggttccggctgagcgaggtggtggtgtgtctgatttcgttttctgttatggccgcagataagacgcaaggttggagtggtgattcatttgatcgctataaagaatataggtattgtttatctgtgaatattattggatttgcatactctgcattacaagcatgtgatttgacatgccaacttgccacggggaaacgcttaatcagtcaccaccttcgcaaccactttgatttcttcatggatcaggttctggcatatcttctgatatcgtcatcatcgtctgcagccacacgggttgaggattggatattgaattgggggaaagacgagttcacagaaatggccactgcttcaattggaatggccttcctcgctttcgttgcctttgctatcagctcactcatctctggttacactctatgcaaccgaagctccatgtgaacctcacacttcctaattccccagttcttacaacttgtctatctatagagttctctcttgtttcccttgtactgtgacgttacatgccactggttatgtcctaactagtagataggactttaaacccagaaacgaaggctttaaaatagtgacaatactacattccagtttcccctattttatttctttggggattgtttacctgtttgctcattattaccggaaaaagaaacaaataaactttacatcattaaagaaaaaggattaattaaaaa

SEQ ID NO: 3161 - DNA, 1300 bp, Glycine max
ataaccaggcttatatattagctattaatcttcagttgacatgcacatccaaatgtcttctttcctcttagcttcgcttgcacttttgttttgcatctcctccttggagaagagctttgcctttcaagcaacaaaggaaagcaacaatcttcgtcaatatcattttgttcacctcaactctctatttccatcatcttcttgcagctcttctgccaaaggtcctaaaaggaaagcatcattagaagtggtgcacaaacatggcccatgctcccaactaaatcatagtggcaaagcagaggctacaatatcacacaatgatattatgaacctagacaatgaaagggtaaagtatattcagtccaggctctctaagaatttgggtggagaaaatagagtgaaggaattggattcaactaccctacccgccaagtctggtagacttattgggtctgcagactattatgttgttgttggtcttggtacacccaagagggacttgtcactcacttttgacacaggtagttatcttacatggactcagtgtgaaccctgtgctggttcttgctacaagcagcaagatccaatctttgatccatcaaagtcttcatcgtataccaatatcaaatgcacatcttcgctctgcactcaattccgttctgcgggatgctcctcatccacagatgcatcatgcatatatgacgtcaaatacggtgacaattccatctcccgcggcttcttgagtcaggagcgccttaccatcaccgccaccgacatcgtccacgacttcctctttggctgtggccaagacaacgagggcctcttcaggggcaccgccggcctcatgggcctcagccgccaccccatttcctttgtccaacaaacctcctcaatttacaacaaaattttctcctactgtctcccctccacccccagctcccttggccacctcaccttcggcgcttccgccgccaccaatgctaacctcaaatacgctcccttttccacaatctccggcgaaaactccttctacggtctcgacatcggcggcatctccggtggcggcaccaaactccctgctggctcctcctccaccttctccgccgggggctccatcatcgactccggcaccgtgatcacgcggatgcctccgaccgcgcacgccgccctccggtcgggatgtcggcagcagctgatgaagtcccccgttgcctatgggacccgccaacttgcagacgggcacgatatgaggagggcctaacggacactttccgttccgaagggtagcactttcaaatttaac

SEQ ID NO: 3162 - DNA, 1484 bp, Glycine max
  misc_feature (1468)..(1468): n is a, c, g, or t
cacgagccgcgttttctcttcttctcatcataacctaatcccatcaacacaattcaacgcattcccaatttctgcaattcgagggaattagggttcctacttttacatttacatggaccaacaagacgaagaagcgattctcaccaaaccctcgaattcgttgacttttccgtctctaacccactccgcctgcctcgaaatccgtctcttctatgtcagaatctccccctgcctcgtcgacacgctcccggagcacctcacgctctgccaccctcgccgccacgccgccgtctcccttgtcgtgaacgccgcccccgtccccgcctccgaccccgccacgctccccctccgtcgcggccgcgtcgaccgccacgccgccgaggtgacctacgtcgccaccgacaccgtcagcctcagcggcagcgccgacttcgaggtatacgagaacgacaagctcttcctctgcggctccttggagcgcctcgacgcctactggggagccggctcaccttcggctcagacttccgggtgggacatcgactgtcatgtggcgtccggctccgtcgggtcggggtgctccgccttcttcaggccgcggctcggggtttccgcgccgtcgatcgaggtctacgtcgccggctgctgctccggcgtgcctgtgattctgagcaagacgattcagatgagtccgaggaggagagtgccgcggcacgccacgctggatgctatacctgaagatgaggagatgatggtgttggagaagaaccgtgtcaacgggtttgttcccatccgcaagttacagataacagactcggaagttgatgattatgattctgatgggaagatggggaatggtttctactgtcaagagatgtatcctggcgaggatggacaactatcatggttcaatgctggtgttagagttggtgttggaatcggccttgggatgtgcgtagggcttgggattggtgttggactgctcatgcgatcgtaccaaacaacaactagaaacttcaggaggagatttttctaaactgctataaggaatttgctactctagtttaatgacaaaagcaagaaaatatattggagtttaatctaggtgggacacctctggaggaagatccaaaatccaacaagtcaaatgcatgaagtgtaagttttgtagatgagtggaggttgtgcttcgtctccattttgtagcttacttgcagatacgttcacgtagacttgcagatttgcattttgtgtaaattttatctgatcctccgacaacaatagatatcaataaaagagcaatacaatacaacagctttgaggatgtggtgtgccagcaggatctggtgttaagagaccagtataaggttgcgagaggttttgactatgagcatgttcctgagattttactgtttgtttgttggttggttggttggctggcttgtagatatattttatcattttatccaanctttgagcagtttaaa

SEQ ID NO: 3163 - DNA, 1666 bp, Glycine max
tcagctacgtaggccccccccccattttgcgtttatttattcagcattcggcggagatttcaaacccaacttggcttgttccaattccattcattcgttcattcccaggttgtgatggcagcagcaccagcagctaccttcgctattggaaccaccggttccctcggccaaagaggaagctcgcttcctcaatcaaagtcctttgggttgaaattcaactctctgaatcatttgaagagcttctgtggcctcaaggccatgtcatccgtgagatgtgagtcggaatcctccttcttcggtaacaaaaccggtgctgctctacgggcgtcttttgcatccaaagctcaaaaggaaaacaaccacaactcgcagcctcaggcttcgtacaaagttgcggttcttggtgctgctggagggataggtcagccgctctcgcttctcatcaagatgtcgcctttagtttccaacctgcatctctatgatattgcgaatgtcaagggagttgctgctgatatcagtcactgcaacacaccctcacaggtcagggatttcactggagcttctgagttgccgaattgtttgaaggatgtgaatgttgttgtcatacccgccggtgttccaaggaagcctggcatgactcgtgacgaccttttcaacatcaatgctggcattgtcagggacttggtttctgctgttgcggattactgccctgatgcttttgttcaaattatcagtaaccctgtgaactctaccgtgcctattgccgcagaagttttgaaacagaagggtgtgtatgatcctaagaagctctttggggttaccacactggatgttgtgcgggcaaacacgtttgttgctcagaggaagaacctgaagctgattgacgttgatgtcccagttgttggtggccatgccgggattaccattcttcctctgttgtcaaagacaagaccctcggcgagtttcactgatgaagaaattgatgagttgactgtcaggattcaaaacgctggaactgaagttgttgaagcaaaggcaggcacagggtctgctaccttgtcgatggcatatgctgctgctagatttgttgaatcgtctcttcgcgcacttgatggagatggggatgtgtatgagtgctcatttgtggaatcaaacttgactgaccttccattctttgcttcaagggtgaaacttggtaggacaggagttgaggctttaattccatctgacctccaagggttgactgactatgagcagaaggctttggaagcacttaagcctgaactcaaggccagcatagagaaggggattgcttttgctcagaagcaaactgttgctgcttaaatttccttgtcagcaggtggtttcttgggttatggatttatttgagcataaatactacttagaggacttaggttgcagatttgttgtagcatctttactgcttccagaacttaggattcagactttctatgtatcaattctacttccagttttgttagtagaacgggaggacgcttccatttctgttctctaaaccgagcttaggttttggtcagaaatcttcaaagatgtaagcattataatgtagaattgaaaaaaaatgtaaacgttgctttttgaataatatggccattagaccaggttttggttttttgttgggccg

SEQ ID NO: 3164 - DNA, 1102 bp, Glycine max
atttgcaaacgcaatgaacttagaaaaaaaggaatttgaacttgagaagtgggaatcccacgcgtccgacggctgcgggtcacgacaggccgaggctaaagagagtgtgaagatgctaaagacataaacataagaaagagcacaaaacaaaacaaaaaaaaggcagtgcgagtggagtgaagtgaagtgagtgagagaagcgcaaacaagtagaagagaaaatcatggcagtttctgtaaccattttagttctcatcatcgctctgcatctcatagccttcgtctttgccattggggccgaacgacgtcgtagcgaggccaaagtggtccccgacgagtacgacgaccgaaccttctgcgtttacaccaccgacgcttcctccgtctacggcctcgccgccgtcgccctcctgctcctcagccacaccgtccttaacggcgtcacccgatgcctttgctgcggtaaaggcctcgtctccggttgctccgccacttgcgccgtcttctccttcatcctctcatggattagttttttggcggcagaggcgtgtctgttagcagggtctgcgaggaatgcataccacacaaagtacagagggtattttgtgaagcacgatttgtcttgtgctaccctacgcaagggtgtgtttgctgctggagctgccttgaccttgttgtctatgttgactgccattttgtactattgggcacactccaaggctgacactggtttctgggagaagcaccgcaatgaagggcttggattggccacgcaacaccaccaccaccaaggtcctgactctgataaggcctgaatggtgatttcttggtttggactgatttactcaattttggtggtcctctttttgcttctggataaaggggtgttgggggataagggactagggaggaatagtgttttcaaaaccttgttcttgtattaatggatgaatatatagtatttatgctgtaataggagaatgcttgaaatatatagatagatggtcgtggatgatagtagtatggtggtggtttaactaatatattccaatcttctagttttaaagttttgaaaattgcattagcgaaaaaaaaaaaaaaa

SEQ ID NO: 3165 - DNA, 1485 bp, Glycine max
ttttagaatgttaagaatgacaccatccattctgccctcattagtaaacatagtaagtgtacaacatattcacgtataaaaccttaggaatgagaaagaaactacattactacaatatcttgctgaaggaaagaagaatttccttataagatttcatagaagaacccaattataaaacaatgaacctacatcccagtgggaaaaaaaatggtacacctgcatatttcaaacaaatgattctgtatagaagaactgaaacaactcgtcagtcatgatggatctgattccagttttgggatgatggcagatttgagctctaaatgagaaatacgaacagctccaataagcctctccggcaattcatcaggtgtatttgcctgtacaagaaaagccatatcaaccaccaatgttgtaatcacaccaataaccagacccaaaactccattagcaacagtagaagaaccaatatcaacatcaatttctaaatacttgggaccacgaatatagttgcaatcaactgcctttcccagtaaacaaggagtactaccaacactctggcgtacaatccatgagccctttgggactgatggtatgagcttaaacctgctgtttcgaaactcatcatcaccgtcaacaaagcgatgcaagagggatccagaaactaactcctttgtcacaaaataaaataccatactatagtgtgttgatgcaggtacttgaagattaataacaatggagaaaaatcctttttctgaagcaacttgcgccgcacaaccatgacgcctagccacatggtccattctctttgagtctttaaaccaatcaacagcaacaaggtccagcatatgtttgccagcaggaacctttgtcttgtcatagcaataatgcttgcttctgactctgaagttgtttccatcagaaattttccagcagtcccgagcattatcacggtcatctcggcgcaaattgcccgaaaaggaagaaaagtcaatttcatgtgccggttcttcttccaaggctgtttttctcacatcattctcaagaccaatttggtatgcctcttgttcaggttccgctatttgaaaatcttcttcatcatcagaatattcatctatcaaggcagaacttctgcttgcagcattcatttgatcaagagaagtaggattgacagaaaaatcatttggcttctgattcttctttgaagaaacagctgttgaggacatattaaccatgacaggaattcttggatgagcatgtctttcatctgattgggcaaaccattcacgtaaaccagctacactatttaacatttggcgggcgggcctacgtagctgagatgacaagtaacccacaccccatcccttcagatcaatctgcataagatgctggacttgggtcctgggcctcccatttcgaggttttaagggggaaatattaaatcctccactttcaatatgtgcccgaacacaccctggctgctcgtgc

SEQ ID NO: 3166 - DNA, 1745 bp, Glycine max
tcagctacgtaggcccccccccccccgttttgctaaaccctctgctctgcggcttatttggtcacgaaatagggttttgcttgcaactaagatcgataagaggacgaagcggggaaagctaccgttgcgtgcggccacaatgggagggtcgcgagttcaagtcaacaaacctcacaagtcccgtttttcatccaaatcttctcgcaaccttcataaaacctctgtcaaggacagactcgcaatcgcaaaatcagagcgcaatgtcggcaaaggagctcgtgcagctcgaattcagagaaataaaatgatacgtgatcagaaaagagctgctgttttgaaagaaaaacgagaactcagtgggtcgagaagtcctcctcgagtgatagttctcttcgccctctgtgcgtctgtggatttagaatcacttgctgatgatctcttgtcattattatctaaagatacgtgtgtggtgctgtcaggaaccgttgcttcttctgaatataggacaagaataacggtactaaaagcaccccatggcgatctactatcatgcatgtaaatggccaaggttgctgatctaatggtttttgtggcctcggcaaggtcttcatgtgaagaaactgattcctactacattgactcatttggaaatcaatgcctttctgtatttagatctcttggtttaccaagcactgctgtgtttattcgtgatctatctactgatcttaaacaaagaaatgaactaaagaagatgtgcacatctagtcttgcctcggaatttcctgaggattgtaaattttatccagctgatacaaaggatgagctacacaagttcttgtggctctttaaagagcaaaggcttaaagttcctcattggagaactcaacgatcatacctcttgtctcaaaaggttgatgcagaatatgatggcaactctgaaaaatgcaccctgtttctcactggttaccttcgttctcgtaacctctcagtcaatcaactggtgcaggagatttccaattgtctaaaattgaagttcttaaagatccttgtcctttgaattcaaggaaaaatcaggatctaatggatgctgatgaaatgcatgatgcagaggtcattggttctctagctcctgatcctcaaaaccaggaagccttagtggttgagaatatacctgatcctcttgctggagagcagacatggccaacagaggctgaaattgctaaggctgatgaagataaaaagaaaaagaagataaaaaagaggagtcttcctcatggcacttcagaatatcaggctgcttggattgtggacgattctgatgaggaggagtcggattgtgacaatgaaaacgatgatggtatggtgttggatgaaggggaggatggatttcctggtcaagaaaacaggtattcagactttgatggtgatggggcttctcttagattgggagattctgatgaagaaactgacattgattcagtgatgatggaagtagataatttgacgagagaaaagatagaagatgaactcaaggaacttaaagaagcacatgctgcagatgaggagtttcctgatgaagtggatacaccattggatgttcctgctaggaagcggtttgcaaaatacaggggactcaagtcctttaggacttcttcatgggatcctaaagtatgtgtcttttgaagaatctttatagtaaatatcgttgtctctaacccccacccccgaaaaaaaaaaaaaaaaaa

SEQ ID NO: 3167 - DNA, 966 bp, Glycine max
ttcctttggttttactttatctttcttccaggaaagtgatgagaatatatacctttttttgcgttttataattttcttttcctttgttctcctttttttctcctcttctgccctccacacaacttctctctcctctctctctctctacaaatccttctttcttctcttcgctgctcactgtagcgtagccatggctttcagagttggaggagcgggaggaggaaatgcctcttctggcatgggtgttgctgagcatagcgtaagcacgttcctggaattgcagaggaagaaagttcatcgctatgtgatttttaaaattgacgagaaaaagaaagaggttgttgttgaaaaaactggaggccctgctgagagctatgatgatttcactgcatccttgcctgaaaatgattgccgatatgctatctttgactttgattttgtgacatctgagaactgccaaaagagcaaaatcttttttattgcatggtctccttcggtagcccgcattcgccctaagatgctatatgcaacatccaaggacaggttcagaagggagctgcagggcatccattatgagattcaggcaacagacccaaccgagatggatcttgaagtcctcagagagcgtgcaaactgagcacctacacaagagggttgtgtctaggtgatgtagttaagatatctgaggcctcagggaatgatgttgactgataccctttagttgttctactatgatctctgtctgtttcgcgacatatttctcataaatagctgacttatcattttatcaagtaaataacctgcacctgtgaaggctgattaggggttcctgcctaagaaaccccactgcaggggaatttatgcttttccttattgccatgatggttctcgggtgcagatttatatagtaatggctattggaaattcgacttatattctatgaatttcaaatggacgcggctggtg

SEQ ID NO: 3168 - DNA, 1169 bp, Glycine max
attttctctttaccataaaaaatatttttaaccatttttctcctgccagtgttttctccttttcttctctccacacaatttctctctcctctctctctctacaaatccttctttctttcttctcttcgctgctcactgtagccatggctttcagagtaggaggagcgggagggggaaatgcctcttctggcatgggtgttgctgagcatagtgtaaacaccttcctggaattgcagaggaagaaagttcatcgctatgtgatttttaaaattgatgagaaaaagaaagaggttatcgttgaaaaaactggaggccctgctgagagctatgatgatttcactgcatccttgcctgaaaatgattgccgatacgctgtctttgactttgattttgtgacatctgagaactgccaaaagagcaaaatcttttttattgcatggtctccttcagtggcccgcattcgcccgaagatgctatatgcaacatccaaggacaggttcagaagggagctgcagggcatccattatgagattcaggcaacagacccaacagagatggatcttgaagtcctcagagaacgtgcaaactgagcagtcacctacacaagaggcttgtgtctaggtgatgtagttagaatatctgaggcctcagggaatgatgttgactgatgataccctttagtttttctactatgatccctgtctgtttcgacctatttctcgtaaattagctgacttgtcatttatcaagtaaataacctgcacctgtgaaggctgatcaggggttcctgcctaagaaaccccactgcaggggaatttatgcttttccttattgccatgatgcttctcaggtgcagattaatacagtaatcgctattggaaattcgacttatattatatgaatttcaaatagacgcaattggtgagtctgaaagctcgggactaggtcgcgcgcgctcgcgctccggaggggatggatgatagggagtgtggagggagatagtaagtagaaagaggggagggggcgcggatagcaatccgccgaggaagtggtatgagtggcacggaggagtatgaagttggaggagggaagaaagagggtggcagagtgaggagggagaaatacgtttgacgatgtatggatttaagaggacggacgatgcttgtcgg

SEQ ID NO: 3169 - DNA, 1421 bp, Glycine max
  misc_feature (13)..(13): n is a, c, g, or t
  misc_feature (1365)..(1365): n is a, c, g, or t
  misc_feature (1373)..(1373): n is a, c, g, or t
ggccgggccgggnatctgttgcgaggagaaaaacaatgagaaccccaaaactaaaccgcaacaaaacctaaaaccctctctcatttccaatcccctaaaccctaacctctcctcaatgggtagaaacgaagccgccatttccttcctcaccaacgtcgcccgcactgccttcggcctgggcgcagcggccaccgccgtctcctcttccctctacaccgtcgacggcggccagcgcgccgtcctcttcgaccgcttccgcggcatcctggactccaccgtcggcgaagggacccacttcctcatcccctgggtccagaaaccctacatcttcgacatccgcactcgtccccacaccttctcctccgtctccggtaccaaggacctccagatggttaacctaaccctccgcgtcctctcccgccccgacaccgagaagctccccaccatcgtccagaacctcggcctcgaatacgatgaaaaggtcctcccttccatcggcaacgaggtcctcaaggccgtcgtcgcgcagttcaacgccgatcagctgctcacggagcggtcacaggtctccgccctcgtccgtgacagcctcattcgtcgcgccaaagacttcaacatcgttctcgatgacgtcgcgattactcacctctcctacggcggggaattctcccgcgcagtggagcagaagcaggtggcgcagcaggaggcggagagatcgaagtttgtggtgatgaaggccgagcaggagcggagggccgccattattagggctgagggtgagagcgatgcggccaagctgatctcggacgccactgcctcggccgggatggggctgatcgagctaaggaggattgaggcgtccagggaggtggcggccacgctggcgaagtcgcccaacgtctcgtatttgcccggtggacagaacttgctcatggctctcggtccttcgcggtgatcattgtggcggtgatgggctcaacgatgctgtgtgatgacatgcttggatcatctttgtctttagtttttccgttgttggaaatatttttcttgtgttttcacttgtagactctctcatttgagcatagttcataatgattttaggaaggtaataagttagaaatgaatttggaccttcgttttttcatggtgaaagggtctgtttagttgcagagtaaaaactatctccaaagtatataaggtgagagaggaacttgaatacttgattgtgtggttaatgttggttctttgaccttatcatcaatttaccgaagtatttcaatacagtcggtgccttcggttcaattttatttggtcaatttggctttttttgcttggaaatcagataaacttgttttggttgtgaancaggcaangtaactgtatatgtccattgagccccccaaaaaattgaaaaacattct

SEQ ID NO: 3170 - DNA, 735 bp, Glycine max
aaaaattagagacgcaaataagaagcccacgttgatgagtgagtagatggttatggtagcaacttttccttttccatttcccttttaatcggaagaagagccacgctgaggcctaagatctccgaattccaagcgcctcttgatagggtctcccaccctaaccaagccagatcccgttttcaattccttctcagtttccttttctctgaaaaaacatgttgagggttgcagctagaaggctctcttcttctctctcatcttcttctccgttgcggcccaatcacgccgcttccgcttttctctctcgaaacgacgtcgtcgtcgatgaccgcagatctgctccttcctcccatccccttcttcccttcagaggttatgctactgaatccctgatccacacaaaagaaaacagcattactcctgagattccgccaactgttactgctgttaagaaccctacttctaagattgtctatgatgatcacaaccatgaaagatttcccccaggtgacccaagcaagagggcatttgcctacttcgtacttacaggtggtaggtttgcttatgcctctgtggtccgtctccttgtcctcaagtttgtgctaagcatgtctctgccaagaaaagggaggttccttgccttcggccttcaactaggagggtcgaccctccccccaccatttgggcgcctgggaagctaacagtggaaatggttaaaaatggccatgggtccaa

SEQ ID NO: 3171 - DNA, 1062 bp, Glycine max
cggccttacggccccgaaacattcaagtgaactaacgcaaaaaatggcttctagttcagaatctcaatctcagtctaaaccgctccaagaccgagttgcaatcgtcaccggctcgtcccgcggaatcggccgagaaatcgcgcttcacctcgcctcactcggcgcgcgactcgtcgtcaactacacctccaactcggcccaagccgactcagtcgcggcgcagatcaacgccggttccgccaccacgacaccgcgcgccgtcgtggtccaagccgacgtgtccgatccggctcaggtgaagtcgctcttcgactcggccgagcgcgccttcgactcgccgatccacatccttgtcaactcggcgggcgtgatcgacggcacgtatccctccgtcgccgacaccaccgtggagtccttcgaccgcactttcgcggtgaacgcgcgtggcgccttcgcgtgcgccagggaggccgcgaaccgcctcaagcgcggcggcggagggcggatcattctactgacgacatcgcaggtggtggcgctgaggccggggtacggggcgtacgcggcgtcgaaggcggcggtggaggcaatggtgaagatcctggcgaaggaactgaaagggacgcagataacggcgaattgcgttgcgccgggaccgattgcgacggagatgttcttcgagggtaagacggaggaggtggtgaatcggatcgtgcaagagagtcccttggggaggctcggtgagaccaaagacgtggcacccgttgtgggattcttggccactgatgcttctgaatgggtcaacggtcaaattgttcgtgtcaacggtggctatatttagtgatgattttttttaaaataataacaataataataattagtgtattttctttcactttgtcactacttggcatgaaataaatcaccttccgagaaaaatacttaatttatgtgcgatcataatcgtggcaaaaattagttatcgcattcaatgcaaccttgtatcaatacctgagaataaagaagaagaaaggggatgtgtgttgaaaaaaaaaaaaaaaa

SEQ ID NO: 3172 - DNA, 1586 bp, Glycine max
actagcaatttaatggccctaaggcccttccatttcaactccttctcgcgcgatagattgctctttctcctctgctcctccctttcccattcctcctttccctctcccctccgctcccccaatttcccccaaactttctccctccgccgcttcgccgccgcccctctcgctcgccctccgccgccgcctccgcccctggacgccatggcccagaaaatcggaaagtccacgcgccgccccggctcgtcctccaaggcccgcgtctacgccgatgtcaacgtcgttcgccccaaggaatattgggactacgagtccctcaacgtccagtggggggagcaagatgattatgaggtggtgaggaaggtgggtagggggaaatacagtgaggtgttcgaaggtgttcactgcacggacggtgagaaatgtgtcattaagatcctgaaacccgtgaagaagaagaagatcaagagggaaatcaaaatattacagaatctttgtggagggcctaatattgtacagttgcttgacattgttagagaccaacagtcgaagaccccaagtcttatatttgaatatgtcaataacactgattttaaagtgctctatcctacattgtcagactacgaaatacgatattatatttatgaacttctgaaggcactggattattgccattcacaaggaatcatgcatcgtgatgtgaaaccacataatgtaatgattgatcatgagcagcgtaagcttcgccttatagattgggggcttgcagagttctatcatcctgggaaagaatataatgttcgcgtggcatcaagatatttcaaaggtcctgagcttcttgttgatcttcaagactatgattactctctagatttatggagtcttggttgtatgtttgctgggatgatattccgtaaggagccattcttttatggacatgataactatgatcaactggtcaaaatagctaaggtacttgggacagacggattaagtgcatatttagataagtatcgaatagagttggacccacatcttgcagcacttatcgggaggcatagccgcaagccatgggcaaagttcattaatgtagaaaatcatcacatggctgttcctgaggctgttgactttgttgacaagttattacgctatgatcaccaagaacgtcccacagcaaaagaagccatggcccatccatacttcaatccagttagaaatgcagaaagtagtagaactcgtgcacattgagttgctggtgcttgttgtgatatggtgttcgttcttgtcagggggccttcaacagtctgaactgttatttctagtggaacttgcttttagtagattcccctgttctgttgtgaaactcatttcaattagttctttatctaatcgttttgtttctggtttttaaaattatttttgggtggaaaattcagctctcaacaattttatttgattgtgtgccaaaatttggaaatgaaatgttgattcaatttcagtaaaattatacgcttgtgttcttttatgtaatactgttaaatcaaaaaaaaaaaaaaaaaaaaaaaaaaaactcgagactagttctc

SEQ ID NO: 3173 - DNA, 1774 bp, Glycine max
cgaaagcctccatcaacaaagtgatcaaagttcctcttttgagtcttcgtgcttccttccacgatccttctcatcaaacccctcatcatagaaatttggaaaaagggttctgaaatcttagctactgagtgcgtaatcactgagatctgccttcatcctgggttggttttgttgatgggtgcttgctggagtaataggattaagtctgtgagtccttccaatacagggatcacttctagaagtgtcagcaggagtggccatgacgtcagctcaaatagcaggagctcatcagcctccatatccgtcgcttctcggagtgagggtgagatcttgcaatcttccaacttgaaaagcttcagctataatgagctaagagcagccacaagaaatttccgcccggatagcgtcttgggggagggtgggtttggttcagtttttaagggctggattgatgagcattcacttgctgctaccaaaccaggaataggcaagattgttgctgttaagaagcttaaccaagatgggctccagggtcacagagagtggttggctgaaataaactatcttggccaactacagcatcctaaccttgtcaagttaataggatactgctttgaggatgaacatcggcttctggtttatgaatttatgcctaagggtagcatggaaaatcatctattcagaagaggttcttactttcagccattctcttggagtttgcgaatgaaaatagcactaggggctgcaaagggtcttgcttttcttcatagtacagaacataaagtcatataccgtgactttaaaacgtcaaatatcctactcgatacaaactataatgccaaactttctgattttgggttggccagagatggtcctactggtgataaaagccatgtctctactagggtcatgggaacccgtggatatgcggcaccagagtatttagcgacaggtcatctcactaccaagagtgatgtgtatagttttggagtagttcttttggaaatgatatcgggaagacgagctatagacaagaatcagccaactggagaacataaccttgttgattgggccaagccttacctatctaataaacgaagagttttccgtgtgatagatccccgtctcgaaggtcaatatttacagagtcgagctcaagccgcagctgcgcttgctattcaatgtctctccatagaggctaggtgcaggccgaatatggatgaggtggtaaaagcgttagagcagcttcaggaatcaaagaacatgcagagaaaaggcgctgatcataaacagcatcatgtacgcaattccggtcctggccgttccaacggtggcaatggtggttcagatgtccctagaaaggcttctgcttatcctagaccttctgcttctctcctccgcggttgagagaattttgtgacgcagcaagtggtaaagcagataacaaacgattcagaggtttaggtggggctggcatgaaccatgtttatgtaagcagtgtatagtttgctttatttccatgttacattttgtgctatatataatttttttttcgtgttgtggtcctgattgttagacattcaagagtctaatgtgggtccttaaggtgttcattaattttgaaccctgtaaacaactgcaacactacccatgtggttgatgctctacatttttatcttttgctttttaatatgtaagaaagtcttcatcatgttgactatttgacttttcccaaccactaaaccctgttgactctgctttttccacttaaaaa

SEQ ID NO: 3174 - DNA, 1314 bp, Glycine max
  misc_feature (1296)..(1298): n is a, c, g, or t
aaacacatggcatgtgaatggccggctccttagccattaagaatggtgcaagcttccaagcaatttcgtagttgaccaagacttgggagttatggagaaatgagataagcaacctatcggcgccgctgcccccccccccgattcttgtctgaataataaaaagaaaaaaggttcatagttgatatctccagcggaacgatgaagtttgaagatttggcagaaggatgcatggcaaaaatactgtcctacaccactcgtgcggatgtatgcaggctttctctggtttccaaagcctttcattccgcggctgaagccaacactgtgtgggattgctttctcccctctgatttgtcctctatcatctccccttcttcttccgttcctccctttcgctctattaaggatctctatctctatctctccgatcgtcccaccatcatcgatcaaggtataaagagttttcaattggagaagcggactgggaacaagtgttacatgctttccgctagagatctgagcattatatggggtgacactactcattattgggagtggacaaccctaccagagtccaggttcgaagaagttgctaggcttcgagctgtgtgttggtttgacattactgggaggatgaacacccgcgttttgtcgccaaatactaattatgcagcttttcttgtgttcaagatgatcgatgccggtggatttcactacgatcctgcggtgttatcagtaggtattttgggaggcaatagcagtaccaaaaatgtttgtttggatcccaacttagtagataatcgacttgatgatagattccatggactccaacgtccaactgtgaggagcgatgggtggctggagattgagatgggtgagttcttcaatccaggcctagaagaagatgagttgcagattaaagtctcggagacaacaagtaattggtggaagcgcggtttcattcttgaaggaatagaagttaggcctaaacatgtttgatccatcaaattaatatacttaacttaggcctatcaaagatatgtatggaatggaagggtgatctttgccaagaatggagggagaaaccggaaacatttgttcttttcttttgttttatttttcttcttttttcattgatcatttctattttgtttttgcatttaggtataatgaactgattgcttgtattgtttcctcattaaatgtggggtttgagtagtttatatttcagtttttttaaaaaaaaaaaaaaaaaaaaaaaaaaaaaaaaaaaaaaaaaaaaaaaaaaaaaaaaaaaannnaaaaaaaaaaaaaaaa

SEQ ID NO: 3175 - DNA, 1960 bp, Glycine max
  misc_feature (1864)..(1864): n is a, c, g, or t
ttatggtccaggtaatgaaatacacatcataatcacgatatatccaagagcattgttgtttaacaaaacaaaacaaaaaaggacaatgtcattatgatacattcattttttttttaacatgaacattatacatatatcaacaccccattcggtctaacttaatcaattaaacataaaatatataaatttttatttattttcgattctcacataaaataaatctattatagaagatttagatttgaataatgttccattacataaagagattaacagtcctactagatccaagcttaaagctaatcaaatctcttcgagcacaggcacatcctcctcatctggcgcatccaacacccactccccatcctccctcttcaccatccccttattcttctccacccaccacgaccctggcacgccatattcctccttcagaaactcacaagacttattcaccaacgccacactcctcttcaccctcatctcaaactcctccttcttcccattccaccccgccaccacatgcaacatcgcttgcaagttatgccaatcacccgggttcctcgagtccttcaagctcggcgacttcctcgtgtctatcaccagctccgtgcccatgtactcataccctaacaacttccccgggtagtgtgggatcaaatcgatcacgttcttcacgtgcaaaactttcaagttcggaaacatgttgaacctctcgttgaaggccttgtttccgacctggggggacccgaacacgatggcggtgaccgggacctccgttaccccgttttcgaccaggtcgaaggcgctcacgatggatagggttgcgccgaggctgtgccccacgatgaccaagctggggttctcagagctgtaatgttgtaagagggatttgacgtgggcttgaagctgcgttcttgcgctggatttggtaaagggggattttgggttgtcagacgtgtagattgtgagccaacccgacatcaccttcggttttctcgggtcgtcttcctcgtcactgctgctgctactaccgtctttgtttccatccttcagctctttgaggctcttagcactgagcaacccggaagcatccacctgcccagccccaaagacgttgatccactccatgtccctggtggtccctctccacaccacgtagatctccctcctcccgagttcttgggatcgcgagtctgatgtgacggcgatatagccaatccagttggactcgcggtcccaggcctcgcgcgagagcgagtggaggaggaaggcctcggggacggtgacccttgcggtggcatagaggaacgccgcgacgtcataattctcggggcagtccagcatgaccttgcggaagaaggaggccttgccgtagcggctggcgccgcagtagagcgagttcttgtcgttgttgaaggcgtcgtaggtggcttggatgaggtccccgcaccggaggatcagggagcggagagaggggtggagagggtctagtaggcccgcccagttgtcgcggcccaggagctcggcccacgtgggctccgtgacgtctgtggcggccattggaagaagaagaagggagtttgtgactgtgtgtgcgtggtgggatgaggaattgagagagatatatgagaatgagataatcggctcgagctcgggccggtttatgaaagggttgtcatggatatggatgtggttgacccaccattcatggagtatattgtctgtatagctacatggctgttctcgattttcacatgtgccctttctctatccatcctcttcgattataagattaagattttatttagattctaatttaaagggttaggttaatcataatgtcttaaaattaaaatttgtntttagaaaaaaaaaatcgggattaaaaggaatgattttaccatcgggtttttaaatagatattacctcgtgaataaagtttaaattattttggttt

SEQ ID NO: 3176 - DNA, 1204 bp, Glycine max
agcctcagcgtcagcgagattgattcaaggcacaggcatcgtgcattattggtgcttacgatgctgtgtctgagaacgccgttttgtctgagtttctctgccaccaaacacctccgtcaaatacaggcgcggccgtccagatcttgcatcaagatggcgtcaactaaaacggtggagcacattgtcctgttcaaggtgaaggaggaaacggagccgtcaaaggtgagtgacatggtgaacggactcggctctctggtgtcgctggacccggttctccacctcagcgtgggcccactcctccgcaaccgatcctccgccctaaccttcactcacatgctccacagccgctacaagtccaaggaggatctcgaagcgtactcagcacaccctagccacgtcagcgtcgtcaagggatacgtgctccccatcatcgacgacatcatgtccgtcgattgggtcgccgatgacctcgccaccgccagtctcgttccgccgccggggtccgcggttcgagtcagcttcttgaaattgaaggaggacgcggataaggacacggtgttgggcgtggtgagaggaattccagagagttttaagcagattagtgagttcagtcttggggagaatttttcgccggggagagccaagggtttctcgattgcttcgctcgcggttttcccggggccgagggagttagaggcagtggattcgaacgaggagttggtgaattaccagaaggataaggttagggatcaaatcgagagtgtggtcgtggttgattatgtggtgccagcgcctcctcctgctcagagtgcgagcctttgatggggttattgctacgctatgctttcttcttcttcttttgataagcttaattgttattattagtttattttgttagcaggatggatgaaaccccttttcttcttcttaactacccaaccaatcttatatctccctggcctatgctttgtatatgtaaactgtttcgttatctatgcaagcacggacacctcagctccttgccgtatctcgtgcgtccgtgttagtgtccgacaccctatacgccatctatactacgttctatattttggacattacaagtgtccccgtgtctctgtgtcgtgtccggtgttcgtgtcggtgtccatgcttcatagtttgttatgcgattttcccagaataatgtctcttgagtgttgctatg

SEQ ID NO: 3177 - DNA, 1324 bp, Glycine max
tagagaaagaaaaaaaaaagaaggaaaccagattagagtagtagtttgtgttgcgattgacgacgacgataacgacaacgacgaagcatcatgtcttccggcggcggcggaggcggagcaaagccgttcttctgccacgtgtgcagtcagaggatcacgtgctccgatgagtcggaacccttctgcccgatctgtatggaaagtttcgtagaagaatgcaaccctaacaaccctaaccctaatcttttcaccgagaatgaggaatcttctgattccgaaatctccttctccctgctccctctctttctctcctccgtatccaggtcccgacccgaacccgacatgttcgacccgatggttttcctccaaaaccacattcagggccttcgcgccgacggcgccaacatccaagttgactttggccacccttccgagcagcaagggtttcgcctccctgcgaacatcggcgactacttcatgggccccggccttgagcagttcattcagcagctcgccgacaatgatcccaaccgctacggcacgcctcctgccgccaaggacgccgtcgagaatctccccaccatcaccgtcgacgacgagttgttgaactccgagctgaaccagtgcgcggtctgccaggacgagttcgagaagggctctctggtgacgcagatgccctgcaagcacgcgtaccacggcgactgcttgattccgtggcttcgactgcataactcatgtcctgtgtgccggtatgaattgcccaccgacgacgcggattacgagaatgaggttcgcgggaatggcggtgacggcgggtcgaggactggtgggagcggcgacggtggtggtggaagcggcggtggaggcggaggggggagtaatagacctgttcgcaggactgttagaatatatttgcggcatcctgatgctgctgactccgcgcaggacagtgctgaaaggggatgggagtggggaagttgggattgaaatttatgttttgttgttgtaaaactggaaactatcttgtgcagctcagagtttccgtgaatagattggtagcattgccatgtttacaatagtccttgtgaggaatgtaagagatgttatttcccgtgacaaggaactttgttcgatcaaaagtcctttcttttttatgtagtagatagctggaacatgggattgcatgaaaacacccaactattgagattttaggtgctgttattgagcgttgataagaaacttctcgttacttttgtacagatcatcttccaaacatccaatattgattataatcctttatgaaatatcaaaaaaaaaaaaaaaa

SEQ ID NO: 3178 - DNA, 1406 bp, Glycine max
tttgttctcagctacccaaacaatcgagtcagctacgtaggccccccccccatttcaggcaactcctatctatatcgatgtagatgatgggagaaaaaaggtcacaaatgaaggattgcagcagggctatgttgttgttccctgtgctaaacgttttgttgttctctattcattcttgaggagataccaatcaaaaaaagtgatggtctttttctcttcatgcaactctgtcaaattccatgcagatcttctcaagtgcactgggttggactgtttaaatattcatggaaaacaaaagcaacatgccaggactactacgttcttcaacttctgcaaagcagaaaaggggatcttgctctgtactgatgttgctgctcgtggacttgacatacctgatgtggactggattgtgcagtatgatcctcctgatgaaccaaaggaatatatccacagggttggtagaacagctcgtggggaaggtggaaaaggaaatgctttacttttcctgattcctgaagaattgcaatttcttcactatttgaaggcagcaaaggttcccgtgaaagaatatgcgtttgatcataagaagcttgcaaatgtacaatctcaactggagaagttggtggctggcatttatcatttgaatgttatggctaaagatgcatataggtcatatatattagcatataattcacactccatgaaagatatattcaatgttcaccgccttgatttacaggctgttgctgcttcattctgtttttctaacccaccgaaggtgaatctgaacatagatagcagtgcttcaaagcataggaagaaaatacgcaaagtagaaggaaagagaagatgataaaaggcattttctcacggccgtgcagtggtgtgatccccacattctcccacccacaccacaccaccccataaagttttggtaggcaccccaattttatataaagagatggatttgtaactttatcaaacaaccttggttattagaagcatcagaaaatttaaattagaatgtgttatgcgcatttttgaaccgtaatattccacatgacgaccggtgtcccatcccatgttcgaatttgtaagcttattcttttgttgttgaaaattatatcatgaattttcaagcacttgtgaaaagcaatagtaacactgaactgagctacctacattgaacctttttccgttaatatgttaaggttcaggttccaaagatctgaaattgagcttattagaacgaagcttaaaaagatactcagtagacatgcaagaactaggtaaaaaccttgcaatgtgttgcctacacttttgtttgtatccttgggttctatccctggttagacctttaaacaaatacaaaattcatcttttgagttaaaaaaaaaaaaaaaaaa

SEQ ID NO: 3179 - DNA, 1544 bp, Glycine max
tcagctacgtaggccccccccctctagtttattcacattaaatggaaaattgaattccacctccttcatttcttctcctcttaattaatcccttttgaaccctttatagttgccttcattaagattttgatgcattgatagcatcaaaatatggtggccacaagcacaaatgagttggaggcaggaactgtttctaggtatgacaggaaaagtgaaatcaaggtattcgatgaatcaaaaactggggtccaaggactggtagaaaatggtgtgacaaaggttccacggatgttctattgtgaacactctaatctcagtgatggattaaccacagaatcaaattcaaacttcactatcccctccatagacctcactggcatcaatgatgaccctattttgagagatgctgttgtgggaaaagttagatatgcatgtgaaaagtggggcttctttcaggttacaaaccatggaattccaactcaagttttggatgagatgatcaaaggaactggcaggtttcatgaacaagatgccaaggtgaggaaagagtactacacccgtgatatgagcaggaaagttatttatctttccaactttagtctttatcaagatccatctgctgattggagggatacacttgcatttttttgggcgcctaattcacccaatgatgaagaattgcctgcagtttgtagagatattgtgcctgagtactcaacaaaagtaatggcacttgcttctactttgtttgagttactgtcagaggctcttggccttgatcgctttcaccttaaagaaatgggttgtgatgaagggcttcttcatctgtgtcactattacccagcatgccctgagccagaattaactatgggcactagcaggcacacagacggtaacttcatgacaatacttttgcaagaccaaatgggtggccttcaaattcttcatgaaaatcaatggattgatgtgcctgcagcacatggagctcttgtagtgaacattggagatcttctgcagctagtgactaatgaaaaattcatcagtgttcaacatagagttctagcaaaccatcaaggcccaagaacatcaattgcatccttttttagaattggtgatcagtcaccagagggactctcaagagtctttggtcccatcaaggaactgttatctgaacacaatccaccagtgtacagagaaacttctttaaaagactacttggcacatcaatacgcaaagagcatcggagcttcttcactgtcattattcaagttgtgattatgataaattgcatgcaacacttgatgttttcagaacaagttgtggtttatctcattttgctaaaatttggtacatggctatgtggcttcaagaactgaaaactatggcatattgtattctttgaaaaatgtatccgtttagactagagaaaaataattatgcgccttgggttctcaaatatcaacataaaacttgagagaagctttatagcatgtatttagataatcttgaaggtatgaattaaatagaagaatttattctacagt

SEQ ID NO: 3180 - DNA, 1118 bp, Glycine max
cctcgtgccgaattcggcacgagggttctatgttcctcagtttttaaaataccacccggccggccgcctgcgaccagaccacacaaggatgcctccaatctattcactgtctaggaaaactccaatgaaaacattcttcattctctgttccatatactcactcttcaatccttgtgttttgaacacttcatacttacttccattgctatgatttggtgcatagaaagcctctaaatatggcagccacaagcacggataagttggaggcaggaacagtttcaagttatgacaggaaaagtgaaatcaaggcatttgatgattcaaagactggtgtccaaggactggtagaaaatggtgtaacaaaagttccacttatgttctatagtgaaaactctaatctcaatgatggcgtaaccggtgcatcatattcaaagatcagcatccccataattgacctcacaggcatccatgatgatcctattttgagagatcatgttgtgggaaaagttagatatgcatgtgagaagtggggcttctttcaggttataaatcatggaattccaactcatgttttggatgagatgatcaaaggaacttgcaggtttcaccaacaagatgcaaaggtgaggaaagagtactacactcgcgaagtaagccgaaaagttgcttatctttccaattatactctttttgaagacccttctgctgattggagggatacacttgcattttccttggcacctcatccacccgaagctgaagaatttcctgcagtttgtagagatattgtgaatgaatactcaaagaaaataatggctcttgcttatgctttgtttgagttactgtcagaggctcttggccttaatcgcttttaccttaaagaaatggattgtgctgaagggcaacttcttctctgtcactattacccagcatgtcctgagcctgaataacaatgggacataccaagcactcagatggtaacaccataacaatacttttgcaagaccagattggtggccttcaagttcttcatgacagtcaatggattgatgtacctcccatgcatggggctctagtagtgaacattggggatattatgcagctcatgactaatgaca

SEQ ID NO: 3181 - DNA, 1331 bp, Glycine max
ttgtttcaggtttgtgctttcgcccctgctgtgctggattcaattgtcacatttggattcgattgtttcaacccctttcagcctctaaatatggcagccacaagcacagataagttggaggcaggaaaagtgaaatcaaggcatttgatgattcaaagactggtgtccaaggactggtagaaaatggtgtaacaaaagttccacttatgttctattgtgaaaactctaatctcaatgatggtgtaaccaatgcatcaaattcaaagatcagcatccccataattgacctcacaggcatccatgatgatcctattttgagagatcatgttgtgggaaaagttagatatgcatgtgagaagtggggcttctttcaggttataaatcatggaattccaactcaggttttggatgagatgatcaaaggaacttgcaggtttcaccaacaagatgcaaaggtgaggaaagagtactacactcgcaaagtaagccgaaaagttgcttatctttccaaattatactctttttgaagacccttctgctgattggagggatacacttgcattttccttggcacctcatccacccgaagctgaagaatttcctgcagtttgtaggtttgtgataatagtaatactacttttattattgtcagcacttgcacatgttaggacttaataatggtggataactaatttcttgggacagtatctaatttgtggtgagatgatatcattacattgaaatttttgttaagggaacatagtatatctgtttctatttttctaaaatatcttccacaactgaaattttttattatgttggagagtctcgcatcatctacttcaatacttcagatgcaacttatatactggatttgttggatttgatcatttggaaaaatcaatatgacctttgttcaactactaccttcattcaatcatcttcagatgattctgttttgactttggtttggtagttgtaaacttttggctcactttcattgcacatgttgcttcaaaatgcttgaaaaggaagatcttaagcccccgttgggaacatattttgagtttcagactgaaagttttgaagaatggttcccatttcattgttaaaaaaatttgacacttcattcccaacttttcccgtgcattcttttgtagtaacattaacactttcattgcatgtttctttaattatttgtccctatgtattttgcttcagtcctatgagggaatagcttggagggctaagaggaaatgcaggaaaacttattctcccaagatcagatttagtttaataatatttcaactgttttatatttgtatatctag

SEQ ID NO: 3182 - DNA, 1960 bp, Glycine max
aaaatgaatctgagataaataaaaaggcatgataatggtataatccatagatagcagataaggcataagggaagaagaggttttcgtttggttaagcaagatggatttggaagcagagaaagagcatgaagctgcatttgcagtggcctcactctccctctctctccccaccattttccccttcgtccaacccaagaatatcccatcaaccacccttcaaccaaccaagctcaaagtcccaacccaagcctcatccctcacacacctttctctctccaccaccactcctcctccttccaaaacctccttcaaatccaccgtctccgccaaccccctccacgcccctctctccctcgctccccaccgcccccgcgacccttccaacgccgccgccctccgccgcgccgccgtcgtctggttccgcaacgacctccgcctcctcgacaatgagtgcctcaccgccgccaacaacgactccctctccgtcctccccgtctactgcttcgacccctccgactacggcaagtcggcatccggcttcgacaagaccggcccctaccgcgccgccttcctcatcgactccgtctccgacctccgccgcagcctccaggcgcgcggctccgatctcgtcgtgcgcgtcgggaagcccgagacggtgctggtggagctcgccaaggccgtcggtgccgacgccgtgtacgcccaccgcgaggtctctcacgacgaggcgaaggcggaggagaaggtggaggcggcgatgaaggaggagaatgtggaggtgaagtacttctggggaagcacgttgtatcacgtggacgatttgccttttcaattggaggacatgccttccaattacggagggtttagggatagggttcagaaattggaggtaaggaagacaattgaagctttagatcatcttaagggaatgccttctcgcggtgattttgagcttggggagattccttccttaatggaccttggccttaatccatctgcaacaatgtcacaggttttgtattttaaccaccttttcctccttcccaaccaaccttatatctccgctttttatctgtaacttgttgtgtctttgtttctatgcttgagcttggggagatcccctccttaatggaccttggccttaatccatctgcaacaatgtcacaggatgggaagtttggtgccaatgcttctatgataggaggggagactgaggcactgcagaggctcaaaaaatttgcagctgagtgtgcagctcagccaaacaaggggtttaaggatgggacacagagtatatatggtgccaacttctcctgcaagatttctccgtggttggcaatgggatgcctctcccctcgcacgatgtatgaagaactaaagaagactaccagcagagccatttctgcttcggcggacaagaacgatggtggtaatggctcgtccagaaacggtacaaattggttgatgtttgagttgctatggagggacttctttaggtttataacaaaaaaatacagttctgcaaagaaacagctggaagctgctccggtcactgcatgtgctggagcatatgcttaagctggaagttctagtgggcattaaagagtttgtttcagggtgtgggttggttccctacgcagacatggcagtagggtgctcgatgaacaagatttggttccccttctgaagttctgttgtaactgacagatacattatatttcaatatggaagctttacattattttctcgaaggcaagtgttggtattcttagagtaacatttcgtctgcatcgggcatcttttgagtagatctttgagtccaaaattcatgtctttgtctctcccccagtaactcgatattgtgggtgaaatttgaaaattaaaaatggatgtaattactacggcatctatatttttaataataccaggatgaattctctgggttaattccgttatgatt

SEQ ID NO: 3183 - DNA, 1643 bp, Glycine max
acattgtaacagccaaaggcaggtggaatccaattctcaaaccccaatcgttagactaagcaagaggtcgttcagtgtaagtactccttgttcttgtttctgtttcatcatttttgatcttatgctagtcgaatcaattgtgatgcttagaattagtcaatgaagctccctgtgcgttacttgattgttattttgaccttcgtctgcacctcggtttgctacatcgaacgagttgggttttccatcgcgtacacagttgctgctgacggtgccggagtgaatcaatcgagcaaaggtacaatactgtccaccttctattacggatacgcctgttctcaagttcccggaggatgggcagctcagaaaatcggggggaggagggtcctgcttctttcctttctgttgtggtcattaacttgtgcactacttcctctagatcccaatcgcgttatgcttttagtcattgctcgtttgctcgttggtatagcacaaggcttcattttcccctccatccacacagttctagctcaatgggttccccctcacgagagatctagatccgtctctctcaccacttctgggatgtacctaggtgcagctctaggtatgcttcttcttcctactctagtcaagttcagaggtcctcaatctgtgtttcttgcggaggccgcattgggcgcttcatggtctttactttggttcaaatacgccactgatcccaaatccactgcctctggtgtcggggaatcagtcttgcccgtcaataaaaaaattgacactcacaacaaaaaaccgctttcagccaaaatcccctgggtcaaaattttaaccagcttccctgtgtgggcgattgttgtcaacaatttcacctttcactatgctttatatgtgctcatgaactggctcccaacctactttgaattgggccttcagcttagcctgcaagatatgggttcctctaaaatgatgccctatctcaacatgttcctcttctccaacattggcggtgttgtcgcggactacttgatcaccaggagaatattatctgtcaccaaaaccaggaaattcttgaacactgtcggattcttggttgcttctcttgccttggtgatcattcccagtttcagaacttctggtggtgctgtcttctgttcttccgtggctcttggtttcttggcacttggcagagctggctttgccgtgaaccacatggacattgctcctagatacgctggaatagtgatgggtgtttctaatactgccggtacgttagctggcattgttggcgttgacctgactgggaagcttcttgaagctgctaaggctgctaattctgatctttcaagtccagaaagctggagggcagtgttttccattcctgggtttctatgcatttttagttcttttgtatttctactattttcaactggggagagaatttttgattgaggtaaccttgtcattttcatgactcatcagctgttgttattctgaggatttactttttattacatctccatgttatatcattcttggataggagagctcatattgtcataattggatatgaatttttgttgttattattattatttccccatcttgtaaaaaaaaaaaaaaaaaagcttatcgataccgtcgac

SEQ ID NO: 3184 - DNA, 1281 bp, Glycine max
ccctcgcgtccgtacggctgcgagaaatttttcttccttcattgcgtcgttgtttgttgtttcccttcatctattttttcttcgcccccttttgtgtttctttttttggttgtttgttctttcttctcgttcgtcgctttgtgatctctctctgcaaccatgtccgccgagaaagagagagagacccaggtttacttggccaagcttgccgagcaggccgagagatacgaagaaatggttgagtgtatgaagaaagtagcaaaacttgatcttgatctaactgtggaagaaaggaacctcctctcagtgggatacaaaaatgtgattggtgcacgaagggcctcttggcgcatcatgtcctcaattgagcagaaggaagagtctaagggaaatgagcacaatgttaaactgatcaagagttactgccaaaaagttgaggaggaactctccaaaatttgtggggacattctgactattatagaccagcatttgattccttcttccgcatcagcagaagctagtgttttctactataagatgaaaggtgattattttcggtatcttgctgagttcaagactgaccaagaaaggaaagaggcagctgaacagtcactgaaaggatacgaggctgcttcagccactgcaaacacagatcttccatcaacacatccaatccgtcttggacttgcactcaatttctctgtcttttattatgagataatgaactctcctgaaagggcctgccatttggctaagcaagcttttgatgaggcaattgcggagttggacaccctgagtgaagagtcatacaaggacagcactttgatcatgcagctgttgagagacaacctgactctctggacctctgatttgcctgaggatggaggtgaggacagcataaaagctgaagaaaccaaaccttctgagcctgagcattgatgtgattcaatagtcagaaatctaaggtactctcaaagaggacattttctagcaatggatttggacccggacaatagggactgtggttggtggccatttcataattcttatgctctcttaatatctttaccaaagctagaagatctgcaccctttttttttccttcaaacttttttcttattaccttctctctgttttaagtaaaatggtcagttaagcaatgaacaatttacatttacccttataagcatcttcattccttcgttcattatgtttggatttattttgtctaagatgtttgtgtttcctatatactcctaaataggacccaaacccttcccc

SEQ ID NO: 3185 - DNA, 1232 bp, Glycine max
tcgagtcccccgcgtcggccctccttccttcattgcatcgttgttgttcccttcttttttctttctccgccccttttttgttgttccttcttctcgttcgtcgctttgtgatctctctctgcaaccatgtccgtcgagaaagagagagagacccaggtttacttggccaagcttgccgagcaggccgagagatacgaagaaatggttgagtgtatgaagaaagtagcaaaacttgatcttgatctgactgtggaagaaaggaaccttctctcagtgggatacaaaaatgtgattggtgcacgaagggcctcttggcgcataatgtcctcaattgagcagaaggaagagtctaagggaaatgagcacaatgttaaactgatcaagagttactgccaaaaagttgaggaggaactctccaaaatctgtggtgacattctgactattatagaccagcatttgattccttcttccggatcagcagaagctagcgttttctactacaagatgaaaggtgattattttcggtatcttgctgagttcaagactgaccaagaaaggaaagaggcagctgagcagtcactaaaaggatacgaggctgcttctgccactgcaaacacagatcttccatcaacacatccaatccgtcttggacttgcactcaatttctctgtcttttattatgagataatgaactctcctgaaagggcctgccatttggccaagcaagcttttgatgaggcaattgcggagttggacaccctgagtgaagagtcatacaaggacagcactttgatcatgcagctgttgagagacaaccttactctctggacttccgatttaccagaggatggaggtgaggacaacataaaagctgaagaagccaaaccttctgagcctgagcattgatgtgattcagtagtcagaaatctaaggtactccccaagagggcatttttcagcttttcttgcaatggatttggaccggacaatagggactgtggtggccatttcataattcttgttctctcttaatatctttaccaaagccagaagatctgcacccttttttttcccttaaaactttttatttttattgccttctctgttttaagtggtcagttaagcaatgaacaatttacatttacccttataagcatcttcttattccttcaaaaaaaaaaaatggctttattttgctcaaaaaaaaaaaaaaagaaaaaaaaaaaaaaaaaa

SEQ ID NO: 3186 - DNA, 1663 bp, Glycine max
agtgttatgctcaaactcttccactaggtattaatattttgatcatgcttaagcattcaaactccaattagatatggcttatatgtaatgaatatgatactctgttctgattctgaatgaagcagcgctataaggaagatgagtagtttctcgccagcgtttcccaagttcatatccgtagaaggcgcagacatacattccagaactaaacctgacggcttcagattcagtcttgtttcgtataacattttggctcaggcttatgtgaagagctcactgttcccacactctccttccccaagtctcaaatggaagcttcgttcagacactattttggcagttctcaagaacttgggagctgattttttctgcctacaggaagttgatgaatttgacagcttttacaaagggaacatgcaggacctaggatattcttctatttatatgaagagaagtgggcaaaagcgtgatgggtgtgggctgttttacaagcataaccgtgcagagttggtcttagaggagaaaattgaatacaatgatcttgtaaagtcagttcccgatgggaactcttcaaataatgatgaacacaccaatatccagacagttcagccagataaacaaaaggatgtgccccccaaaaatggatctaaatcgaattcaaaagatcgtggagatcccaatgatccttgtgtcagactaaagcgtgattgtgttggaattatggctgcattcaaactcaaagatcgctctcatcatattgttattgtggccaacacacatctttattgggatcctgagtgggctgatgtcaagcttgcacaagctaaatatcttctatcccgcttagcaaaatttaaaacactgatatcagataggtatgaatgcatacctgaagtcattttggccggtgacttcaattctatgccaggagatatggtttatcggtaccttgtatcagggaatccttcatcaaacctgatgccggactgtttagaggagtctcctattcccttatgtagtgtctatgcttctacaagaggagagccaccatttacaaactacacacctgacttcactggaacactcgactatatattattttccccttctgatcacattaaaccaattagttttcttgaacttccagactccgatgcagctgatattgttggtggactgccaaacttcatttatccaagtgatcatctaccaattggtgctgaatttgaaatcatcgaggaataaacgttcttgtatgccaggtgttattttgagtaatcagctttcatgttccacctcctctcccctttgtgatgattgaagcaaggttctggaagcaagtgcacaggcaattggcaagaaggacaacagttaccaaaaagcaaacatttagaagtttttgttgcaaatgtgcccataacagctgcaacttctttcctagtttttagaagtttaattttacatttcaaatattaggagatattaggagttctgattctgtttttaaatttaaaattatgcccttatgtctacaaataagggatgtataatttatgctctgtgctctttatttaaagctgctttaataaaataattgatacttctctgcaaaaaaaaaaaaaaaaaaattccttcggccgcgaattcttcctggtgccgaatt

SEQ ID NO: 3187 - DNA, 1989 bp, Glycine max
gatgacaaatttgcaatgcaacttcacatgtaacaagctaaccctctcaccatgcaaagagtatgacttagaaatgtccatatatcggctccgtcgccccccccccccccgggagcacatacaaccttgtgagttgtttatccacacacactcaaacatgggaacctatgtggaaaatttcgcaagtgaggaggaacatgtctttcgtagccaacactcacctgttcctgtccctgacaacgtgacattgccggaatttgtgctccaaaatgctgaattgtatgctgataaggttgcatttgtggatgctgtgaccggaaaaggggttacttttagtgaggtggtgacgggtgtacacaggttttctaaggccttaagaactcttggtctgaggaaagggcatgttgtgattgtagtgcttccaaatgtggtagagtatgccattgttgctttggggataatggctgctggtggggtgttctcaggtgcaaatccaacatcacatgtatcagaaattaagaaacaggcagagtctgctgatgccaaattgattgtcacaaatgtcacaaactatgaaaaggtaaaggctttggagctacctattattttgctaggagatgaagttgttgaaggtgccatgaattggaacaagttgcttgaagcagcagaccgtgcaggggatgatttgacaaaggagcctattcagcagaatgatctttgtgccatgccattctcatcaggcaccacaggaatgtcaaagggtgtgatgctcactcatagaaatctagtggccaatctttgctctacactctttggtgtgaccaaagaaatggagggtctggtcaccacactaggcttgattcccttctttcacatttatggcatcacaggaatatgttgtgccactcttaagagcaaagggaaagttgtggtgatgggaaggtttgagttgaaaacttttctcaatgccttgatcacacatgaggtcacatttgcacccattgtgccccctatcattctcaccttggtgaaaaatccaatagtggatgaatttgacctcagcaagctaaaactccaggccattatgactgcagcagctccacttgcaccagaactccttaatgcttttgaacataagttccctggcgttgctgtccaagaggcatatggactaactgagcatagctgcatcaccctcacttatgcacaaaaaggattgggaagtactcatagaaactcagtggggttcatcctcccaaatttggaagttaagtttgttgatcctgacactggtcgatccctcccaaggaacacacctggggaactctgtgtaagaagccaatgtgtgatgcaaggttactataaacaggaggatgagactgcccaaaccattgacaagaatggatggcttcacacaggtgacattggattcatagatgatgaagaaaatgtatttatcattgatcgtatcaaggagttgattaagtacaaaggcttccaagttgctcctgcagagttagaggccattttgctgagtcattcatcagttgaagatgcagctgtggtgccattaccagatgaagaggctggggaaatcccagctgcaagtgttgttttgagcccaggtgaaaaagagagtgaggaggacatcatgaactatgttgcctccaatgctgcacattacaagaaagtgagagtggtgcactttgtggaagccataccaaagtcaccctctgggaaaatcatgaggaggcttgtcaaagagaggatggtggaaaagatgaagacagagtccttaacaaaatctaagaatatttaaatcactagcaaatattatgtactttgctttaatgtcttctagtttgtcatggttgcactgttgttaagtgacgactaatttgacatgggatttattcttttactacttgttgaagagatatattaaaaataaaatttgacactttggtacaaaaaaaaaaaaaaaaaagc

SEQ ID NO: 3188 - DNA, 1471 bp, Glycine max
attcccgcggtacgaccccacgacgtgccgccaacaacaacgacaaaaaaaccatctcctctctctcttctcgctcttcacacattgcacttcttggtcctatgtacctggttctccacatcctcagccaaagcaacctcctacaacgtggtggacttcggggccaaacccgacggcgcgacggacgcaaccgcggcattcctaagcgcgtggaacaaagcttgtagttcgaacaaacccgcaggcattcacgtgccgcaagggaggttcctgatagcacgtgccgttacgttccatgggcaatgtgcgaaccgtgctatctccataaccattcgtggaaccttggtggctccttcccaatacacgttcgtggggaattctttgtattggttgacctttgaccaagttagtggggtttccattcatggtggggtgcttgatgcccgaggcagtttcttgtgggattgcaagtacaaagccacccctaattgcccaattggagctgcgacacttgggttcacaaactctgaacacattgtcatcactgggttgacttctcttaatagtcaactggttcacatactgatcaatgcatgccacaacgtgaaaatgcatggagtgaagctcatggctgatggaaacagccctaacaccgatggcatccacgtcaaattctccaccgatgtcaccatccttgcacctagaattcgaactggagatgattgcatctctgttggccctggttgtagaaacttgtgggttgaagatgttgcatgcggacctggtcatgggataagcattggaagcttaggatgggacttggacgaacctggtgtgaaaaatgtgacagttagaaaagccacattctctaaaactcaaaatggttttagaataaagtcttgggggaggccaagcagtggatttgtggaggatgtccattttgaacatgcaacaatgtctgatgtccaaaaccccattataattgaccaacattattgcccatttcgcaatggttgccctagtcaggcctctggggtgaagataagtgatatttcatacaaagacattcatggaacatttgcaacgcaagttgctgtgaaatttgattgtagttttgagcacccatgcgaaagaataacgttggaggatattagattcacttacaagatcaacaaagctccccaagctttgtgtaatcacgctggtggaaccacattgggtatagttcaaccggggagttgcttttagggcaaatgttagatatggctctgaaatctgaaatctggagacaaaactatatcatttgctaaaattaagatctattgattatgtgagaatgtcagtaacatattttttaacattcatattttgttattggttgaaatttattagaattttttttttggtttcatttttatttaaagaactttacttgtgattttatagtttttaataaattttaattagttat

SEQ ID NO: 3189 - DNA, 2451 bp, Glycine max
tttcaaatatttttgtattgtaataatttgtatgggtccaaactggtatcctgggtctaaagaacatggtttggagattcctttggcctatttgacaatgttttagcaatttcccatcttttgatactttcaaagactgattcttttggattcaaatcctttcaatttcgttccattgaagaaaaacttaatctggttcgtgcttttcttgcccgagttgacgtttgcaggcaacaagaaaatgagcaaaaactggaaatctagctgctttcgggatcctgggggagttctgttccttcttgtgttgtgtttgttgtttcagaactttagtttgtgctgctctttgaatgaagaaggtaaagctcttttgaagttcaaacagggaatagtaaacgacccttttgatgctttgtccaattgggttaatgatgaagtggaagttaacccgtgtaattggtttggagttgagtgctccgatggaagagtagtggtcttgaatttgaaagacctttgtctcgaaggaaatctggtacctgagcttgcaaaccttgttcacataaagtccataattttgcggaacaattcttttcatggaatcatcccccaaggaattgcacacttgaatgaaatggaggttttggatttgggctacaacaactttagtggaccgctacctacagatcttgggaataatattccgctgacaatccttttgctggacaacaatgatcatctttgtggtttctctcccgaaattaatgaattgaagatggtttctgaatatcaagtagatgaaaaccaactaagtagtgcagaaaaagtgccaataagatccatcaaacgccatgctggccaaaataatggtgttcggaagctactgcaagttcgtactcgtgaaggtggaagtccttttaatcgggtttttcctgatagtcctgctccatttccttcagctccctcacctgccccagcaacgccaccagtggttcagaagccagctcccgttgaccgaaataattctgcttctccttctcccctgcctgaaccacgctctgcaccgctatctaaaagtagctcatcaaagaaccatctagttgttattttggctggagttatgggtggtgttgtatttcttctcatttcaatcattggcctatatctctgtaaaacaaacaaggtagctactgtaaaaccttgggcaacaggattaagtggacagcttcagaaggcatttgtaacaggtgtgccaaagctaaagagatcagagcttgaagcagcatgtgaagattttagtaatgtaattggcacttcatccattggtacagtttacaaagggactttatctagtggtgtcgaaattgctgtggcatctgttgcagcgacatcatccaaagattggtcaaagactctagaagcccaatttaggaacaagatagatacattatcaaaagtgaaccacaagaattttgtaaatcttcttggacattgtgaagaagatgagcctttcaccagaatggtggtttttgagtatgccccaaatggaacactctttgagcatttacacataaaagaatctgagcacttggattggggaacaagacttagagttgccatgggcatggcctactgcctacaacatatgcaccagttggagcctcctttggtccttagcaacctgaattcttcaggtgtccaactcactgatgattatgctgccaaaatctctgatttgagtttcttaaatgaaatagcttcagctgtgataaaatctcctgctagaaaaaacactgatatgacacccgcaagtaacatatacagctttggtgttatattatttgaaatggtaactggcagactcccttattcagtggacaatgatggctcacttgatgactgggcttcacactatttacaaggggatcagcccctcaaagaaatggtggatccaactctagcatccttccaagaagaacagctcgaacaagtcgatgctttgattaaatcttgtgtccatcctgatcaaaagcaaagaccaacaatgaaagaagtttgtgtgagattaagagagataacaaaaataacacctgatgcagctgttccaaagctttctccactttggtgggcagagcttgagattgcttctgtagatgcaagctgaaatcgctaattcgggttgtaagtatggagttcttaccatcctcatcctttttccatcggtgaaggcacagaaaatgtattcacctgtagattaatacatcttgtgttaattatagaagagtggcaaatcacatgtacataagggagataaaagaatgtgattttttcttttcttttcctggggtgcttcgtttggttatggtttatgaaattacactaacaaaaaaaagtttcacatcagttaatttcatttgctcagtaagtttattagatgaattaaaaatgtttttaatt

SEQ ID NO: 3190 - DNA, 1402 bp, Glycine max
ggttccattcaaaagattatcaataattttattttattttatttttttatgtcatttcatatctcatttcaacacttcaattcaactttcacctacacaaaattattttcacgggaattggccatttgaatggcacagttattgtctccagtgtacacagagcctctcaaatcgaatttaagttccataagctcatggaggatactaccaaagactgcaactccttcgaactttgtaacacacaatggcaaacgaagagggtgtggcagggtaagagttgctgctgaggaaaaatcattttctacgagtgacactgttgcagatgactactatgcagttttgggtctgcttccagatgccactccagcgcagatcaagaaggcctactacaattgcatgaaagcttgccacccagacttgagtgacaatgatcctgaggcaaccaatttctgcacgttcatcaatgaagtctatggggtgctaagtgatcccattcagcgcatgatttatgatgacattcatgggtattctttgacttcaatcaatccttttctggacgattctagtccaaaagatcatgtttttgttgatgaatttagctgcataggttgcaaaaattgtgccaatgtagcctgtgatgtgtttggaatagaagaagaatttggaagagccagagtgtacagccaatgcgggaagcctgaattagttcaacaggctattgatagttgccctgtggactgcattcattggacatcagctgcacagctatcattgcttgaagatgaaatgcgccgcgtagaaagagtcaatgttgccctaatgctttctggaatgggatcagcaggaactgatgttttcagaatggcaagttcccgatgggaaaagaggcaggcaaaagtcttggaacaagcaaaattgagaatgatgaaggagaagggttctgataaaacagatatgttctggaacaatctatggggcaaaccaaaagacttaagttcagaggaggaaatcaaagaaagagcaaaaagggctgctgctgccgctagaagatggagggaatactcaagaagaggtgttgataagcctcccacatttaaacttccagagacagcctccaccaaggactagtgaccagtattttccccacagtccttcctacaccttctatagctatagcatcatgtcccatgtaattaattcatccatagcctctcataagtttatttctcatttaacaatccaccattgtatattctgcaacactaattactgtaaaaataatacagatgatttgtagtaaatacagggataaataaaagaaggctaaattcaatgtgatgaaaaaaaaaaaaaaaaaaaaaaaaaaaaaaaaaaaaaaaaaaaaaaaaaaaaaaaaaaaaaa

SEQ ID NO: 3191 - DNA, 1351 bp, Glycine max
tcgagtcagctacgtaggccccccccccccagtaagctctttttctttgaacagtttctccaatctccatttttttttgtcaccagttatgatacctatccaattcccaacaatagaagacaaatttttaaatgcattaaaatcacttgaatatgttgtgattaattacttgaaagttgaacatgtacagttgcacttccttttcccaatgcattcaaattttctagtctagccacctccgaaaccttagtttttggcattgttacaatggctcaacttttgcatggctgtgtagctaactgttgtataagcaaccgtgatattagtgatttaaaaggcagggttttagattttggttgttgtcatggtagcagctccagcaattgcagaaaaatgcaggaaaataaagctgatggaattttcaatttggccaaaatatggttgttgtggctgcaattgccactgcagatcacaatttagaaccctatttaaagagaaagcggaggaaatcagaagaacacaatctgggaaaaaaggtcaataatagaaaggataagccagtggaattagcttcaaagacaaatttacattcagctctgccctcaagcatggctacgtattctcgcatttcacaccatatggaccaaaggcaacggatacaatatgatggtatatgtagccctttgaagcaactcatggagcagaatgctcaagcttttaatcaaatcactgccaatttgtctacttacaagttgcaggataacatcgacctcttttgccacacaaggcacaatattaataccattcttaataatatgagtgagatgcctggcattatgagccaaatgccgccactgcaagttaacattaacgaagatcttgcaagtagtattttgcttaatagaacatagcgggcaaagcgctgactccatcaacatttccaacacaaattaaagtgaatcagtgtagagaggttcgcattcttagctgcaactgttttggtgccacatgccattgaggagctagggactatctcatgactttccagagtttctaatccatctttgatcttattgctccctgctttattatttcatttgaaggaaaccttggaactcctattgtataaacaaaacattttccttgcaaaaaaaaaaaaaaagaaaaaggagaaaataggaagcgattaatataacaatggtttgagctgaatgcaccttattgatttcagagtgcaggtgtttttctcatgccataggaactattgtagatctatttatgctagtttgtcatcgacttcaaatttaagtaatggtcatatttaacagttgataaaaaaaaaaaaaaaaaa

SEQ ID NO: 3192 - DNA, 1208 bp, Glycine max
  misc_feature (2)..(2): n is a, c, g, or t
tngagtcagctacgtaggccccccccctattaaccgtttgtctgagatggttccaatgggaaattattttgggctaagtagttcgtctgggatgattcagctacgtaggccccccccccccccatattctgggaattcaagcatcattaacagtaatcctgtcatgagtcaagctggtaatccatccagttcttcgcttcttctcgattcggtcccggggctgaagcacgacacagggttggctgttgagtggtctgttgatgaacagtacagattggaggaggaccttgccagatatgctgatgagccaagtatcatgaggtatatcaaaattgctgccctgttgcctgataaaactgttcgtgatgttgctttgaggtgtagatggttgacaagaaagcggaggaaatcagaagaacacaatctggggaaaaaggtcaataatagaaaggataagccagtggaattagcttcaaagacgaatttacattcagctctgccctcaagcatggctacgtattctcgcatgtcacaccatatggaccaaagtcaacagatacaatatgatggtatttgtagccctttgaagcaactcatggagcagaatgctcaagctttcaatcaaatcactgccaatttgtctacttacaagttgcaggataatatcgacctcttctgccacacaaggcacaatattaataccattcttaataatatgagtgagatgcctggcattatgagccaaatgccgccactgcaagttaccattaacgaggatcttgcaagtagtattctgcctaatagaacatagcgggcaaagtgctgactccatcaatatttccaacacaaatctaagtgcatcagtgtagagaggttcgcgttcttagctgcaactgttttggtgctagctacatgacattgaggagctagggagtatctcaggactttccagagtttctaatccatctttgatcttattgctccctgctgaaggaaaccttggaactcctgttgtataaacaaaaagaaaaaagaaaagggagaaaataggaaagcgattaatataacaatggtttgagctaaatgcaccttattgatttcagagtgcaggtgtttttctcatgccataggaactattgtagatctatttatgctagtttgtcatcaacttcaaattttaagtaatgctcatatttaaccgttgatag

SEQ ID NO: 3193 - DNA, 1004 bp, Glycine max
aaaattatggataattctctgcaaagtgtatcatatcatagcacaccattctatcgcttcacacagagtgagatatagaatcactgaagagcttccttcaatggcggtttcttctctctctgttactcctctttcgctctcaaattcttccccctctctatcttccaagccaaagtttccatctttgtgttttctctctggcaacaacaccacattgagggtaacatgcccaaaacctctgcactcatccactgttgttcatgttgctaccgaagcgttggattcatcccctgatcccttggacccacctccagaaacccttgatgatgactctgacgccaccacctttgaggttggtgacttggggactcctagcacttcagcaattagcattggtggcgatgcagatacaatggcaccaaagcagaagattagaatcaagcttaggtcttactgggtgcccttgatagaggattcctgcaagcagatattagatgctgcaaggactaccaacgcgaaaacaatgggacccgtgccattaccaaccaagaagcgaatctactgtgttcttaaatccccgcacgtacataaggatgcccggttccatttcgagatcagaactcaccagcgtctcattgatattctatatcctacagctcaaacaatagattctctgatgcaacttgatcttcctgctggtgttgatgtggaggtcaagctgtagagatatttgcttttcaggttgctaactgtcttgaatttgagtgaggttcaacttgttatcaatagccaaaatatattggcagatatcatgtgtttcactgcctaaacttgatttctaagaacaatgctaaaagtccttttgtttgctttccctttctgtcttcattaaattagtttatccctgatttcctgttattgcttagatatttgtatatcatatacaatgttatgtaattcaggtatgccacaaaattttattttgttttcctggtaataataaa

SEQ ID NO: 3194 - DNA, 1058 bp, Glycine max
agtcagctgcgtaattctctgcaaaatggtcatagcacaaccttctatcgcttcacacacaagttcattcacagagagatagaatcactgaagagcttcaatggcggtttctctctctgttactcctctttctctctccaattcttctccttctctatcttccaagccaaagtttccatctttgtgctttctctctggcaacaacaccttgagggtcaaatgcccaaaaccttcgcactcaacaactgttgttcatgttgctccagaagcgttggattcttcacctgatcccttagacccacctccagaaacccttgatgatgactctgacgccaccacctttgaggttggtgacctggggactcctagcacttcggcaattagcattggtggcgatgcagatacaatggcaccaaagcagaagattagaatcaagcttagatcttactgggtgcccttgatagaggattcctgcaagcagatattagatgcagcaaggaataccaatgcaaaaacgatgggacctgtgccattaccaaccaagaagcgaatctactgtgttcttaaatccccacacgtacataaggatgctcggttccatttcgagatcagaacacaccagcgtctcattgatattctataccctacagctcaaacaatagattctctgatgcaactagatcttcctgctggtgttgatgtggaggtcaagctctagagatatttgcttttcaggttgctaaccattttgaatctgagtgaggttcaacttgttatatcaatggccaaaatatattggcagatatcatgtatttcacgggccttatcatggatttcaatgaacaatgttaaaatccttttgcttgcttcccccttttgtccccaacaaggtttcaattagtgtattcctgatttcctgttcttgcttagatatttgtatatcatatacaatgttaggtaattctgatgtccccccaatcgcttcatttttttctctggtaaattatgtttatgaatttatttattttgatctcaaaaaaaaaaaaaaaaaagaattc

SEQ ID NO: 3195 - DNA, 2132 bp, Glycine max
atttctttctttctttctatcaaacacagtgcgtgcgtgttttctttctcctaattgtataaaatgggggacaagcaccagcagcaccaccaagacgacagcagcgatttcacctccgaggacgaaggcaccgaagattaccgccgcggcggctaccacgccgtccgaatcggcgacgccttcagcgccggtcgctacgtcgttcagagtaaactcggctggggccatttctccactgtctggctcgcttgggacaccaaacattctagatacgtggctttgaaagttcagaagagtgctcagcactacactgaggcagctatggatgagataacaattttgcagcagattgcggagggagatcctgatgataagaagtgtgtggcgaagcttttggaccatttcaagcattctggtcccaatggacagcatgtttgcatggtgtttgagtaccttggggacaatcttttgactcttattaagtactcggattatcgggggttgcctattgccatggttaaggagatttgctttcatattctggctggattggattacttgcaccagcagctttctatcatacatactgacttgaagcccgaaaacatcttgctcttgtcgacaattgatccgtctaaggatcctaggaagtctggggcgccacttattcttcctaatagtaaagataagatggcgatggagtcagcagggatgaaagatacgaaaatgttgaatggggatttggttaagaatcataagaaaaagattaagagaaaagctaagcaagcagcccatggatgtgttgagaaggaagcttctgaaggagttgagggtaatgctgaaacctctggggctgtggagtcatctcccaatgcgagttctgcgagagaacagacttctagttctgcaggaactagtcagttatcggatgctgatggaacaaagttgaaagagcagggtaacaaaagaggaagccgctctatgagacagaagctgctggcatcggttgatctcaagtgcaagttggtggactttggtaatgcctgctggacatataaacagtttacaaatgatatccagacaagacagtatcggtgcccggaggtgatccttgggtcaaaatattctacgtctgcagatctttggtcttttgcttgcatttgttttgagcttgcaactggagatgtgttatttgatcctcacagtggtgacaactttgatagggatgaggaccacttagcattaatgatggaacttcttggaatgatgccacgtaagatagcacttggtggccgttattcccgtgatttctttaatagatatggtgacttaaggcacatccggcggttgcgattctggcccttgaataaagtcctcgtggagaagtatgacttgagtgagaaagatgcaaatgatatgacagactttttggttcctatccttgactttgttcctgagaagcggccaacagctggtcagtgccttctccatccatggatgaatgctggtcctcgccttttggagccatctgtgccttctaatcacaaccctgctgctgaaacttccgtttcggatcagaagagaaaggacaaagatgagagggaggccatggagacaggaatggggaatattgttatcaattcagattttaaaccactaatgcattctccatcaaagaaagtcttccaaggcagaagccagaagtagttcatctggcaagggctctttcccgtgcgactgtttccatgttcttagcgtgcccctgcatcatttccctcattcattgatgtccatgggaattgttttgggggcatgttcatttagccttggattgggtaggacttgtttgaagccgggtgctcgctaaatcctttcaagtcttccacattgcatcttcaaaaagaagttgggatactccgagagctctcactactaagaataccgttatgatatactctgtgccttgtttctcatgcttacgataggtcaaagatgcctttgtcaattggtaccgttgacttgtttgtgaacagtgttcattatcatgtactcttatgctgaatgatattcttgatatgaaaacattataaacatgtttcaagtcattcgatttttgttctttgggttcaaaa

SEQ ID NO: 3196 - DNA, 1780 bp, Glycine max
acgaggaattttttgcaatgcaatctctccctcactcttattttcattctcacgactcatccttacaaaactcacccaatttcctattaaaacaaatctctaataggactcttacatatttttcaaatctcatatctgtcaaatatctcccatactttttacttatatctcaaatctcttacatatattttgtccgtcaaacaatcttacatatatatcgatattatagcaaactgtcaataaaatcttcaacgaaatttggttaaattgtatatatgattaagcattagtggttaggtacataaggttcttacacatgctagaaactttttcttttcacattcatcctgaaataaaaaaaataaaaatttattagatttatattctcttagctcagaacaagacttaagagttaagagggtcacctgttttacaagttttctgatgattaaacagtattgattggctatattattatggtttattgataacactggttattcactagaaatgaaaaagaaaaagaatactgtgatcaatagtttaatacttttgttaccttgcaattttgaaggaaaggagcaggtgtttgtctatcccatagtacagctatacacgtttgaagcgcctggttgcttatttttaagcattgaagactctgaccatatatcaaagctttccttaaaatttgatgaatttctgaaagggatgattggcttcccccttaacattcctggaacaaggtttcatcgggcaatgaaagctgcagatgcaataaggaaagaaattagaatgattctaaagaaaaggaaagtggatttggaggagaagagggcatcagctactcaggaccttctatcacacatgcttgtcacatctgaccccagtggaaggtttacgactgaaatggagattattgataacatacttcttctactttttgccggtcacgatacttctagatcagtgttatcattggtcatgaagtatcttggacaattgcctcatgtttttgaacatgtcttgaaagaacaacttgaaattagtcaagggaaagaggcagggcagttgttgcaattggaagatgttcagaaaatgaaatactcttggaatgttgcatctgaagtcatgaggctatccccacctgtgagtggtgcttacagagaagctaaagaggatttcacctatgctgattataacatccctaaagggtggaagctgcattggaacaccggttcatcacacaaggatccagcactcttctcgaatcccgaaacttttgatgcttcaaggtttgaaggagcagggcctacaccattttcatatgttccatttggtggtggcccccgaatgtgtttgggtcaagagtttgctagactagagatacttgtgttcatgcataatatcgtgaaacggttcaagtgggatttggtgattcctgatgagaagtttaagtatgaccccatgctagaaccagtagaaggacttgcaattcgactccatccttcccatttctagtttaataccatcattatacgcataatacattgattagaagctttctaagtagtcatcttatattgctatattagtattttaataaaactttttgctacatcggttagcagcttttttgtaactgctttcatgagttttatgatgtattcatttcaataaaactttgattattctgttatgtccaacattagacaacaaaaaaaaaaaaaaaaaaaaaagaaaaaaagggcggccgctctagcaataccaagcttccgtacgc

SEQ ID NO: 3197 - DNA, 1152 bp, Glycine max
agggtatgggctcgtcagcctgtataccacaggttttatgcacttgtgctgaccgcatgtatgctggaatactgctaaacactcgccttgcttgccctttgtcttccatactttcaagtccttttagtgaatcagcagcgcagttttgtgctgcttctgttgttattgccttggaagacttgcacaagaatggtgttctctacagaggtgtgtcacctgatgttttgatgttggaacaaactggacatatacagctggtggacttcagatttggaaaacagctttctggtgagagaacattcacaatttgtgggatggcagattcactggctccagagattgttttgggaaaaggccatggtttccctgctgactggtgggcgttgggagttttaatatattatatgttacgtggtgagatgccatttggatcatggagagaaaatgaacttgatacagttgccaaaattgcaaaaaggaagctacatcttcccgagacttttagccctgaagctgttgatctcatctccaagctacttgaagtggaagaaaacactagacttggtagccaaggtcctgattctgtcaagaatcacccatggtttaatggtgttgaatgggaagggattagaaaccacacctttcccgttccacaggaaattatttctcgtataacacagcacttggaagttcattctgaggattgtagtactggttatctgggttccccattacaggaggtaaaagaacttaatgtgcctgaatggcttgaggactggtagaagaatcaccattacgttttgtcttctttttgaagtttggctctgcaccagtatttacctttgcttatttggacaaattgcaatccaagaatgcagttaaccagaaaatgcaaagagagcaatagatgcagaatttccctatagtttgaatattttagttgcaaaatgggtagggtaggtttattatcttcttcatctcctcccttttctaatttatttttgggggtaatttccctcctctgtaaatattatatatgtgtaaatgattgaatttcttttcattttcaattgcaattcaagcaatttagttttgtcatggaacaatattcatattagcacacaaaatgtaatcttatttttgttcttccgg

SEQ ID NO: 3198 - DNA, 1342 bp, Glycine max
cggggattaacggatagttattatagataactcgtatctgcacactcctgcttcttctatccgctactgtcatctcttcacttcccttctatcactcttctcacttctgagtggtggagtcgttgggccgtaatgggtctctttacactgtccgttatggttaatgactctgccatttcattaccagatacttgtacgaaaagaaagcagaacttacttctgaaaaattcttttgcatcagttagcatgggagatgaaaagccatttgacttcctacgcactttatttgagggcgttattgcaggtggtacagctggagttgttgttgaaacagctttatacccaattgacacaataaaaacacgtctgcaggctgctcgcggaggagaaaaactaatattgaagggcctttattctggattggcggggaaccttgttggtgtcttaccggcatctgctttatttgttggagtttatgaacctataaagcagaaattgctgaggatatttcctgaacacctaagtgcttttactcatttgactgcaggtgccatagggggcattgctgcttcattgattcgtgttccaacagaggttatcaagcaacgaatgcaaactgggcagtttgcttcagcttctggtgctgttcgctttattgcttctaaggaaggcttcaaaggattttatgctggatatggatcttttttgttgagggatttaccctttgatgctattcagttttgcatctatgagcagattcgaataggttatatgcttgcggcacaaagaaatctgaatgatccagaaaatgcaattattggtgcttttgcaggtgcactaactggagctataactaccccccttgatgtcatcaagacaaggttaatggttcaaggatctgcaaaccaatataagggaatcgttgactgtgttcaaaccattattaaggaagaaggacctcgtgcctttttgaagggtattggtcccagagtactatggataggcataggtggttcaatattctttggtgtccttgagagtacaaagcgttttctttctgagagacgccctaccgtacctcagaacacatattcagagaagagcaaagattaatagtttttgtcctagcctcttttgtttttttattccaattctcccctcagtgccttttccaagtgaaacaatattttcttaaataccggatactcttttaatttttaatttttcaattttaagcgttgaaagcacagttgtatcttgattatttcccttccggcttgcttgtccgtgagctatataacattgtttaacaaaaaaaaaaaaaagaaaaaaaaaaaaaaaa

SEQ ID NO: 3199 - DNA, 1887 bp, Glycine max
tcagctacgtaggcccccccccgaagggatcgtcttctgcagaaatttgcgccatcgtcgagagaagcgtgagagacttctcgtttatgatgagagctaagatagtttagttgtcaagtcataaatcagtatcatcactttaaatttcattagaagctgtcaaaatgtcacggaagggtttgatggagcaagacctgagtaagttggatgtaacaaagttgcatccactttctccagaagtcatatctcggcaggctactattaatatcggcactataggtcacgtggcccatggcaagtcaacagttgtgaaagcaatatcaggtgtccagactgtgcgtttcaaaaatgagttggagcgtaacattacaatcaagcttggctatgcaaatgcaaaaatatacaagtgtgaagatgaacgatgtccaaggcctatgtgctacaaggcttatggaagtggaaaggaagatagtcctatgtgtgacgtgccagggtttgaaaacagcaagatgaaattgctaaggcatgtttcatttgtggattgtccgggacatgatattcttatggctacaatgcttaatggagcagcaatcatggatggagcgttgctactcatagctgctaatgaaagctgcccacaaccacaaacatctgagcatttagctgctgtagaaatcatgcgtctacagcacataataatccttcagaacaaggtagacttgattcaagaaaatgtcgcaatcaatcagcatgaggcaatttcaaagtttatacaaggaactgttgctgatggtgcaccagtagtacctatttcagcacagttgaagtataatattgatgttgtgtgcgaatatattgtgaagaagatcccaatccctgaaaggaactttgtttctccacctaacatgattgttattcggtcatttgatgtcaataaacctggttatgaggttgatgaaattaaaggaggtgtagctggtggaagcattctgaggggtgttttgaaggtcaatcaattcattgaagttcgtcctggcattgttgttaaagacgagagtggaaatatcagatgcacacccatatactcaagaatagtttcattgtacgctgaacaaaatgagcttcaatttgctgtgcctggaggcctaattggtgttgggacaacaatggatcccactttgacacgcgctgataggttggtaggtcaagttttaggagaggttggatcactacctgaggtttttgttgaactggaggtaaactttttcctgcttcgacgacttcttggtgtccgaacaaaagggtctgagagacaggggaaggtatccaagctggccaaaggagagatgctaatgttgaacattggatcaatgtcgacgggggctagagtagttgctgtgaagaatgacttggcgaagttgcaacttacttcccctgtgtgcactagcaagggtgagaagattgcacttagtcgacgtgttgagaagcattggcgtcttatcgggtggggacaaatccaagctggaatcactcttgatgtccctcccgccccccatctgagttgaacactgatcacaagaaacaccagcagctataaaaaactgagatgaatttagatatgtgggaagggaggcaattgttgggaaccatttttgtgaggtggagaagaaaacgttttttgattgttgtcttctattttgttttcacatcgttattggtttattttcccaactgtacctcttattgaagttgtatcctatgctgtgattgaattcaggctgggagtgagaatctcagcaagcacttgtttcaatctatggtatcttatcaatatgcaattatgcactattggttctacatgttatatacgtgaagcattttattttg

SEQ ID NO: 3200 - DNA, 1186 bp, Glycine max
aatttaccaacttcccggccccccctcgcggtcacctccttgggccccccccccccccctaatactcttcacattcctctgtggttgagcacagccaaactcaaagaagaaagaagaaaatccagcgaaagtaaaaccagcatccgaaaaagatgagcagcatcggaacaggttacgatctctccgtcaccactttctcccccgatggccgtgttttccagatcgagtatgctgccaaagccgtcgataacagcgggactgttattgggatcaagtgcaaagatggggttgtgttgggcgttgagaagcttattccgtcgaaaatgatgcttccgggttccaatagaagaatacactccgttcatcgtcactctgggatggctgtagcaggattagcagctgatggcaggcaaattgttgctagggccaagtctgaagcaactaactatgacagtgtatatggcgaaccaattcctgttaaggaacttgctgaccgtgtggctagttatgtgcacctctgtacgctatattggtggctcagaccttttggatgtggtgtcatactaggaggttatgacagggatgaaccacagttgtacatggtcgaaccttctggtgtttcttatagatatttcggtgctgcaattggcaagggcaggcaggctgctaaaacagagattgaaaagttaaagcttgctgatatgacatgtcgacaagggcttattgaagtggctaaaattatatatggagttcatgacgaggccaaggacaaagatttcgaattagaaatgagctgggtgtgtgatgaatcaaaccgccaacatgagaaggtaccagatgagcttcttgaattagcaaaggcagcggccaaagcagctcttgaagaaatggatgcagattaatggactagaaatgtttatttcaaagttgtatttcataactttgtaattgagcatttgaaacatctataggaaacacaaggcttcgatagttggatattgtattcttcttgatgatttaatgcccttattgatttcctgtttcttggacaattgttttgaagttctatagaagctgacctttattgatttgtgttgaaaaaaaaaaaaaaaaattgtgcttatgtgccagcattgaatttcctttattcacacgtcatttgttaagcgaaaaaaaaaaaaaaaaa

SEQ ID NO: 3201 - DNA, 861 bp, Glycine max
ctttggctggtttcattcaaagcagtgtcatcaacgggaacataacatagcatacaattagcaaatgatcttcacaagacatggcatcactgtgtctaaactcattaccagtcccaccatcttctcttcctcgcaaaccaactgaaacttctctttcttcttatccttctttgcttcttcataacaacaacaacaatcttagtgacttgaaacccattgttgtcagtggagaccccccaacttttgtttctgctccgggtcgcagaattcttgctgttggagacctacatggagatcttaagcaagctaggtctgcacttgaaatggctggtgtattgagctctgatggtcgagacttatggactggtggagaaactgtgttggttcaacttggagacatactagatcgaggtgaagatgaaattgccatcttgtccatgctgcgatcattggatagacaggcaaaagaaaaaggtggagcagtgtttcaggtaaatggaaatcatgagaccatgaatgtggaaggggattatagatatgttgagtctgggggatttgatgagtgtaatgatttcttagaatatatcaatggttctgaaggtgactgggaagaaacttttacttcttgggttgatgtctctaaaaggtggaaagaagatcgaacaatgtcaaaaagttattggggaccttggaatttattgaagttttccaattattaggacagagacaaaagggagtcattgccagatcaatcctctttaggcctggtgggcttcttgcacgtgagcttgcaaggcatgctgttgtactaaaggtcaatgactgggtccttctgtcatggtggacttcttcctcaccatg

SEQ ID NO: 3202 - DNA, 1197 bp, Glycine max
  misc_feature (1052)..(1052): n is a, c, g, or t
  misc_feature (1054)..(1054): n is a, c, g, or t
  misc_feature (1064)..(1069): n is a, c, g, or t
  misc_feature (1071)..(1072): n is a, c, g, or t
  misc_feature (1079)..(1080): n is a, c, g, or t
  misc_feature (1089)..(1090): n is a, c, g, or t
  misc_feature (1098)..(1098): n is a, c, g, or t
  misc_feature (1103)..(1103): n is a, c, g, or t
  misc_feature (1107)..(1107): n is a, c, g, or t
  misc_feature (1113)..(1113): n is a, c, g, or t
  misc_feature (1123)..(1123): n is a, c, g, or t
  misc_feature (1127)..(1127): n is a, c, g, or t
  misc_feature (1131)..(1132): n is a, c, g, or t
  misc_feature (1136)..(1136): n is a, c, g, or t
  misc_feature (1145)..(1146): n is a, c, g, or t
  misc_feature (1150)..(1150): n is a, c, g, or t
  misc_feature (1152)..(1152): n is a, c, g, or t
  misc_feature (1164)..(1165): n is a, c, g, or t
  misc_feature (1167)..(1167): n is a, c, g, or t
  misc_feature (1171)..(1172): n is a, c, g, or t
  misc_feature (1177)..(1177): n is a, c, g, or t
  misc_feature (1181)..(1182): n is a, c, g, or t
aacaccagtcccccgaaattgaccaagccaatccccacaactaagtgcaagacaaaaaaaaactcaaaattccaacttctcttctctactaatccctggatgctctctctataaaggccaaactcacaaaccataccctaacaaattgaccttattttgcaacaaaattcaattttgagcactaaccagcaccacttccaatggcttcaaatcatgaagaagtgatacttttgggcaagtgggccagcccatttagcaacagagtagaccttgctctcaagctcaagggagttccctacaaatactccgaggaagatcttgctaacaagagtgctgatcttctcaggtacaaccccgtgcacaagaaggttccggttttggtccacaatgggaacccattacccgagtcacttatcattgttgaatacatcgatgagacatggaaaaataatcccctcttgcctcgagacccttatgagagagccctggctcgtttctggtctaagaccttagatgacaagatcttgcctgctatatggaatgcttgctggagtgatgagaatggacgtgagaaagcagtggaggaagccttggaagcattgaaaatcctgcaggaagcactgaaagacaagaaattttttggaggagagagcataggattggtagacattgctgccaatttcattgggtattgggttgccatattgcaagagattgcagggttggagttgctcaccattgagaaatttcccaagttatataaatggagtcaagagtttatcaatcaccctgtgatcaaggagggcctgcctcctagagatgaattgtttgctttcttccaagcttctgctaaaaagtagagtcgttttagaggtaggattcctaataagttagcatgattttgttgggaaataatgataatcttgttgtgagtaaaagattgttctgttttaaatttaattgactgtggtattggttgagggtattggctattttaattttaactataaaaaactggtgttctgtgttgttgcctgatttctcaacaaaantntggaaaatannnnnnannattcctnncccggggannctatttancgccncccngggacnccctttttcnttangggnnatcnactggcganntgcnantgttctgggaanntncctnnatccncacnncaccggacctagggg

SEQ ID NO: 3203 - DNA, 1699 bp, Glycine max
tcagctacgtaggccccccccccccccccccaatttttttacttcaactgttgcatgtatacatggatgttgaaaattgaagaacctaatctgattgctttggagttatggtcatcttttgggaagcaaagacatacctttcaaaggatagacgaagccacaaatggaacattcccccagactttttggtgcttctgacactcgtgcaccagagcttgtggattttccttcttctgaaactaatgcatctcgagccgctgaaattgagcatattgcttcaaacagaacccatttaacctgtgttgaatcatcaagcgcctcaacttctgctcctccacatatgcatgatgaaatcactggtagttctggttctagtgcacttattgaatcaaatcgtactggacaaagtggcatttccattttacaaagcctaattgatcgtgctcgaaggactgtgcgtggatctgccgatgatataggatggcttcaacgtgatcctggaatgccgtcagttgaagatggaacagtgaggttcctggaaattctggacaacatcaagcatggtgttcacaggttaccaaattcggtggtttatttgttaattccaggtcttttcagtaatcatggtccactttactttgtcagtacaaaagtcagtttttcaaaaatgggtttggcctgtcatatcgcaaagattcatagtgaggcttcagttgagaaaaatgccaaagagctaaaagagtacattgaggaaatttattggggttcaaataaacgtgttatgcttcttggacacagcaaaggaggagtagatgcagcagctgctttatcattgtattggtctgatttgaaagataaagttgctgggttggcattagcacaaagtccctatggtggaactcctatagcttcagatcttctacgagaaggacaacttggtgattatgtaaatttacggaaacttacagagattcttatctgtaaagtaattaagggtgacatgcgagccttagaagacttgacatacgaaaggaggagagagtttttaaaggagcatcatctgccaaaagaagtcccaattgtttcatttcgaaccgaagctggcatttccccggctgttttagccacgttatcccacgttgcacatgccgaactacccctggttgctccaggcggcgagtctagaaaactccctttggtgatgccgcttggtgctgctatggctgcttgtgcacaattgctgcaggtgaggtatggagagaaaagtgacggacttgttacctgccgagacgcagaagttcctggatccattgtggtgcgacctaaacgaaaattggaccacgcttggatggtttattcatcactaaatgatgacccttctgaaggagatgcatctcaggtgtgtgaggctctcttgactctactcgtggaaatcgggcaaacaaagatgcatgagcttgcaatgaaagatgaatgaagcattagcattccaattttatgttgtacctgtacatatttttcttttttctctccaaaactacatatttaatttattttttatagtctagataaaaatgttgaagtaggtcatacatgtaagaatatacattcatacatgtagaacaacatatttaagcaaaaccttcgtatgatttaggtaagaaattgatgatgcaatgcagttcttggtcttttgcct

SEQ ID NO: 3204 - DNA, 3235 bp, Glycine max
  misc_feature (204)..(205): n is a, c, g, or t
  misc_feature (3222)..(3223): n is a, c, g, or t
  misc_feature (3229)..(3229): n is a, c, g, or t
cggtcgtttttattaaattccttggatgaaggtgatgaagatgaaggtactcgttttctttgttgttaatttctcttctttttccttcgatttcgttttcgcgtcttcaaaaaccagcctggcgccactgttgctagattcacaccaacgctgatattttcttttgttttgttcctcccccgccccggattggtaaattccggnngtcgggtcgtgacccgttttttacgacagcgatgggcgatcttcatgtgaacggcgtcgttttcggggaggatcgcccctgcgcgtcctcgccgccgtcgccgccgcttccgccttggaatcccgatccatcctccgtcgcggccgacgcctgggcggcggccgagagaaacaccgctgagattctccgccgcatacggcccacgctcgccgccgaccgcaggcgcagggaggtcgtcgattacgtacagagactcatccggtacggcgcgcgctgcgaggtttttccatatgggtcagttccgttaaaaacatatcttccagacggagatattgatttgactgcactcagctgtgaaaacattgaggatggcctggtatctgatgttcgtgctgttcttcatggagaggaaatcaatgaagctgctgaatatgaagtaaaggatgttcgtttcattgatgcagaggttaagcttgttaaatgcattgtacaggatattgttgtagacatctctttcaatcagttaggaggactcagtacattatgttttcttgagaaggttgatcgacttgttgccaaggatcatctcttcaaacgtagtattatccttattaaagcttggtgctactacgagagccgtgtactgggtgcccatcatggtctgatttcaacatatgctttggaaacactggttctgtatattttccatcagtttcatgtatccttagatggtcctctagcagtaagttctccatcaaatctcctggatcatactttttcttcaaaagatggaaaagaaaatctgcatcacatgatgatggtgatgcatcctttcagtaagaattttgtgcactctgccctttttccaggttctctacagatttttggactacttcagcaaatttgattgggacaattattgtgttagtttgaagggaccagttggcaaatcttctccgcctaatatagtagctgaggtgcctgaaaatggagggaatactctactgactgaagaattcattagaagctgtgtggagtcattctcactaccatcaaggggggctgatttaaatttgcgcgcatttccccagaaacatcttaacatcatcgatccattgaaggaaaacaacaatcttggccgcggtgtcaataaaggtaatttctatcgaatacgcagtgcttttaagtatggtgcccgtaaacttggctggattcttaggttaccagaagacagaatagctgaggagcttattaggttctttgcaaacactctggaaaggcatggaagcactcgcgggaagctacgtaggccccccccccgcttatctacagcttccggaaaggataggaaacctggaaatcaacataattttgaaagcagagatgaaagagaaagatatgtagtacaagatgcaggggagttctttgactcctctagggatggaaatgcagttacaagttttaaacttggtgaagattctaaggatattgcaacatctggggtcttggatcgcacaagcactaatggttggtcttattgttcaaatgagcaatttgaaaataatatttctgatagtgaacctgccctaaattctgttatcaatgatgagaaagagaagcaagttatggcaggcaattcacccagatcacataccgatgaaaagcatatggcagtctccgaagcttcaaagtcattgttggaccttactggggattatgacagtcacattgggaacttacaatatggtcatatgtgtaatggttatcctgtctctctcgttgtgcctagtcctcctaggtctccgaagtttccaaataggaatccatgggaaactgttcatcaatgtgtaccgattaatcacagtattcgttctcaggcaaactcaaattgtgtaatgggacaacaagtttacgtcataaatcatcctactctgccaatgacttcttttggttcagaagagaagagaaaagtacgaggaacaggcgcatacttcccgaatatgacttcccgtccttacagggacaataggccaataccaggaaggggaaggggtcaagcaccaggtactcatggacatctgcagagacacacccgtaacaatggctttgccctagctccacaagagatgaatttgtctgcggaaggaacctttgaacatgctctagaaggatatcctggtcttggtagtactaaaatcagatcatctgagacctatttccctcaaccttctacatggggatcacattatgctaatggtttcgttcattcatctgagaaacatgaatctgtacatgtgagccctcagcttcaagtagtgccaagaaatgaaactagcatttacccagagtcagtcatttctactcctaggggcactgtgcctaacactggggaggtgatggagaagtctgattcattgtcagtagttgattccaaaaggattgaagagcaagcttatcgtttgaagaatgacgttgactttcctccactttcccattgagtgccagtgaaggatggtgaatttgtaatagcattaacagtaatgatcaatacatggaaactattaagactttgcctacctttcagcaggtgctaccaaaggatggcgattttgtaagaagtaagaagtaagaacaatgtgcattcttctcaaaaatgaagatagcttccctcaactctgggtctcttctagagattgttgaacacataaaaacgagagtaccaaataagtagaaaagtgctgggagtaaccttagaaactaacgaactagactaaactagattgggtgttatgttatctttattctctcttttcttacttaagttggtcctttgtacaaaagtgcatgtatattctcgttactttttttggctcttacatccgtgtttatttttcattatttagggatgtatatatcaggtgatttcctgaggttgagtttatagttctcttctgtttgtagctttgaaagtataaacccgaaagtttagatatcttacttgaatggagccccaaaanncttacncgaatg

SEQ ID NO: 3205 - DNA, 2245 bp, Glycine max
gacccacgcctccgcactcggtaaaattgaattagggtttcattttcttcttcttcaccccactgtcactgcgcaaatccagttctccccttaccctctccctcggtcctgatcttttcccgccatttcccgcgtttcttttacccagattttgaatactagccgttggatctgccatttttttcaatttttttcgaccgttgctctcgccggagtgaacgggaaatgtctgcgtccgaagcggagaagaaggtcgaggaggaagagaagaaggaagaggtcaaagggggagaactcctgttctgtggtgccacttgttgggatatcattggtcgtcgtaaaggccccgtcgacggtaacctcgtctctccctcgcgcctccgtcctctcgtcggcgtcgatattcgctacgtcgcctccggctgcgtgtcttgtcattgcgtggcgttggacgttgaagggcgttgttatacatggggacgtaatgagaaagggcaactgggtcatggagatacgattcagcgtgataggccaactgtggtgtctgaactttccaaatacaaaattgtcaaagctggatcagggaggagccatacagttgttgttacggatgatggaaattccctagcatttggatggaacaaacatggacaactaggttctggttctgtgagaaatgaaattgagtcatcacctgttcgctgtcttgtgtctgaagtaaaacatactgcttgtggtggtgacttcactgtgtggttatcttccattgaaggagcttctatacttatgggcagcttgggcatggaacagataatgagtataattccaaagacagctctgtgaggttggtttatgaaccccagccacgtcctcgagcaattgctgctcttgctggggaagcaattgtcaaagtggcatgtggaacaaatcatacaggtggttgttattccttgcttgatcttggttatataaccttatttactacttttccttaatgtttttgttttggatatttagtggcggtggataagaatggcttcgtctacacgtggggttttggtggttatggaaggctaggacatagggagcagaaggatgagtgggtcccacgacgtgttgaagtttttcaaaatagaaatgttttgccacccgatgcaatcatatcagcaggttctgtgaattcttcatgtactgcaggtggagggcagttgtatatgtggggcaaattaaagaacactggtgatgactggatgtatccaaagcctctaatggatttaagtggttggaatctactatgcatggattcaggcaatatgcaccattttgttggggctgattcctcttgcataagttggggacatgctcagaatggagagctgggatatggacctactggacagaagtcttcagctgtacccaagaaggtggatttacttgagggtatgcatgtaataagtgttgcttgtggtatgggtcattccatggttattgttgatagagcaaatgttgctgatcgacttgaccagcttgatatatatgatgggaaagctgttggtgaaggtaatgaggccgtaaacacaactccagtgcctaagcaggctgctaaaaagggtgcaaaaggagctgacaattcaaagaagaggaaacaatcaaaagattcatctgactcagatgaggatgctgaagaaagtgaggaggatagtgaggatcaaattaatggtgaggctgaggcgaaaaggccacgtggttctggtaaaggccgaggtaaggcacccaaaaagtcaggtgctaagggaaaagggtcggtctctggccgtggtcggggtgggactgcagctaataaaaacagttctaaatcccctcaggtgaaatctggtaagagaggaagaccccgtaagtcataacttagatttttgtcggaaattttgttctctatacctagagaatgtagcgtgtaattcattggcaggtgattatacttagtgttttgttgttattataattcaatcccgctaactatttaattcaaagtttagaaacatgttgaatttgctaactgttttttaagacgcagtgggaagaattgcccgcttgttataattttttttttttttgtaaggggacgcttttattgcttcagtttaccataagcctttggatgtgccctctctatcttgtataccttaattgttctgctaacttggtgggatgcttgttgataaagtttgactgtttgaggcggatt

SEQ ID NO: 3206 - DNA, 3046 bp, Glycine max
  misc_feature (619)..(619): n is a, c, g, or t
  misc_feature (661)..(661): n is a, c, g, or t
acacatgtgcacctcctaatggtcctctggcgcccacacccatcaatcttccaattgctgcagttgcaaagcctgctacttatactccacttggagctccgggtcccccccccccccccgccgcttctgccaatgctaatgctttggctggttggatggccaatgcctcagcttcatcatctgtccaagcagctgtagtcacagcatcaactatacctgtcccacagaatcaagtgcctatcttgaaacgtcctagaacacctcctgcaaatcctggcatggttgattatcagaatgctgatcatgaccagctaatgaaaaggcttcgtcctggtcattctgtagaggaggtttcttatcccttggctcgacaagcctcttggtctcttgatgatctaccaagaactgtgaccatgacattgcatcaaggatcctctgtgacgagcatggattttcatccttctcatcataccttacttcttgttggttctaataatggtgaaattaccctctgggaactcagtttacgagaaaagttggtctcaaagccattcaagatatgggatgtgtctgcatgctcattaccatttcaggctgctgcagtcaaggatgcacctantttcggtcagtcgggtcacatggagccctgatgggaagtttntgtgggtattgcttttactaaacatttgattcacttgtatgcttgcactggaccaaatgagctaacccagcgtatagaggttgatgctcatgttggggggtgtgaatgacttggcatttgctcatccaaataaacagctgtgtattgtgacttggggagatgataagttgataaaggtatgggatttaaatggacgaaaactattctcctttgagggccacgaagcacctgtgtattccatttgtccccatcacaaagagaacattcagttcatattttcaactgccattcctcgcgtccgaaaggcatggttatacgataacatgggttctagggttgactatgatgcccctggtcactggtgcactacaatgctttacagtgcagatggaactaggttattttcttgtgggacaagtaaagatggagagtcttttcttgttgaatggaatgaaagtgaaggcgccatcaagagaacatacaatggattcagaaaaaaatctactggtgttgtgcagtttgacacaacccaaaatcgctttttggctgcaggtgaagatggtcaagttaagttttgggacatggacaatattaatcttctaataagcagtgatgccgatggaggattacagagccttccacgcttgagattcaacaaggaaggtaatattcttgctgttactaccgtggacaatggtttcaagatacttgctaatgcttctggtcttagatctttaagaaccattgaaactccggcatttgaagcattgaggtcacccattgaatcaactccaattaaggtatctggctcttctactgttaatgttagtccggtcaactgtaaagtggaaagaagctcccctgtcaggccttctccaattcttaatggagttgatcccatgggccgaagtgcagagaaaccaagaactgtggaagatgtaatagatagagctaaaccatggcaactatctgaaattctggatcctgtccaatgtcggtcagttaccatgcctgagagcacagattcttccagcaaggttgtcagacttttatatacaaactctgctgttggtattttggcccttggttcaaatggtatccagaagctttggaaatgggctcgcagtgaacagaatcctactgggaaggctactgccaatgttgttccactgcattggcaacccaacaatggtcttcttatgactaatgatatctcgggcgtcaaccttgaagaagcagtaccttgcattgccctctcaaaaaatgactcatacgttatgtctgcctgtggtggaaaggtttctctatttaacatgatgacattcaaggtaatgacaacattcatgccgccgcctcctgcttctaccttcctagctttccatccccaggataacaacattattgccattgggatggaggattcaaccattcacatctataatgtcagagtcgatgaggtgaaatcaaaattgaaaggccaccagaagcgtattactggtttagctttttctaccaatcttaacatactggtctcatctggtgctgatgctcatctttgtgtgtggagtatagacacatgggagaaaagaaaatcaattccaatacagctacccgcaggaaagtcacctgttggtgatacacgagtacagttccattctgatcaacttcgcttattggtagttcatgagactcaattggcaatatatgatgcctctaagatggaacgcattcggcagtgggttccccaagatgttctgtctgcccccatatcgtatgcagcttattcctgcaacagtcagttaatatatgcgacattttgtgatgccaacattggcgtttttgatgctgatagcttgaggctcagatgtcgtattgcaccatcaatatgcttgtcaccggcagctttaagtggaagtcaaggtgtgtatcctcttgtggttgctgcccatcctctagaacctaatcagtttgctgttgggctgacggatggatctgtcaaagtgatagaaccgaacgaatcagagggtaagtggggaacctccccacctatggacaatggaatattgaatggtagggcaggatcatcatctacaacaagcaaccacactgctgatcaggctcaaagataagatcaaatgtattttactagttattttcatctgtaattgtatcagcttagatgtttagatttcgattcaccaatatgtctcatcaatatcatgtcagcttggacataaaatggtaaatgcttagacgtagaatcgtgtataccttgatttattctagttaataactcaattttattgtttatatttatgttgtaatgtccctgtatcttgcttccaagtgtatgtcaattttccttgcccttgcggtacttccgat

SEQ ID NO: 3207 - DNA, 1105 bp, Glycine max
caaatcgtcttatcttcctttccctcgcctcgcctcgcctcccttcgcaagagtggagctctcgtcctgtgtatctcactggagctctgtggcccctctcacggtcttcgctatccaaatctctgaacgattcaacgacgccgtctttgagaatcgcgatttgacgctttattacgtgattctccctcctttctgccattaacttcattatcgggtttcttcaaagcgcaagttctttcagctaaacgattgaaggccgttagccattaaaaaagaccgaatcgttgcaaaagtggaagttttgtttggtatcaggtgatggcatctttggaaataaaatctggtgcattggtttctttacaagacctgcgcccatcttctcctttttttaagcaaggtgcttcactcagaataactggaaagttgcacgaatactctatagagacgggcctagcaacaattatcgatggtgatgacattctaaaagttagtaccaaacatctgagggaccttacttttcaagttggctctgtctaccaattcattggtgaactccttatccaacctgacaatgagggagttttgcaagcacgtgttggtagaaacgttgatgggattgatctcaatctttatcatcaatctctgctgcttttaagacagtttcaaaccaatcatttaaacaatccagcaacaatgtaggagtatttgaacacagaagtcgtcatgctaatataaaaatacacttctctctgtttttcccataaagacggtgttctgcactctacagtgttcattgtgtaaacagagtcttaacaatgttaagatttcattttattttattttattctcactttatttggctgcaaatggaacatgacatcaaagatctgttaggtatgagttgtgcttagctgggatgctttaaggggacatttagcttttcatgtgaagctatgcatcaaacttttggtcttcctttgttttgcaatctgaaaaatgaggtaagggagggggagggatggtggtatatttaaggcaacatagaagatactgtatttaaatgcatgtcagctgtctcttttttattgttaaaaaaaaaaaaaaa

SEQ ID NO: 3208 - DNA, 3445 bp, Glycine max
cccacgcgtccgcgcagaggaacgggatcgggtctcataaaaagggtacaacttgttgtttccagtgataataccacgcgcccggcactgtttttgtattctagaagtagaaggagagagagccctagttcgcgttctcgtcacacacgaatgcttctttgaccatggcttccacagcctcttcgctcctccgagcttctaggtccaaactttcttcttcctcctccgcttctctatctagaaccttcgctcgctccgctcctcgtcgatcccccggctcctccgccgccgccacccgctccttcggctccgccgtcccgcgatggagccgcggcgtcgactggcgctctcctctcggcctccgccctcatattagagccgccgctcccctcatcgaacgcttccaccgcagaatcgccactagcgctactgagaatcctttcaagggaaacctcacgagtctccctaggcctggtggtggcgagtttggaaagttctacagccttccgtcgctcaacgatccgagaatcgataggttgccatactctatcagaattctccttgaatctgcaattcgtaattgtgacaatttccaagttaaaaaggaagatgttgagaagattattgactgggaaaactcttctgtgaagcaagttgagattcctttcaagcctgctcgtgttctactgcaggattttactggagtccctgctgttgttgacctggcttgcatgcgtgatgctatgaataagcttggcagtgattctaataagattaatcctctggttcctgttgatcttgtcattgatcattcagttcaagttgatgtagcaaggtcagagaatgcagtgcaggccaatatggagcttgagttccagagaaacaaggagagatttgcttttctgaaatgggggtcaaatgctttccgtaatatgcttgttgtccctcctggttcgggtatagtacatcaggttaatcttgaatatcttggacgtgttgttttcaacactgagggcttgctctatcctgacagtgtggttggaactgattcacatacaacaatgatagatgggcttggagttgctggatggggtgttggtggtattgaagcagaggcagcaatgcttggtcagcctatgagcatggtgttacctggtgttgttgggttcaagttatctggaaaactgcgcaatggtgttacagcaactgacttggttctaactgtgacacaaatgcttaggaaacatggtgttgtagggaaatttgttgaattttatggtgatggtatgggtgagttatcattagctgacagggccactatcgccaacatgtctcctgaatatggtgcaaccatgggcttcttccctgtagaccacgttacattacaatacctcaaattaactggaagaagtgatgagactgtgacaatgatagaggcctatctcagggcaaacaaattgtttattgactataatgagcctcaaccggacagagtttattcatcctatcttgaattgaaccttgacgaagttgaaccatgcatctcaggacccaagagacctcatgatcgggtgcctttgaaagaaatgaaggctgattggcatgcttgtctagacaacaatgtgggatttaagggatttgctataccaaaagacgtacaaggcaaagttgcaaaatttgatttccatgggcagccagcagagctgaagcatggcagtgttgtgattgctgcaatcacaagttgtacaaatacatcaaacccaagtgttatgcttggggctggtcttgtagcaaagaaggcacatgatctaggtttgcaggttaagccatgggtgaaaacgagtcttgctcctggctctggagttgttacaaaatatctacttaaaagtggcctgcaaaagtatctaaatgaacagggtttcaacattgttggatttggctgtaccacatgtattggcaattcaggggaactagaccaatctgttgcttctgctatctctgaaaatgacattgtagctgctgctgtgttgtccgggaaccgtaattttgaaggccgtgtgcatcccttgacaagagctaactacctagcctcaccacctctagtcgttgcttatgctcttgctggcacagttgacattgactttgaaaaggagccaataggaacagggaaggatggaaataatgtttacttaagggatatttggccatccactcaagaaattgcagaggctgtgcaatccagtgtgttgcctgacatgtttcgaagtacatatgaagctattaccaaaggtaacactatgtggaaccaactacaagttcctgctgagaccctgtactcatgggaccccaagtcaacatatattcatgaacctccatacttcaagggcatgactatggatcctcctggagctcatggtgtgaaagatgcctattgtctgctgaattttggtgacagtataacgaccgatcacatttctcctgctggaaacattaacaaggatagtcctgctgcaaagtaccttctggatcgaggtgtggaacaaaaggacttcaactcttatgggagtcgtcggggcaatgatgaagtgatggcaaggggaacttttgccaacattcgtcttgttaacaagctcttgaatggagaagttggccccaagacagttcacattccgactggggagaagctttatgtgtttgatgcagcccagagatacaaggctgaagggcaggacaccattgtgctggctggagctgaatatggtagtggaagttccagagattgggctgccaagggtcccatgctattgggtgtcaaagctgtgatagctaaaagttttgagagaattcatcgtagcaatttggtaggaatgggtattgttcctctttgctttaaatctggtgaggatgctgacacattgggattgactggtcacgaacgttatactattgacctcccaagtaacatcagcgagataaggcctggccaagatgtcaccgtaacaactactaccggaaaatctttcacctgcacagttcgcttcgacaccgaggtggaacttgcttactttaaccatgggggcattcttccatatgtcatcaggaacctcattaagcagtgaagtcatggctgatgggaaatgttaaacaatgttgccactgcgtgtacacgttttgagtggtaatataatgtgagagaaatgagaataaattcaataaataggaaagatcccttcttaagaaggcaattttttgacacttccaggtaacatattaggcctgtaaacaacgagtgcattgattctagatttctcatgtctgtgttgtgtgcccattgaacaatggggggacaattgtattttttgtataagctgatgtgatccatgccgatggcagtgaatattcttttcatttaaatactccacttaatttccctaagactacagtg

SEQ ID NO: 3209 - DNA, 1397 bp, Glycine max
tacgtcagctacgtaggccccccccccgaagaaaaacaacatttgttttctttctgtccaagcaaattttccctcatttattctcctctcctcacaaatcacttcccttattcaataccaaatcaaattattccttctcaatcgattctcttcggccatgtttgcttacagggttttgtcccgttcctctgccaccctttctcgaagcttcacccttttctctgtttcacgaaattcccaacctttctccaccaacctctccaataacttcaattccctccttcacccatctcccaacaagctgattccagttcaaaccaattttctgaattcaatgaatccatcattgacttcgagatttggattttcttcaacggcctcacatgaacatgcaagtgaaggagcaaaggtatctgatcagtctgaacaagccgaagctgcggatcaaaccaaagaatcagatgtagagattgaatgtgatctgtccagggatgatttgataaagcttgttgctgagaaggaacaacttttgaagttgaagcacaaggagattgagaaaatgcaggataaagttctgcgaacttatgcagagatggagaatgtcatggataggacacgacgcgaagcggagaattcgaaaaaatttgctatacagaattttgcaaagagtttactagacgtcgctgataatttgggaagagcttcctcagttgtaaaggaaagcttttcgaaaattgaatctcctgaggagtcttctgaagcagcagaactcctgaaaacacttctaaaaggtgttgaaatgacagagaaacaacttgcagaggtactcaaaaagtttggtgtgaaaaaatttgatcctacaaatgagccttttgatccacacatgcacaatgccatcttccaaatccctgatgcttccaaggctcctggcactgttggagttgttctgaaggcaggatatatgctctatgatcgtgttcttcgtccggcagaagttggtgtaactcaagaagtggaggataactaagcagctgaatgatcatgatggcatgaagaaatgcctgagcagtggtgggttcttagtggatgccattcgatgtctttttgcaatatgcttctcctcaacactagttttgctggatggactgtattttgtcctgcacggaaaggactattcttttctcctattattcggagttttgttttttatttttttcttgataaaaaaaattccagtgtagtatgagctttattccttgagattttgatcattatagtaacatcttttgtagtggaacctctacatacccgcactgaattcaggagatctagacccttactatctgccgaaaaaaaaaaaaaaaaaaaaaaaaaaaattttaaaacgtccgagccga

SEQ ID NO: 3210 - DNA, 941 bp, Glycine max
  misc_feature (21)..(21): n is a, c, g, or t
ccataaactcataaaaataanaataaaaaccacccccataaaccaaattaatatttaatctgtacaatttatttcctcttggctaaagctggtgcctatatgtacccccagcaccagagaggagccaaagtcacagctgaaaatgctaaattcatttttgtcttaagtgcagtctcatgggaatattatgcttcatagctaaagttatataagtagttattattattattacttcggctaaggagggggctacacagccagcttcaacaatcaacagaaaatctttaatctgttaggatcatcgccattcgctgatgattcatcggtagatacatatatttcatgaccataaaccattgcaagacaaatggtaagagatttacaaatatgaagagtataatatgggcagggcaactgtcgattcagtgatagtgtaattacttagaaacaaacttaagatagatgttgtaacagcacagaccaaaatagagtcgaagtcatcagaaaaacaagctaccccaagctgctataaatgcaaagccgccaaatggagccatggttgaatattttctgtcttcaagaaatgcgacagtataacacgtcccagagaagaccaagataccagcggtcagaaggcctccaaaaacattggggtgttttgtaattggggcggcaactaaggcagcagtgtgaaccaaatggtaaagcgaagctgtgtgccaaacatctttgtaagcagggttttggggcttgaagacgtgggcaccataggttcccaatccaagtgctgccactcctgaaatcgcagcaactttgtgccacaactgaggatccattgacttcaccgcaaacgcaaaccaaagtataattatgtactctgtatgaattatttctttcttaaatttacttaaggcaatgggggggggggcctacgtagctga

SEQ ID NO: 3211 - DNA, 645 bp, Glycine max
gattattatttcagctaaggagggggctacacgtaatcagcttcaacaatcaacagaatatcttcaatctgttggcatcatcggtagatacatatatttcatgatcataaaccattgcattggcaagacaaatggtaaaagatttacaaatatgaagtataatatgggcttgacaactgttgattcagtgatagcgtaatttcttagtaaaaagcttaagaaattcagagccgatgtcatcagaaaaacaagctaccccaagctgctataaatgcaaaaccgccaaatggagccatggttgaatattttctgtcttcaagaaatgcgacagtataacacgtcccagagaaagccaagatacccgctgttagaaggcctccaaaaacattggggtgttttgtaattggggcggcaactaaggcagctgtgtgaaccaaatggtaaagcgaagctgtgtgccaaacatctttgtaagcaggattttggggcttgaagacgtgggcaccataggttcccaatccaagtgctgccactcctgaaatcgctgcaactttgtgccaaacctgaggatccattgactttaccgtaaacgcaaaccaaagtataactgtatgcaatgtattctttctttcttaaaatttagtt

SEQ ID NO: 3212 - DNA, 1810 bp, Glycine max
  misc_feature (1773)..(1775): n is a, c, g, or t
  misc_feature (1777)..(1784): n is a, c, g, or t
acttatgacttgagaccatttcattctcatctcacttctcaatttctcttcaccttttctccttccttttctcttgccgcaaacaaaacaaaccacacgcgcatgaaaatagtaattaatactactaattcatttcctcaacataaaaaaaaagagtttcgcggaatatacttttcctttccttctgttctggttaatttcgtttttccgtttcggagatggattcggaggatttccgatccattctggagagtgccggcgtcgacgtttgggccttcatggacgccgccatcgcggtggcttccgtcgaccaccccgacgagttaaagcgccggagagacagaatcgtggagcgcctttacgcgagttcggcgctgccgcagtgtcggaactgtgaccccgacgccggtgaaatcaggacgcagagcagtccctccgcggaggaggaaaaggacccctacggaggcttgctggacgaggagcagaagaagattctatacattaaagagcaactggaagaccctcaccagtccgaagattcgttagtggagttgttgcagaatctagcagacatggatatcacattcccagcgttagaggagtctgacattgggaggtatgtgaatcggttgcggaagcattcgtctaatgatgtcaagagattggtcaagttactcgtcaggaagtggaaggaaattgtagatgaatgggtgaagttgaagtccccgggatacccgggtactgctgtcatggctgatgaggactcgcctcagcagagaatcctacaaaatgggcaccgtcagattcctgattttgcatactcgccaaatccacacaatgggagttctgggtcatcacagcgcaacaatattgaagcagaacgaaaaccaaaagcaattcctcgcaaagaagctcccccaaaaccatcgccatcagtcactactcctgcttctcctcctcaaaacagacagagagaaggcaattttgacccggatagatttgcttcagcgagaaaacggcttcaagagaactacaaagaggctgcaaatgccaaaaagcaaagaacgattcaagtgatggatctccatgagttaccgaaacccaagaatgccttccttggaaaaaacaaaggcggcactggtcagggaaggcactggtgagtggtgacccataatgtacgtggcaactttcttgtaaaaaggctttttatgggtgggtgatgccgcatagtcctaaaaacccgcttgatccctttacaattttactccccaaaataaaaatccctatggttttatgtttccttatttaatatcaacccccgctttccccaaccaaaaaaaaccataatattttatgtgccaaactatgatttttatgaaatgtgggtgagttgcggagcacacatgatgatttcagcatcttaatgaggatggtagggaggggaaatgatttttttggagatttaaaccattgattattttgggttggagcttgagggtatggttaatgattgatttggtgctccagtaaggattgtttaacttgatttttgtctttgttcttatcttgaggccatatccaaagccaagtcaagagttgactactttctagctctactaatttgcacgggtgcgggtcagggtcgtggggtagtttagttggtgccatgatcaattattgtccggcctgggaccttagtaactgatctttctgatctcaacaaatgaagtggagcgcatttcaattaataattcatgtgcgaatcaaaaaaannnannnnnnnnaaaaaaaaaaaaaaaaaaaaaaaaaa

SEQ ID NO: 3213 - DNA, 1541 bp, Glycine max
  misc_feature (141)..(141): n is a, c, g, or t
  misc_feature (160)..(166): n is a, c, g, or t
ttaagttgggggtaaccgcccaggggtttttttccaggtcaccgacggttgtaaaaaaacgacgccccaattgaattgtaattacgactcaccattaggggcgaaatggggtaccgggggcccccccctgggggtataagntaagtaggggccccccccnnnnnnncagcacaaatcaaactgtgtgttctttgattgtgaagaaaaagctttgatgcaataggtaccatgatggtaggctctctgatcagcaaatggctttgctgcaatatcagcgtgaaaatcttcattttttgagtgaggagattcttcgattgcaagagtgtctaagcaaatatgagggaactgatgatcggagcacaccacaggttgaccttgcccatttactagctgctcgtgatcaagagttacggacactttctgcagagatgaaccaagtgcaatctgagttgaggcttgcccgttccttgattgctgaaagggactcagagatccaacatgttcgcacgaccaacaaccaggtatctcactggatttactaatactgaaaagtgtatgtgctttgactgcaaggtgcttacagtaaacatcctaacagtatgtagaagagaatgaaagactaagagctatcttaggggaatggagcacccgggctgccaaggtatttattattcatatctgcaataaatgcgaacagctaccaactgttacaatatatactccatccggtcttaatttataagcaaaaaagacatgtttcacacttattaagaaaattagttaattttattaaattgtgtcattttcaattaaaaaataaacattttctaaactatatttcattgaaacttgatatcaagcataaaaaaaagtctttgaccttaataaatgaagaatattttagagagaatctcattaaataagacataggtaattaagatttgtttatatttaagacacaaaaataagaaacatgcccagttcgtgttgagcatttaacactacagtattatattcgagaccagaggttgagtacttcggttgggttttgttgttgtgaaagtatattctgcttaaaccttttattatcaatgattaaagcttgagcgagcactggaggctgagcggatgtcaactcttgaattacaaaggaaactttcaacgcttagaagtcaatcatatacagcagatgaagcaaacgaacttggagcttaactcacttgcaggcaaatatggaacatgcccagttcgtgttgttgagcatttaaccttgttctcacaatttaaaaagaacacttagacgtgtgtccaaggtaccgtcactattgtggagagattcaatgtacatattagcttcaaatagggttttatttttgttaagagaaattcaaattgatgtaatttaattgagttatcgtgcgccattgttctccaaaaaaaaaaaaaaaaaccaaccaaaaaaaaaaaaaaagaattcctgcagctgtttaaacacgataaattcttaaactaacaaaatatatcgaaactagacaataaag

SEQ ID NO: 3214 - DNA, 1992 bp, Glycine max
ctcgagccgattcggctcgagttcaacgtcatagttcaaagaaacgacaagccatgatggattcctctggtgccaccaacgagaagctcttagaaaatggcactccatcttcttctcaaatgagaaaaggtggcttacgaaccatgcccttcatcatagtgaacgagtctctggagaaagtggcgagctacggaatcatgcccaacatgatactgtatctgagggacgaataccgcatgtctattgcgaagggcacaagcgtaatttacacttggactgccgcgtccgacatcttgtccatcttcggggcattcctctcagattcttacttgggtcgattcctcgtcattgctatcggttccttctccagccttcttggtttaaccatgttgtggttaactgccatgatccctgacctaaaacctacctgtgaatcagacatgttaggctgcaactctgctacagcagtccaactagctttgttgttcttttcaatgggattaatttctattggagctggatgcgtcagaccgtgttccatagcctttggagcagatcaactgacaattaaagaaagatctaatgatgagaggctcttggatagctactttaattggtattatacctcaattgcaatatctagcatgattgcattgagtgtaattgtgtacattcaagaaaatctaggatggaaaattggatttggactacctgctttgctaatgttcatatcggctgccagtttcatcctcggttcgccattctatgtcaaagtgaagccaggtcacagcttactcactacttttgtgcaagtagctgtggtggccgtaaagaacagaaaacttagtcttcctgattgcaactttgatcagttctatcaagatcgtgattctgagccgatgatccctactgatagccttaggtgtttgaacaaagcttgcataaaaaatactgggacagtctcaaaccctgatgtatcagtttcagatccttggagccaatgcacagtgggacaagtagagtcgctaaaatcattggtcagactcctacctatgtggtcctcgggcgtcttgatgatggtgtcccaaggctcattctctaccctccaagcaactaccttggaccgaaggttatttggcaatttcaagatgcctgcagggtccttcaatcttatcatgatattgaccttatcaatagtcattcccttgtatgaccgcattatggtccctctactagccaaatacaggggcctgccgaatggattcggtagtaaaactcgaattgggattggattgttgtttgtatgcgcagctaaggcgacgtcagctgtagttgaaactatgaggcgaaatgcggccattgaacaaggctttgaggaccaacctaatgctgtaattgacatgtcggttttttggctgtttcctgagtttgttttgcttggaataggcgaggcttttaactcggttgcgcaggttgagtttttctacacttgtatccccaagaccatgtctagttttgcaatggctcttttcactcttgaactagctgctgctaatgtagtggggagtgtgttagtgagcattgtggacaaggtcactagtgtcccccccccccagagctggatagcaactaacattaacaggggacatctgaattactattatgcactgctcacttgcttaggtttaattaactacctctactttcttgctattagtttggcttatggtcctcctcccgggcaaaaacttaagctagaagagaaatttgattgcaggaagttacctacttcctagattattctttatacaacatgtactgtaaacgcctgagaaattgtggttttgtaagttgttttatctgtgaaattaataggctaaatgtagatctgtcctaagagttttgtgatcttgtacagtagaggtatatatgatgtaaaagtggaatgaaatgaatgtatctttcccacgcctaaaaaaaaaaaaaaaaaaa

SEQ ID NO: 3215 - DNA, 2554 bp, Glycine max
gtttgtttgttggttggtttttttttcttctttctgttcttgttgggctgttattcccttttcggctcattgcagcattctacactgaacggcgtgtttggatggaagcctaaaaattgcggcaattgcgaaagctattactaatcacttggacgtgggacattcacgttcgcgcttcttttttctcttggcattgcgttaacgttgcgtttgtgtgtgcaattaacatcacacaacaaaaccttgttcgttcttctctgaactctctcattagtgtgagccgagagtcatgacggacggtcatctcttcaacaacatcaccctcggaggccgtggaggcaccaatccagggcagataaaaatatatcctggaggaattatatggaagagacagggtggtggtaaattaattgaagttgataaatctgacataatgggggtgacatggatgaaggtgcccaggagtaaccaacttggtgttcaaatcaaagatgggttgtactataagttcacgggatttcgtgaccaggatgttgtaagtttgaccaattttttccaaaacacctgtggaatatcagtagaagagaagcagctttctgttagcggacgtaattggggagaagttgatctaaatggaaatatgctggctttcatggttggttcaaagcaagcttttgaagtgtctttagcagatgtctctcaaacgcagcttcaagggaagaatgatgtgatcttggagtttcatgtggatgacacaactggagcaaatgagaaagattcactgatggagataagtttccacataccaaattccaacacccagtttgttggtgatgaaaatcgtccccctgctcaggttttccgtgacaaaattatgtctatggctgatgttggtgctggaggtgaagatgccattgttacatttgagggtattgcgatccttacgccaagaggacgatacagtgttgagttacacatgtcattcttgcggcttcaaggacaggctaatgatttcaaaatccaatatagcagtgtggttcgcctatttttacttcctaagtctaatcaaccacatacctttgtcattattagtcttgatccccctattcgaaagggacaaactttgtaccctcatattgtgatgcagtttgaaactgattatgttgttgaaagtgaattggcaataaatgaagatctttataacacaaagtacaaggacaagttggatctgtcttataaggggcttattcatgaagtgttcaccacaatattacgtggtttgtctggtgccaaagtgaccaagcccggaaaatttaggagttgtcaagatggctatgcagtgaaatcatctttgaaagctgaagatggaattctgtatccccttgagaagagcttcttctttctacctaaacctcccactcttattcttcatgaagagattgactatgtggaatttgagcgacatgctgctggtgggtccaatatgcattattttgaccttcttatcagactaaaatctgaacaagagcatctcttccgtaatattcagagaaatgagtaccacaatttgtatgaatttatcagttcaaagggcttgaaaattttgaacttaggagatgcacaacctactgttggtataaagaaggttcttgagaatgatgatgatgatgctgttgatccacatcttgagcgcataaaaaatgaagctggtgaagatgaaagtgatgaggaggattctgattttgttgctgacaaggatgatgaaggttctcctactgatgattctggggcagacgattctgatgccactgatagtggtgatgagaaagagaagcctgccaaaaaggaatcaaagaaggatctgccttctaaggcatctacttctaaaaagaaatcaaaagatgatgaagatggaaagaagagaaaacagaagaagagaaaggacccaaatgcacccaagagggcaatgtctggtttcatgttcttttctaaattggaaagagagaatctaaagaaaactaatcctggaatttcatttacggatgtgtcaagagtacttggagagaaatggaaaaagttgtcagtggaagagaaggaaccatacgaggcaaaggcacgtgaagataaaaaacgttacaaggatgagattagtggctacaagaatccgcaacccatgaatattgattcaggaaatgaatccgacagtgcctaagctccgtatatttcttactggagtggtgatgacatctactctcatgctccgtaagttggcacatttatgctcttggaaatggcttgataacttgtgaacatgctcaagagttttgtgctctgttggtttgcatggctatagggaaggcagggacggtagagcttgatgtgttgagtaggttcctatgcttaattgaattagtggtctttgtgaattgtgacccaattttcgctaaatgacagtgcctctttttagagtttatgaccggcagatgtaggatttgtaacaatttttttgcttcaactctttgcacgaataggatttaaaatattagatcaaaaa

SEQ ID NO: 3216 - DNA, 1600 bp, Glycine max
attttctgaaaaggggttaggaatcgagaaggagaagaagaagaaagggttggcttcggccccaaaacacacacacccactgcgagagagagagagaaatgggagagggagagaacacagaaatagaaacagaaacagaatcagaagcaacatcgacatggagcctcggaaaacacactcagataatcgaactttcggagacgctgacgaacgggaacctcagcgccaagattgaggccgcgagggagataaggaagatggttcggaaatcgtcgtcgtcgtcgtcgaagacgcgcgcgaagctcgccgcagcgggtgtgattgaaccgctcgtgctgatgctctcttcttccaacgtcgacgctcgccaatcctcgctcctcgccctcctcaacctcgctgttcgcaacgaacgaaacaaggtcaaaatagtgacagatggtgccatgcctccactggtggagctcctcaagatgcaaaatagcagtatacgagaattagctacagctgcaatcttgacactctcagctgctgcatccaacaagccaattattgccgcatctggagctgcacctctccttgttcagattctcaaatctggaagtgttcaaggcaaagttgatgctgttacagccctccataatctttctactagcattgcgaattccattgaactccttgatgcaagtgctgttttccctctgctcaacctccttaaggagtgcaagaagtattccaagtttgcagaaaaagccacagcactgcttgaaatcctttccaactccgaagaaggacgaacggcaatctcaattgcagatggtggaatcttaacactagtagagacagttgaagatggatcacttgtcagcacagaacatgctgttggaaccctgctatcattatgtcgaagctgccgagataaataccgggaactgattctcaaagaaggagcaattccgggtctgttacgtctgacagtggagggcacagctgaagctcaagatagagcgcgtgtgcttctggatttgctcagagattctccccctgaaaaaagactaacctcatcagttttggagaaaattgtttatgacattgctgaacgggtagatggagcagataaagctgctgaaactgccaaacggttattgcaagatatggttcaaaggagtatggaacacagcatgaaatgcatccagcatagggctgcatcttgtactccttctattccatccacttgatgtgtacctttttttcctcatcaagcaactgcacaattgagttttaacttgtatatatgtgtttttattgtattttttttttctctggggggaaagttagtatgttaactagatcaccatgcaaagtgagtctaagctgctctacatgactagtgtaatgatttttaccagactaacttgggattgatatgttgacctcattactcaattaattacatttacacctaattacttcgacctggatggtgtctgtgctttgcacatacataaaggagtctgtacttgcatgtatttctttttcaccgagtcatgaacttgtgaaagattgctaattataagctctctagatcaatcaatggaaa

SEQ ID NO: 3217 - DNA, 587 bp, Glycine max
aagtttagtgtgtttagttgaagacttcacaaccctagctagcagtccctcagcattgtgtgcccacaaagcagctccttttcctgttccgtcgagagaagatgggattttgggggacgcgggtgatggagattgtgaagaagcatgattctggagggctggtttggaagagaatcaagctcaccaccacccgaaaagccaatgctaagaagcgtcttcttcgggtttggcagaatgaagctgtcctcaaagcctgttctgccactcccaacgaacctcaacctacaccagtggctacaccagtggctagttaagttcaagcccacccatctcaatttcattacttttcttttcccttcccttcaaaaatattgtcactacttttagggcttcatttacataattaaaaatcatctggaggaggttatgcttgcttgcctaggcatggcttatgctcttcattcttattatgattttttgtttctggagtatcagtaccattacttgcatggcgttagtaggttttacttggctggtcaacattgaaatagctggtttgtgtaatttattgaaatctatggatgcgg

SEQ ID NO: 3218 - DNA, 859 bp, Glycine max
gccgaatttaaacgccagaaagcttacaaatgcagccaaaagttgcatactttaatttgctttgcttctttactcccccatttgcttccaaacaaaggaaaaatcactctcatctgagaatccaaacctcctcctaatttaagtggtgggtcagctactatggcttcctctctgttactggcggtggtgtttgtgcttgatctggttgcttttgctctcgctgttgctgcagagcagagaaggaatactgcctcgttaaataaagacagtgcaggtagaaactactgtcaatatgactcagacattgcaaccggcctaggtgtggggtccttgtttatcctagttgccagtcaggtgatcattatggttgtaactagatgcctgtgctgtgggagagctatgagacccagtggatcaagatcatggtcaatttgcttgttcatcactagctgggtgacatttatcattgctgcttcgtgccttctagcgggttctgtgaggaacgcgtaccacaccaagtaccgtgatctcatgggagagagagcaccttcatgccagaccttgaggaagggagtgtttggagctggagctgccttcattgttctcacaggcataacctcagagctctattatgttagtttttcaaaagctaataataatggtccccctccctatgctagggacactggtgtgaggatggccaatttttagtagtagtgtggggaaattaattaattgtttgtaatgttaagttggatgtgaaagcctacttgtaaattattatgaaccttatttccttccttttgactcttcaatgatcaatcatgtcacaataggtgatgcaaaacgcagcgggttt

SEQ ID NO: 3219 - DNA, 854 bp, Glycine max
ttttttttttttttttgattaaaactccccattcataatagtattccgtaatcatacataactcaaacttacacgtgcatcaacacagaaaattacacaacacaacagatcttagagaattagagaccaatccaaattcacaaatagacaattacatgaaacacattacaatacactaagcacacggaagggagtcataagttgttttggtggttggagctataagaaggccaaggttagaatctcccactaataaaacattaattattaaatctgtcaatataaaaataaaactaagcacatgcgcaagaattattatcaacaacaagcgcatcatcctccccctcattcctgaagaaaaaataaccaatggtgagacccaccacaattgctaaaaacacccctccattgaaggacatgatcgccaacatcaacaagtacccgatcgcagagttcaccccgaacagaaccgcttccgcgaacttgacgcccaacctggcattgtcgccgccggcgacgccccaccggagaagaggggtgcggatctccggcgccggcaagggcctccggtcgccggcgaggagcttcaggcgaatccggcgattctcgaggtactgatagaacgcggcaacgacgaggcaggcgagtagactcaggacgtaactcgtccaggaatcggtcttccatgaatcgatcaagatcgtcaccttcttgccccagtaaagggtcaagtgcatcattttcgctcttgaaaaattatcagagagacacacaacaacgtgaagaaaaaaacgctgttttgaaattttccttgaaattttcgagggtgttgttcacagagtacaaggaataag

SEQ ID NO: 3220 - DNA, 879 bp, Glycine max
cccacgcggtggggaattggagtggccagcgtaagaagaatggcttctcaaagtttgagtttaccaccaacacatattccttacaataggataattgggaagcttgattccaagtttttgttgtggccttcttgtgctcatatcaaacccagaagaatttctacctcaattcgggcaatgggttcctccgcttcttcccactcccagtcacaatatgcagacagcgttgaatctgaagcaggagctgatactattgactataaatctttaaccgatgaagagtggaagaagcggctcacaaatgaacagttctatattactcgtcagaagggaactgaaagagctttcactggggagtactggaatactaaaaccccggggatttaccattgcatatgttgcgacacacctttattcgaatcatctactaagttcaatagtggaactgggtggccatcctattaccagacaattgggaaaaatgtgaaatcaaagttggatttgtcaattattttcatgccgcgccaggaggttctctgtgctgtttgtgatgctcatcttggacatgtgtttgacgatggtcctccacccacgggaaaacgtttctgtatcaatagtgctgcccttaagctcaaaccaaagcagtagacagtgaaatacctacctatcactcggaagcagatggtataatattctaaatatgtgatatactttgtgctgtttttcctatttatggagaacaacaatgaatattgtcttgaactgttgatgtataaaacacaaattttatagaatctagaagctcaattactatagtgaagactcaaattctaatactaatgaagtgtcggcatgtacttgccattgtttcatgagact

SEQ ID NO: 3221 - DNA, 901 bp, Glycine max
  misc_feature (7)..(7): n is a, c, g, or t
ccggatncgcaagtccggcctacgacccacgcgtacggtaacttgatatgcaaagactcattgatatatgtattgagagcgtgggagaactgattcagtcaaattttggcaaagaggtcttatatgaggttgcaacagggggttctgagggcataatgcacccagctttaggtgataagataaattccctccacaatgcagtagcttctcttgcagcaatgcctaaatcagaagattcacaagaggagcatgtccttgaaaatttccattcaagtcgcaccattagaaaactgattttggattgccccaactttgcttccaccttatgggaaaaagctttaaaagggaaaagtgagttatgggtgcatggccacagctgtaaggttatttctgcatttttggaatcaccagacccgactgtacaaaaacttgttaaaaaagagctacagcctttaattgacaatggaattctcaaaaacccaaagcctaaagaacaagcaaaccaataattgtcgtgtatggagaaggaaactatatctcaaatggacaggtttgctccacgatatcagtagccaagttatgacatggaggcagtagcgaagcttcatttttgagttaaaaggcacaaactaaatttgatgagaaagctgctgtcgtaattttgacaaccagaagaaacaatgacattacttgatgtaatgatctacttttgcatattttcaaaatgcagcaattttgcaacacagggagtgttaccggtctattgtaacatgtatgcgtttacgttcttattgtgttcagctgtttaatttgatttttcaagctatgttggccgttatttttaattaatcaatgcattttttactcttggagattctaaaaaaaaaaaaaaattaacaag

SEQ ID NO: 3222 - DNA, 2356 bp, Glycine max
tcagctacgtaggccccccccccccccggagagggttcatttccattgacaggcgatagctgcgagtaactcaacctcctcttcagagcttcagcaatggcggcgaagaagcaggacgccggggacaccaaaaagagaaagcgactcaatactgaagctcccaaggcttcgaagctcgttgcctcaaagaagcacaaaccagactccgttgctaaagacaacaagaacaagaagacggcccctcttaccggccgagaacgtcgtcttcatgccaaggaactagcagatgctagaaaaaagaagagaaagcgacatttcactcttgagcaagagcttgcacgtctgtgggaaaagatgagacgtcacaagattgctaaagaggacagagctaagctagtgactgaagctttacgaaagatgaaggggaagattccagagattgtgggctctcacatctcatctcgggttcttcagacttgtgtcaagcattgttcacaagctgaaagagatgcagtatttgaagagcttcggccacattttctaactctagcattcagcgcttatgctgttcacttagtgaagaagatgctcgacaacgcttccaagaaacaactagcaggctttatctccactctccgtggtcatgttgctcctcttcttcgccatatggttggatcgattgttgttgagcatgcttatgagttagcaaatgctgcacagaagcaagaactgctttcggaattatactccacagaacttcagttgtttaaggatctagtctcattgaaagagagcagattatcagatgtgatgtccaagttgggtctacagaaaggttcagttctgcgacacatggcgtcagtgattcagccaattttagagaaagggatagttgaccactctattttacacagagtcttaatggaatattttagcattgctgataagtcatctgtcacagatataatccaacagttatcaagtccactcattgttagaatgattggtacaagggatggagccaaaattggaattctttgtgtaaaatatgggaatgccaaggaaaggaagaagattatcaaaggattaaaggggcacatagacaaaacagcttatcatcaatatgggtgcatggtgctggtttgcatcctttctgttgttgacgacacaaaactgattacaaaggttatcattcgtgagcttcagtctattctaaaggagcttgttctggataagaatggaaggcgtctcttactccaattactacatcctaatagttcacgctatttcagtcctgatgatcttgcttctctgaatttatctataccttctctgtctctcaaggatcagtcagaagcaagctttctgacagaaacttcaaaggtttcacttggtgacaaggaatccaaggaagacatagaggtggcagtggatgaagttaataaagataaaacttctgcggatgattctgacctagctgagagtgggaaaaaagacccatttgtcagaaggcaggagctattgatcaagagtggacttgcagatagtcttcttgatatatgtatcgagagcgtgggagaactgatacggtcaaattttggcaaagaggtcttgtatgaggttgcaacagggggttctgatggcataatgcacccagctttggatgataagataaattctctccacaacgctgtagcttctcttgcagcactgcctaaatcagaagattcacaagaggagcatgtccttgaaaatttccattcaagtcgcaccattagaaaactgattttggattgccccaactttgcttccaccttatgggaaaaagctttaaaagggaaaagtgagttatgggtgcatggccacagctgtaaggttatttctgcatttttggaatcaccagatccgactgtactaaaacttgttaaaaaagagctacagcctttaattgacattggaattctcaagaaccctaagcctatagaacaagcaaaccaataattgtcatgtatggagaagggagctatatctcaaagggacaggtttggcccaagttatcagtggctaagttatgatgtggaggcagtagctagcttcttttctggatttgtagataatgagttaaaaggctcaaactaaatttgatcgagaaagctgctgtggtaattttgacaaccagaagaaacagtaaaaattacttgatgtaacgatctacttttgcatatttttaaaatgcagcaattttgcaacacagggagtgctaccggtctattgtaccatgcatgtgttaacgttcttattgtgttcaactgtttaatttgatttttcaagctatgttgcccgtaattttttaatt

SEQ ID NO: 3223 - DNA, 1746 bp, Glycine max
tcagctacgtaggccccccccccccgacttattccttgttcagtgttgggattgattttttgtaactattctataactctgctagaattgcccttctaccttgtcaatctgaattttaggtgtgtagtgcctttaggctttagatatattagaaagtggagttgacacatatatctccttattgatagggatgctcatatttctgctgttgccttccatcctactcgtcctatggctgtcagcacatcttatggtggagatttcaagatatgggtctgcaaggaagaaattcagcaaaatggccagatggttcggaattctggttggaagtgtcatgctgttgggtcatacaaaaataaagccatgagagctgctgctttctcagctgatggttctgtgctggcagttgcagcggacactgttattacattgtgggatcctaataataatgtcctcattgctgttataggagaaactccaatgcctattacgagactcgtctttgctggaaagtcagattatcttctgtctgtatgtcatggttcaaaaccacagctgtctgtttggagtatgtcaaagttagctgcttcttggtcatacagactccaaatagaagctgtctcctctgcaatagacttgtcatattttgctgtccttgcgctccttcccaaatcaaatgaatgtacatttaaaggtgatgggataatcttattattcaaagtgacagatcctgttccggtggcttcctggtctgtaactaaggccaagggagggaggctggcttttatccaaggagatccatttgaacgagcagttattgatgggaaaccaacacagacactgcttgcatatataaatggagatcatgaatatgtcatctttcatccatctggcagaaaagcctgtgagcttagtatgactaagcaggatgatcttgcgtttgaagaaacaggacaatttggatacgcatcaatttatggggagctacccaagtttgatttgaaaaggaaaatggactcatcgatttcatctgctgcttctgcttccaagaggccttgggaaaccatatttagtggattatcacaatcgttgccacccctcactaaattgtgctcggaatttttggagtccctgctggagaaaaggacagcaactgtagaatgacagaagcactccatccacggaactccatcaagggatgatatttgtttctttgatgcccacctagcagaggtcaagaggcctatggactggacttgaagttaagatatttgaatgttctcttcaagaatggtgtaaacactaccttctacccgctgcaggttggtctggcattagcaatttgccattttcacatgatgggactatttgtcaaattagctgatgcaggaaaagatgggacaacaaagatttcagctttaaatggttggctagatggtttggtatacctgagatgtcccccctctctaaaacccgattttgcctttgctagtgtgacctttagttatatatattctttaattttcaatttttcagttcttggatggggcgaaaattttgacagtaacgaatgattttgcagtgtagcaatgttgtaagcttgatcactgtcaacgagtctaggtagtatagcggtgaatgctatggaagctacagttcctatgtctaaaaattaagaaagtgtgatcctaaatatagtgataatttgctttttcgtttttcaaaaaaaaaaaaaaaaaaaaaaaa

SEQ ID NO: 3224 - DNA, 2170 bp, Glycine max
tcgagtcagctaccaaagcctcgttttattgatgtcccggttttatttttttagggttccatcccatctattctatctatttagataaaacacgaaatcccaatcttaatcgcaagcaattcctctctctgagagaagctctcgaaattcttctgatactcgtagaattttaatggcttgttcatcatccgattcaaaaaaaccagtgacgtcgctgttgttcttttccttcctaattccgataccttccgattctctttccgccctacgcatactcgatacttgttcatctctctctttctcaaattccgattcctttttgtagcatacacaccgtactagcccaactaacaaaccaaacaaaaccgttaccatgggaaaacgtaattctcaacgtaaaagtgctgcgatgttcgatagtgatgacgatagtagcgtgacttcgtcgtcaactgctcgttctgatttgatgtcggtgtctggggctgaagatgttcaatttgttcaagattccttgctcgaccaagctctcgacgcattagatgagaaaaggggttccacgagggagaaagctttgtcatcgatcattgacgctttcaatagcaacatgcagcatgagtttgtggagaagaaatttgctaccttactacatcaatgtcttgcttcaataaaaaagggatccaaaaaggcatctgctaaggagatagctttggcatctcatgccattggttgtttggccttgactgtcggatgcggtgacaatgcccgtgagatatttgaagaatccattcgtcctttggatgaatctctcacatctaggatagatgtttcaaagacaccatcattactggagtgtttggctataatcacttttgttggagggaatgatcaagaagaaacagaacgatcaatggacataatgtggcgagtgattaatcccaaattaggttctaatgtagttgctgtcaaacctcctgcttcattaattgccaatgtggtgtctgcatggtcttttctcctctctactgtgagcaatttgaagctaaattcaaaaaactggcagaattcaatatcctatttatctagtcttctagacaaggaagataggtctgtacgaattgctgctggtgaagcactagctctaatttttgaaattggagttatagataaattttctgctgagttagacagtgcaagtgatacaacgcaagggagtaaaccacttgaaagctacatatttttacaaggattgaaaggaaaggtgataaatcaatgcaaaaatctttctacagaggctggtggaaaaggttctgcaaagaaagatcttaatagtcagaggaacttgtttcgagatatcttggatttttttgagtatggttactccccggatatttcaatgaagattggtggtgattccctgcaggcatcatcatggtctgaaatgatgcagttgaattttatcaagcattttcttgggggaggattcatcaagcatatgcaggaaaatgagttcctacatgaagtctttggtttctcaccgaagagaaagtatcttaataccaacgaacacagaatgtctggtggtgaaaagagaatgtttaagtctccaaattcgtttttgaacaaggctaggacgcaatcacttaataagcagcggatattatctgagggcagaaacttcggccactacgctgtcggtgtggttgacgaggaggcatgaatttgactggaacaacaataattatgtctcaattagagattcaatctttcatttcatgtacaacattcatatattttatcagtgtttatacttttggtcttgttacttttatcaattatacagtatattcccatgacatgggatttataatatgaatggcaaatagatactaataagaacggatttcatttggttcgaaaagtttatttttcaaggttatgcgcagggtttgaagagttattaaatgactttgaaatatgttattatatttgtggatagtctgaaatagttcagaccaaataagaaagagtggttgttttagtttaaaaataagtaaagataaataaaaatatgtagacaatgtagttactttaaaattagcagtgcgtgacttctaagtccaactttaggggtatctaactatctaagtaagcacttttcaatttttat

SEQ ID NO: 3225 - DNA, 804 bp, Glycine max
  misc_feature (679)..(679): n is a, c, g, or t
  misc_feature (691)..(691): n is a, c, g, or t
ctttaatcaaaacctcgttggctcgtgtttttttgtgtcccaaaaaaagccccgttttatttttttagggttccatctatctatctatttagataaaacacgaaatcccaatcttaatcgtaagcaattcctctctctgagagaagctttcgaattccttctgatcctcgtagaaatttaatggctttttcatcatccgattcaaaaccagtgacgtcgctgttgttcttttccttcctaattccgatacctttcgattctgtttccgccctacgcatactcgatacttgttcatctctccctttctcaaattctgattcctttttgtaacataaacaccgtactagcccaactaacaaatcaaacaaaaccgttaccatgggaaaacgtaattctcaacgcaaaagtgctgcgatgttcgatagcgatgacgatagtagcgtgacttcgtcgtcaactgctctttctgatttgatgtcggtgtctggggctgaagatgttcaatttgttcaagattcctttctcgaccaagctctcgatgcattagatgagaaaaggggttccacgagggagaaagctttgtcatcgatcattgacgctttcaatagcaacatgcagcatgagtttgtggagaagaaatttgctaccttactacatcaatgtcttgccttaattaaanaaggaatccaanaggcatctggttaggagatagctttgggatctcatggcatttgttggttggcctttgctgtcggatgcggtgacaatgcccgtgagattttggaagaatccattcgtcctttg

SEQ ID NO: 3226 - DNA, 1733 bp, Glycine max
ctcgagccgattcggctcgagacagccttgaacttgaactatcgtgtcttcttggctttctctgttcaggatcaacatggatattgtatcacgagctttgctatttccgttggctatacttgtgctcatattaagcacaccttgctcaggtgcttttgggaagagtggaactaatgtgaaaacagctatttttctgtcccccaagtttgaacttggaccaggatcggtagccaataaatatgattatgacgctgattttccaagaggtcatatagcacttaagagtttcaatgctgaagtagttgatgaagcagggaaccctgtgcctcttcatgaaacttatctccaccactgggttgttgtaagatactatcaacctaaatatgtgacgacacacacaaactatgatggacataggatacttcacaactctgaccatatatttgtgaggaacagcggcttatgccagagagatactctaggacaatactatggccttggatctgaaacacgaggaacagctacggatgttcctgatccttttgggatagttgtaggtgatcctgcagaaattccagagggatatgaggagaagtggatggttaatatccacgccattgatacgcgccgcgtggtggataggatggggtgcactgagtgtaggtgtgacctttacaatgttacaaagaaagaacatggggagcctctaagttcagactataaaggaggttattattgttgttatgatcaaacccagtgcaggttgagggaaggctttgagggcccaaagaggagcctctacctaagatacacagtgaagtgggttgaacccctcgagctcctagtgcccccaccgccccatatacttgatgtcactgatactttaaaatatcagatgattctagtggaatgatccctgagcatgatttcaagaccgagtatgaagttgaatcttgcagcactggccaaaagaatggtaatggctgtcttgatgtgaagagaacaagcctcccaatgcaaaagggtggttatgtcatatatggtgttgctcatcagcattcaggtgccactggatcaactctctatgcacaggatggaagggttatatgttcttcaataccaaggtatggaaagggaaaggaagcaggaaacgaagtagactacattgtaggaatgagcacatgttatcctcaaccaggttctgtaaagataattgatggtgaaactataactctagagtctaactacagcagcagccgtggccacactggagtaatggggcttttctacctattggtggcagaacagcttccacaccaacacttcagatattcttctcgttcttcattttttatgaatataaatagtataattcattgatagataagttgtgagatgcaaatataagttgagtgtcatatcgatggtatcacagtatgtatcacggttaaaagaaatacagaaatacatatcgatggaacatatacttctcatattcggcagcaataggacaacacacgcaagaaccggcaaagagcatattttcaagtttaaggattgtagtaatgtgattatcaattatttgtattggtgagggtttgtaatgtttgtcttaaaccagtcttgcttattatggttgtgtgatatgtaatactatatatatcatgtttgttgtaaataaagtggtcttatataactagaagagagaataaatcaagctgttcgacagggac

SEQ ID NO: 3227 - DNA, 1889 bp, Glycine max
cttttcaaaaccctctcttatttcctctttctgaacattactgtactttgttgtcatcatggagaagaatagctactaacgttgttcagactttggagcttcctttgtttgtttgttgtctctttctgtgtttcaggtttggattttgaaattgtttacgcattgccgataggtttgctcaaagtaaactaaagggaaataaaaaaaggaaaatgatcggaaacttcatcgacgacattgactgcggcaacttcttcgaccacatcgacgaccccctcgaattccccgacgacgccgccgccgctgacacctccgccgccgctcctgtccctccaccggcgaacttctggtccgtcgagtccgactcgctccccgccaccgacacgccccccccccacaactccgtgacggacctctcggccgagctctctgttccgtatgaagacattatgcaattggaatggctgtccaattttgttgaggactctctctctggtgggagcatgaccatgaagaaagaggagccacaatgcaccaccaccaaggaggacatagctcctgcccagttccagacagcaagcccagtatcagtccttgaaagcagcagtttctgctctggggagaaggctggcacggagattaacatctccgtgccatgtggacgcgcgcgcagcaagcgcccgcgtcctgcaaccttcaaccccaatccagtgatgcagctcatctcccctgcatcctccccccgggagaacacgcagcacaacgctgccaacacctccaaggcatcatcggattccgagaatttcgctgagtcggtgatcaaggctcctaagcaggcctctggggagcacaagaagaaaaagaagatcaaagtgactttcccatcaggtcaagagcggaatgcaccatcacaggcaattaggaaatgcttgcactgtgagataaccaagacaccacagtggagggcagggccaatggggccgaaaacactctgcaatgcttgtggcgtgcgctacaagtcaggccggcttttccccgaatatcgccctgcagcgagtccaacgttttgtgcggccatgcactccaactcccataagaaggtccttgaaatgaggaacaagacaggcaccaaatctggctttgcaactgtttctgctgcctcaccagaactcattccaaacactaacagcagccttacccttgaatatatgtgaaagggggaaaggaaggattctagttggagaattctctaattctctttcaagtcttctcttgagtcatgtcttatacaaggttttgaattgcattctacaaactgcaatgttaaaggttttagaggtgtctgcaactgcgttgtggttgcggttgtgactgcatcagccatatttgtccacaattttgatggcaaccgcaagttaaaaccttagtctttgtgttatttcttgtctgtcatttatttttctcattggatttttgtacagggctggaatggggggataggagcaaaatagaacatgatcatattgtagctatatttagaactgaagaacaagggatagagatatgcaagtcaaagagggtagagtcaccagagtgttagccattttaggtctagtaattgtagcagtactcaggaggagtctttgttacttttcttattctcatcatttttcatttttttttctttaatttctgtttctaaatatccctccctgtagcaaattctttttgctgttcatttgtagcaaaacttatgagttgatcaggaaaggaacttttggaatttgccttcttccttttaatgttttgtcttgtgcatatcctttcctaatatctgcaagctacaatgaggaagtatatgccagttatgattttgagtaatactgcag

SEQ ID NO: 3228 - DNA, 1077 bp, Glycine max
atgtcgttaatgctgaattgcaatgactcagaattgtcaatttcgatttctaggttctcttctaggatagatgtagatataaatgagcaccacagcagcgacgaccacaacaactggtactactattaccacgacaacgctaataagtaagtggcacttaaatgaaatgattttagcattgctgcaaccttcaacaaatgcttcattgaacggacctgaggttcggaacctcaaattacaactgggtctaacaaccttaccacctgttctgctttcacaacaatctgttgggatgacttgaatggaccgccccaagcaatcatcacactctgaccctgacaagtccggtgtgcactgaacaagaccatatatgtgcttattatcaggaccaggtatgcttcctacatcatacttgagacgagagtcacctgatgcagctttgccttttaaggtattcatcaagtttttgagatcttttgtgaactgatccaagtccgttgcaatttcctcggagccagcataatacgtttgtccatcttccaccttgttaaatattttgtagtctgagtagcgcaacatgcatttgtcgtcctcgtaccacccaattgcatccttctgaactggacagagctctgtgagattggctctggaaagtttgaggcagttacggcattcatctggattaatatctcctctgcacagcccaatggcgtacactttgtcggggttttcgccgtttgtgaaattgtagaaaccgtagtcaatatctgtattggaagtgagagtggacaaaagggtgttgaggttggtctgataggggctgttggctgcgtagtttcctctagcctgcttataatcacagcagtagtggaagtcttgtgaagttctgaccacttctggttctgttggggggggggcctacgtagctgcttcatatataaaaattattaggagaaggttaatgatagcacagcccatattaattggaagtaattaacaatatgatggttgaagcttttttagatcaaatgatccaatcagctttttattgcccaaggatgaagtgattctcgagcc

SEQ ID NO: 3229 - DNA, 3193 bp, Glycine max
cgtttcagcaaaacctctcttcttcttctgattgattccacctcgcgatttttcgattttcgtttgttttcttctttttcggtttctgatctgaactcgattcgattcgctattgccggaaaatgagtcctccggcaagtgtccggtgatgatcgctccctcgagaggttgttgaggttatcgttgttgttcttcgaagtcatggtttcgatctgaggtgctgtcagtgctcacagcgcgacgctgttgagttgaaatttcgctggttttgagttgctttgtgactaattttttttctcggcaaccaaacaggaggattcaaaatttgcactgattaattagtaaagttttggcgctctcgagttcgttttggtgaggattctgattaaggaaaattttcttttattcattcggaggagaagcgtctcaaactctctctctttctccctcgtagcatcatcatcatcaccataccttgttcagattctgctcactttcaccacaacggctttactatttaccgcgtttcgttttcgtgtcaccgcaaataatgaaaggaggtgttccctgtatccactcctcgtcagggaagatctgaagcagtgctagctgctcacgtcctgtaatggacgcatactcctccggcgaagaagtggttgttaagactagaaaaccatatacaatcactaagcaaagggaacgatggacagaggaggagcataataggtttctagaagctttgaaactacacgggcgagcatggcagcgcatagaagagcatataggaacaaagactgccgtgcaaataaggagtcatgcacagaagttctttacaaagctggagaaagaggcccttgtaaagggtgttccaattggacaggctcttgatatagacattccccctccacggcccaaaagaaagccaaacaatccttatcctcggaagaccaggattggtaccacatcattacatagtggagcaaaggatggaaaactcaatttagttgaatcttcacatgttaatcaagcactggacttgaaaaaagaaccacttccagagaaacatgatttagacgaagggctaacaactgtaaaagaaaataaggatgagaaccacgcaaaagtatttactcttctccaggaggtaccctgttcctctgtatcttcagcaaatgagagttcaataacaatgtctgtgccactgggaaatccatgtgccttcaaggagattacaccttccgtgaaagaggtaatagcacgagatgaaaaaactgaatcttttgtcactgttgaacctgaaaatgggaagttggagatcaatgatggaaaacagactaatggcactagtaaagactccaggttagaggattctgatgctttacatatgaaattggttcaaaatgagaaaccagatggtcttgattgtgaattaacaatagatgggatgcaaggcaatcagaattaccctaggcatgttactgtgcacgttgttgatgggaaccttggaacaaatactcaaaatccatcacaagatatgttgtttcgagattccatgtttcagccaataggaggggttaacgggcaacgaaatgtttttaccaatacagctccatcgaacacaagtgaaagtcaaaataacactgcacgatcttctgttcatcaatcatttcttccttatcctcccttcacacaacacaaccaagacgattaccaatcatttcttcacatgtcttcaacattttcaaatcttattgtctctaccttgatgcaaaacccagcagctcatgctgctgcaagtttcgctgctacattttggccgtatgcaaatccagaaacttcagcaaattctcctaggtgctcccaaggaggttttacaaatagacaaattggttcccctccaagcgttgcagctattgcagctgctactgtagcagctgcaactgcatggtgggcagctcatggattgcttcctttgtgtgctcctcttcatacttcttttgcctgtcctgcatcagtgactacagttccatcaatgaataccggtgaagcaccggctctgaaggcagagcaagaaaaaactactctacaaaatcctcctcttcaagatcagatgctggatccagaatactcggaagctcaacaagctcaacattcagcttcaaagtcaccagctgccattttatcagattctgagagtggagatgccaagttaaatacttcatcaaaggttactgatcatgagacgaacaaaacaatttctgagcaccttgattccaacaaaacaaagggaagaaaaccggttgaccgttcctcatgtggttccaacacggcctctagcagcgatgtggaaactgatgcactagagaagggtgagaaagggaaggaagagcctgaaatacctgatgctaaccaattagccattgagtttagtaatcgtcgtagaagcgttagcaaccttactgattcttggaaagaggtttctgaagaggggagactggcctttcaggctctgttctccagagaggtgttgcctcaaagcttttcacctcctcatgctttgaagaatacggatcatcaaatggacaacgccaatgataacaagcaaaacatagatgacaaagatgaagatcttgacggcaagaaatgcagttctaattatgaagcgatgcagaaaaacctgctatttgtagaaaataacgagggactgttaaccatagggcttggacaaggaaagcttaagactcatcgaacaggttttaaaccctacaaaagatgttccatggaggccaaggaaaatagggttggagcaagcagcaatcaaggtgaagagcaaggttgtaagagaatacgtttggaaggggagacttcgacttgaggttcgatatatgcagtaacataaaggcaacctttggtttttgcatatcatttctttatccctccaacggtgtacctatattgtatgtttatttctaattctgcagctcacgaaacttgtcgtgtagatgtgtgtaccgtattaaattactgtgtacgctcttttactatctttgtatgatgttaatgctgtttaaaactccgctaaatagacttagataagaaacattaagtattgtttgagccatgaacatcaagtaatttatgatccttcattcagccaaattccacgttttacagaacaactactctctctttt

SEQ ID NO: 3230 - DNA, 1260 bp, Glycine max
ttatttcactccccaaactccagagtcccaccgataattctctttcccatactctctctgtgttcttctgttctctctgtttcttcagattttctccctcctcagcgcctgtgaagtttgattgcttcattctttgaagtgaatttgacaattaagtaaattggttgagaagggttcattcctcttcattggaagaataaaacaaatattgcaggtggattttttctgatggcaactaatgaaaatcttccaccaaatgtaataaagcaactagccaaggaattaaaaaatattgatgaatcacctcctgaggggattaaagttgtggtaaatgatgatgatttttcaataatatatgctgacattgaaggcccagctggaactccttatgataatggagttttccgcatgaagttgttattgtctcgtgatttccctcactctcctcctaaagggtttttccttacaaagattttccatccaaatattgcaaccaatggagagatttgtgtcaacacacttaaaaaggattggaaccctaaccttgggttgcgtcatgttctcattgttgttaggtgtctactaattgagccatttccagaatcagctctaaatgaacaggctgggaaactgctgcttgaaaattatgaggagtatgccagacatgccagactttacacaggaatccatgcaaaaccaaagtccaaattcaaaactggagctatatctgaatctacaactgctctgaatgttgatcagagtaacacctcagttcttaatgctgaagtcaaaactgcaccatcgggtgcgacattgccattgcaatcaccattggccccctcaactaacaacacaacaagaggaaacaagcaggaacaggctgtggttggagctgagccagctgttaacagttcttgtgccacatccatggttcatgctgctgcaccaatgaaggcaggtggagtagcaaaagctcaggctgacaagaagaagattgatgcccggaaaagaagtttgaaaagattgtaatgaagttgttcaataattgaacttatatcatttgtggggtaattttgtttattgaaataatagagaaaggggaaatgtggttggggtgtatgggaagatcaaagatgggttcaaatgaataatacttttgttgggactaaatgaatgaaattaaactgttgtatgtgctctaaaaaaaaaaaaaaaaaaaaaaaaaaaaaaaaaaaaaaaaagaaaaaaaaaaaaaaaaaa

SEQ ID NO: 3231 - DNA, 1342 bp, Glycine max
gatctccttgttcctatactactgaattgataatgtttcatttattaggagtttttcactcttatttatatcatttgatttttctgtcacttctcttatttgattatttcatgttgctatctagtgaagttttcccggtcctggtcttgtatttgtcttcctcagaaataaatacctcatgtttaacttattttcaggggacaagctgagaaagaatttaaagtagaggtagaagcaattggtcgagtgcgacacaaaaatcttgttaggttgcttggatactgtgtcgagggagcctacaggatgcttgtgtatgagtatgtagacaatggcaatctagaacaatggctgcatggggatgttggagctgtaagccctttgacatggaacatacggatgaacattatattgggaacagcaagaggattggcctatcttcatgagggtcttgaaccaaaagttgtccaccgagatgtgaaatcaagtaacatactcattgatcgccaatggaactccaaggtttctgattttgggcttgctaagcttttatgttctgagaatagttatgtcacaactcgagtgatgggaacatttggttatgttgcaccagaatatgcatgcaccggaatgctaactgagaagagtgatatttatagctttgggatacttatcatggagataattaccggaagaagccctgttgattatagtagaccacaaggagaggttaatttaatagaatggttgaagactatggttgggaatcgaaaatctgaggaagtagttgatcctaagctccctgagatgccatcttcaaaggctcttaaacgcgctttgttgattgctcttcggtgtgttgatcctgatgcaaccaagaggccaaaaatgggacatgtgatccacatgcttgaagcagatgacctgttattccatactgaacaaagaactgagggagagtcttcccgttcctatcaaagtgagcaaagggactcaaatttagataagagaagagatggaggtgccattgataaaagtgaagatgctagtactagatggagatgataacaagctgataatttaatggaactacgtgcttattttttggtctctattagtttgccaattcttgtgtgtaggttaatttaaaaaaatgatagtatctttttttctttctttattatatagttttccattgttgttatcagccccagtttgggattcatattcaagtgtatactctgattcgttattataaaaataaaaatatttatgactaaaaaaaaaaaaaaaaaaaaaaaaaaaaaaactcgagactagttctctctctctctccctcgtgccc

SEQ ID NO: 3232 - DNA, 950 bp, Glycine max
ccacaacacaaaaactctcacctttctttccctcacgtctctctctcacatcatcatggcctccccaacactaataacccccaaatcagtgaaatcactcacacccatcaagcccaaacccaccaccaccatcgccgccactctcacaccacccacaacaacctccaccgccgccgccacccaccctcgccgccgcgaattcttgtccatcatcaccgccaccacatggctggtccctctgagcccggcactggcttcctcggacgaggaatacatgaaggagaccgaggaagtgatcaacaaagtgaggacaacaatcgtgatggacaagaatgaccccaacgtggcaaccgcggtggcggagttgagagaaacctcgaactcgtgggtggcaaagtacaggagggaaaaagcgcttctgggacgcgtttcctttagggacatgtattccgcgctcaacgctgtttctggtcactacattagcttcggaccaaccgctcccattcccgccaaacgaagggcaaggatcttggaggaggtcgacactgctgaaaaggcgcttctaaggggaagataattgagcaaaaaggtttttttttttttccttctttcgtttcgttcttcttgtttcttaagtgttggttttttttttttgtcttgtattgtattattattgcaatgtatcaaactcaagttacagtaatagaggctcgctttctccgtttattcggagaggaagagatacatctcatacatgcatgtatgcagtcacagagtcataaagaaatggaggcattttccattgatgtcatgaaggcattattagtaaatccaatcaatcacaattatgctcttaattgccatatcatgagcctaccatttatctgcgttcctaaatggccaaattcgctcatgtagtttctattttgtgataatttcgttcttgcact

SEQ ID NO: 3233 - DNA, 1824 bp, Glycine max
  misc_feature (59)..(60): n is a, c, g, or t
  misc_feature (62)..(65): n is a, c, g, or t
tcagctacgtagccccccccgactgctctctgtcaaccaatcacaaaatttagaatttnnannnnatcatttttaacttaaatactggtacttagagtcgatcctatcgtccgatggcgggattatatattatatagacacacagagatagaaagagagagaaagagtctaactagaattttttttctctctttcataacctagtgagactctgtgtcagagtttgtgaagtgaatcccataatcatgaagaaaggaaacttgggacttggtctcaaactctcagttcctgtgtctgatcaatctaattttgccaggttcctgactgaaagtgggacttttaaggatggggatctgcttgtcaacagggatggagttcgaattgtctctcagaatgatgtcgaagctccacctccaatcaagcctacagacaaccagttaactttggcagacatagatgtaatcaaagttgttggaaagggaaatggaggggtagttcaattggtgcaacacaaatggactagtcagttttttgcgttgaaggtaattcagatgaatattgaggagtctatgcgcaagcagattgcacaagagctgaaaattaatcaacaagcacaatgtccttatgttgttgtctgctaccaatcattctatgaaaacggtgtcatatcaatcatcttagagtacatggatggaggttccttagctgatctgctgaagaaagttaaaacaattccagaggattatcttgctgccatctgtaagcaggtgctgaagggtttagtttatctccaccacgaaaagcatattatccacagagacttaaaaccttctaatttgttaataaatcatattggtgaagtaaagattactgactttggtgtgagtgcaattatggaaagtacatctggtcaagcaaatactttcattggaacctacaactatatgtctccagagagaatcaatggaagccagcgaggctacaactacaaaagtgatatatggagtttgggactaatattacttgagtgtgctttgggtcggtttccatatgcaccgcctgatcaaagtgaaacatgggaaagcatttttgagcttattgaaaccattgtcgataaacctcctcctatccctccttctgaacaattttctacagaattttgctcatttatctcagcatgtctacagaaagacccaaaggatcgactgtcagctcaggaattaatggcacatccttttgtcaacatgtatgatgacttggaggtggatctttcagcttacttctcaaatgcaggatctcctcttgcaaccttataaaagtttccctgcttgcaaatgaggagcgtttgcagatgagttgaagaaccagctcctagagtcacttcaaggattctgtatttagttgttgagtgattgagttcaatttgttgagaaactcagatgcaagggtcaagaaattgcaataattgacatttgaagaactttaatgctgaagttaagtatcaggggctacttgcaacaaaatgtttgaaatttatgattgcaacaaaacgtatcactaggatttgcctgagttgctgataatatgatctgatgtacaaattttcatgagatgaaagttttgtcaagctgtcccaaatgaacgttttgagtcacactaggtgaacagttcctcaagttatatttgagactttttatttggttaaagcttgtcaaatttcctgattgatgatgggttttcattgcttgcaaattacatatcaaatttaagacttggaaccattttgttaaaaaaaaaaaaagactagttctctctctctctctc

SEQ ID NO: 3234 - DNA, 901 bp, Glycine max
acgaagaaatctgaaaccctcagagagaaagagaagtaagaaacattctgaacaacaccaccccatccacgatcttctcatccttaaactgtgttgtgcggatctcagatgatgatgtcttccgggacatcctcgtactggtgctaccgctgcagccgcttcgtccgtgtctggccccaccacaccgtcgtctgtcccgactgcgacggcggcttcatcgaagaaatcgaacacccgccccgctccgtccacctcgacccccgacgccaccgccatcgcttccccgctgccgccatgtacatgatcggacaacgaccctcctccgacccccgccccgcctcatccctccgccgcacccgccgcaacggcggcgaccgctcccccttcaaccccgtcatcgtcctccgcggcggcgcggaggacgaaagtcgcggctttgaactcttctacgacgacggcaccggttccggcctccgacccctgccaccaagcatgtcagagtttcttctcggatctggcttcgataggcttttggaacaactctctcagattgagatcaacggtattggaaggtacgagcaccctcctgcttcaaaagcagccattgattcattaccaaccatcgaaatcgatgacacccatttagccatggaatcacactgcgcggtctgcaaggaagcttttgaaacaagcactgcagttagagaaatgccatgtaagcacatataccaccctgaatgcattttaccatggctcgcacttcacaactcttgccccgtttgtcgccacgagttacccgcagataccccaaatccaaatccaaatccaaattcgaattcgaattcgaaccaaaatccgtcacaaaatgttggcttgaacgaggaagagaatgttgggttga

SEQ ID NO: 3235 - DNA, 2057 bp, Glycine max
tcagctacgtaggccccccccccccattcttctcttctcttcgcttccaaaaccctaatcaatccttcttttcaggtttcggttcgcgaagggttttgatttttcggcggcggaaaatcttgagatcgctttgcgaggaatactactgctgctgcaacaaagatttgttcttccaagggattggcatcactgcgcccaaagccagaacccgcgacaaactaatggtccaaaccctctgaaaattcatccaaaattagggtttgcgttgcgttacggtgcgaattgaaatgactcgcgttttggttcagaggggttcttccggtggtggttcttcgtcgaacccgaaccgcagtggtggtggtggtgggtcttcttctaattcctcggtgcgagcggagccgcaggttccggttttgccggagaatagtgacgaggttgttgttgtgtcggatgaggttttggagagtggtgataaggggaagagtgaggagggtgttcattttgagcagggtgatgggtcgtgtgaagatgacgtggctgctgttgttgagagtgatgttagggaggagattgtgaaggggttgagtgggcttagagttggtgaaagagttgtttcggagagtgagggttcgagtggggattcttcttccctccttgttggtggtggttcgtgtccccctccacctccggtgccgcctcccaagccttccgtgacggggaacttgaattcgaggaggagtgtggccgggagtttgaattccggcagcgtcggatcgtcgaggagggcagttacgtggccggttgtttcggctaggacttcacctgctgggtctaggccgtcttctcccaggtcacataatgaaagtgaggggtacaacagtgctgatgaacagaagccttgcctggtttcatcttatgatgattttgaaagggagcgacagttcgaaattgatatcagaagggcaaaaggttatgaagtcaaaaaaatgatggaggatggaaattgtctattccgagctgttgcagatcaggtgtatggggattctgaagtgtatgatttgatcagacagatgtgcatagattatatggagcgagagagagatcacttttctcagtttataactgaaggcttcacatcttactgcaagagaaagagaagagacaaggtctatggaaataatgttgagatccaagccatgtgtgaaatgtataatcgtccaattcacatatactcctacaccacagaacctatcaatatctttcatggaagctacaacactgacatgccaccaatacgattgagttatcatcatgggaatcattacaactcccttgttgatccacggcgcttgacaattggtgctgggcttgggttcagcagtcttcgtggaacaaatgttgacaaagatcaagtcaaggctgctattaaagctcaacaagacaaacagatcaataatgcactgttagccgagggtcggttttactctgatctcgagctcacagaaaaggaaattgaacgcatggtgattgaagtttctcgagctgagtaccttgcagatagtacatttaagcaacagcttggagacagagagtcctctacctcaaacgcagaaccatcatcttctggagcaaccggttcatctggcactgatcgcaagacggaacatgggaaagagcatggttctgatcttagtagcggtatgcagatgttactatcaatgggattcagttacatgcaagcgattgaggcttacagcatatttggggacgatgttgattccatggtttgttacctgttagaaactggcagtagcagcagacgtaaaggcaaggccactgaatgacatgccatcaagtcaaataaatatctagtttttgaattgcaaccaaatcagttaaataaatgtatcaagctacttactctgtagttcaatttggtatctggcatattcatgacggctatagaaagaaagaactgagccacgattcaaccttatttggctaatgagcaggtcgttttctattcaaaaaaaaaaagtaaaaaaaaaaaaaaaaag

SEQ ID NO: 3236 - DNA, 1649 bp, Glycine max
tcttttttacccacgcgatcatcacgcgtccggtttatgaatcttatccttacttgttcggtgttcgactctctcatttttacccaatatgagactttcacttcacacttgtcctccaatacctcgttaagaactcaatgttacacattaagaaatatgtaatattgttttatctagttattagttttaatgagttaagaaaatagattgcatatggattcatgcaaaaatgtttctttaatgtgtatgattgagatgtatccaaagttatattgtacatgaaataagcctcacacctgatgtactgagcatctgtgtgtttgaatgatccctaccaattcttgcagcactttcggaaatgatcttgaacccacaagcaactggctagaagtgattttcagtatatgcatagtactcagtggactattgcttttcacattattgattggtaacattcaggtattcttacatgcagtcatggcaaagaagagaaagatgcagctgagatgtcgtgacatggaatggtggatgaggaggaggcagttgccatcgcgattaagacaaagagttcgccattttgaacgtcaaagatgggcagcgatgggaggagaagatgagatggaaatgatcaaagacttgccggaggggctgaggagggacatcaagcgccatctttgcctcgacctcattagaaaggttcctctattccacaacatggatgatcttattcttgacaacatctgtgacagggtgaagcccctagtcttctctaaagacgaaaagataatcagagaaggtgatcctgtaccaaggatggtgttcgttgtccgagggcgcataaaacgcaaccaaagccttagcaaaggcatggtagcctcaagcatccttgatcccggagggtttttgggtgacgagctactttcatggtgccttcgtcggccgtttatcgacagacttccggcctcctccgccacatttgtatgtcttgaatcagcagaagcctttggccttgatgccaataacttgaggtacatcactgatcacttccggtacaaatttgcaaatgagaggctgaagagaacagcaagatattactcatccaattggagaacctgggctgctgtcaacattcaatttgcttggagacgttacaggcagaggactaaaggtccagtgacccctgtaagggacactaatggaggcactgaacgcaggctcttgcaatatgctgcaatgttcatgtcaataaggccacatgaccaccttgaatgaaaactggtgtgtccatgatttttcttattgttgttggttattgatcctcaataaaattgtatttcaaatccattagacctgttgaaggtgaaatgtattaaaaaaaaaaaaacaacaaagtgagtacgagtaattgaaaaaattattgagaccccttctttcattgatggtaagtttaccataatcatttttcatggaaattgtgtcttgagcaatccccatcctgccgaggggctgttaggtgcttaatggatggacaatcagttgagaagaaatagtagagtcagttacttcacagttttgttctggtatgagaatttaactatatattgtcaagtaattatttaattttataatacatgttaaaattagataat

SEQ ID NO: 3237 - DNA, 1869 bp, Glycine max
acgagggtcaaggaaattgggaaaagttacggctgcgagaagacgacagaaggggaaagaaaggagagctggaatcacatggacttgtctttctctttctgggtctccattaaatttttcttctctcccttctttctctctctctctctctgaccattctcttcttcttctttttcttctcctctctctctctcccctccgccatggctgaggataaggagatgtctacctctgtcatcaatgggaatgattccctaactggtcacatcatatctacaactattggaggcaaaaatggggaacccaaacagactattagctacatggcagaacgggttgtaggaactggatcatttggaatcgttttccaggcaaaatgcttggaaactggggaggcagtggcaattaaaaaggttttacaagacagaagatacaagaatcgtgaactgcagttaatgcgtgtgatggatcatccaaatgtgatctctttgaagcattgtttcttttcaactacaagtacagatgaactttttctcaatttggtgatggagtatgttccagagtccatgtatagagtcttaaagcactatagcaatgctaatcaaagaatgccaatcatctacgtaaaactttatatgtaccagattttcagggggttggcttacatccacactggtcccaaagtttgccacagagatttgaagcctcaaaatatactggtggatcctcttacacaccaagtgaagctatgtgattttggaagtgcaaaagttctagtcgaaggtgaagctaatatatcatacatatgttcacgattctatcgagcaccagaacttatatttggggccacagagtataccagttcgattgatatttggtcagctggctgtgttcttgctgaacttcttttgggccagccattattccctggcgaaaatgcagtagaccagcttgtacatattataaaggtgcttggcacacccacccgagaggaagtacgctgtatgaatcccaattacaatgactttaggtttccacagataaaagcacacccatggcacaagatattccacaaaaagatgcctccagaagctattgatcttgcatcccggcttttgcaatactccccaagtctccggtgcactgcgcttgaagcatgtgcacatcctttctttgatgaacttcgtgaacctaatgctcgcttgccaaatggtcgtccatttccccctctatttaacttcaaacaggaattatctggagcatcttccgagcttgttaataagttgatacctgaccatgtgaagcggcaaatggggatacagtttatgcatctgggaggatcgtgacgataaagcttaggggacatagtgtatactagctgataagttaaaaaaaagtggcaccattattttttgtcttaataccatgttctgtgacctggcgaatgtagtttcaagctgaaccgagactgagattcgcgatgccggatggccgcagttgatccgtcagtatatgtaccttttgattcccttgtgctaactggtggatctttatttccccaggcatatatagccttgtttattgtaaacgtctacaatgtcatagtaatatttgacctgaaatggtcacacagatcagaactcagaatgcttctgtttggggaaaactaaagccttggctggaaggaggggagggtcgagaagagtttttttgatggtggggtttgttggttggcttttgtttcctcttgttaatatgtgcctcatttgcaatgttgcacaatgcacaccagttcctttccttgtgaaatgtaatgtggtatctatctgtttttcttcaaaaaaaaaaaaaaaaaaaaaaaaaccaaaa

SEQ ID NO: 3238 - DNA, 2113 bp, Glycine max
ggagaaaggagagctgtcatcacatggacttgtctttctcttactctgacggggtccttccttttcttcttctccttcatattttctctctcaccattctcttcttcttctccctttcttagattctccctcttttctctctgccctccgccatgactgaggataaggagatgtcttcctctgtcaccaatggcgatgattccctcactggtcacatcatatctacaactattggaggcaaaaatggggaacccaaacagactattagttacatggcagaacgggttgtaggaactggatcatttggaattgttttccaggcaaaatgcttggaaactggggaagcagtggctattaaaaaggttttacaggacagaagatacaagaatcgcgaactacagttaatgcgtgttttggatcatccaaatgtgatctctctgaagcattgtttcttttcaactacaagtacagatgagctttttcttaatttggtgatggaatatgttccagagtccatgtatagagtcattaagcactataccaatgctaatcaaagaatgccaatcatctatgtaaaactttacatgtaccagattttcaggggattggcttatatccacactgttcccaaagtttgccacagagacttgaagcctcaaaatatactggtggatcctcttacacaccaagtgaagctatgtgattttggaagtgcaaaagttctagtaaaaggtgaagctaatatatcatacatatgttcacgattctatcgcgctccagaacttatatttggcgccacagagtatacaagttcaattgatatttggtcagctggctgtgtccttgctgaacttcttttgggccagccattattccctggcgaaaatgcagtagaccagcttgtacatattataaaggtgcttggcacacccactcgagaggaagtacgctgtatgaatcccaattacaatgactttaggtttccacagataaaagcacacccatggcacaagatattccacaaaaagatgcctccagaagcaattgatcttgcatcccggcttttgcaatactccccaagtctccgatgcactgcgcttgaagcatgtgcacatcctttctttgatgaacttcgagaacccaatgctcgcctgccaaatggtcgtccatttcctcctttatttaacttcaagcaggaagtaagtccttaaattatctttcttcatcaaatttgtgctttggcagtaaactatttgtacagaatttcaaaattaggaataaaattgatactgtttttaaaaaaggtttaaataagtctagaggcctgagaaaggtccccagatccattttcttagctttatatctgtctggttgattttaagtgtctgtctttgtgtgtttgtctatttgagtacacaaagcaatgcattgaaaaataatatacatgcactgtgttcctttttatgatccttataaacatcctagctaaaaatcataaatgatggactactatattgtaattctctctgtttccagttatccgaagcttctccagagcttgtgaacaaagtgatacctgaccacatgaagcggcaaatagggctgcaatttgttcgtccggcaggatcatgatgataagcttagagggggcatagtgtatactagttgataagttaaacaaaagtggcgccattatttttgtctaatttagcatgttctgtggcctgaccagtgtagtttcaagctgaacctggactgagacttggggtgctggatggctgcagttgatccatcaaaatatgtataccttttgattctctgttgctactgatggatcttatttcctcaggcaaaatagcctttgtttattgtaaacgtctacatgtcatatagtagttaagtatacttggcctgaaatggtcagaacttagattgcttctgtaaggggaaaaccaaagccttagctggaaggaggggagggtccacacagagttttgatgcggggttgttgggttcggtttcctcttattaatgtaatgtgcctgatttgtaatgttgttgaccagttcctttccttgtgaaatgtaattgtgctatcttatctgttttcttt

SEQ ID NO: 3239 - DNA, 1965 bp, Glycine max
cgcggggagatgaaagaaaggagtgctggaatcacatggacttgtctttctcttgctgggtcctccattaaaattttcttctctcccttctctctctcaccattctcttcttcttcttcttagattccttctctctctctctctctcccctccgccatggctgaggataaggagatgtctacctctgtcatcaatgggaatgattccctaactggacacatcatatctacaactattggaggcaaaaatggggaacccaaacagactattagttacatggcagaacgggttgtaggaactggatcatttggaattgttttccaggcaaaatgcttggaaactggggaggcagtggcaattaaaaaggttttacaagacagaagatacaagaatcgtgaactacagttaatgcgtgtgatggatcatccaaatgtgatctctttgaagcattgtttcttttccactacaagtactgatgaactttttcttaatttggtgatggagtatgttccagagtccatgtatagagtcttaaagcactacagcaatgctaatcaaagaatgcctatcatctacgttaaactttatatgtaccagattttcagggggttggcttatatccacactgttcccaaagtttgccacagagatttgaagcctcaaaatatactggtggatcctcttacacaccaagtgaagctatgtgactttggaagtgcaaaagttctagtcaaaggtgaagctaatatatcatacatatgttcacggttctatcgagcaccagaactcatatttggggccacagagtatacaagttcaattgatatttggtcagctggctgtgtccttgctgaacttcttttgggccagccattattccctggcgaaaatgcagtagaccagcttgtacatattataaaggtgcttggcacgcccactcgagaggaagtacgctgtatgaatcccaattacaatgactttaggtttcctcagataaaagcacacccatggcacaagatattccacaaaaagatgcctccggaagctattgatcttgcatcccggctgttgcaatactccccaagtctccggtgcactgcacttgaagcatgtgcacatcctttctttgatgaacttcgtgaacccaacgctcgcctgccaaatggtcgcccatttccccctctatttaacttcaaacaggaattatctggagcatctcccgagcttgttaataagttgatacctgaccatgtgaagcggcaaatggggctacaatttatgcatctgggaggatcgtgatgataagcttggggggggggggggggggggggggcataatgtatactagctgataagttaaacaaaagtggcaccattatttttgtctaaataccatgttctgtgatgctggatggctgcagttgatccgtcagtatatgtattaccttttgattctcttttgccaactggtggatccttatttccccaggtaaatatagccttgtttattgtaaacgtctacaatgtcatatagtaagtatatttgacttgaaatggtcagatcagaactcagaatgcttctgtaatggggaaaactaaagccttggctggaaggaggggagggtcgagaagagtttttttgatggtgggggttgttggttgggttttgtttcctcatgttaatatgtgcctcatttacaatgttgcacaatgctcagcagttcctttccttgtgaaatgtaatgtgctatctatctgtttttcttcaatgccgttttctattgtttccacatttcagttttcatttcttgaatttgaattctcaagttccagcactttttggtactaagtacttacagtgctcgtaatttcttatgtagacattatatacgattttgaaaaaaatgttgagagacgatgcttgaactttttctctttcaaaaaaaaaaaaaaaaaaaaaaaaaa

SEQ ID NO: 3240 - DNA, 1899 bp, Glycine max
aacatatcaactaaagatactacacataactacatcatctcaaaacctagtctgaaaccatagcacaaaatcaaccatgtctccattgattgttgccttggctacaatcgcagcagcaatcctcatatatcgtataataaagttcataacacgcccatccctccccctcccaccgggccctaaaccatggcccatagtgggaaacttgccacacatgggcccggtgccgcaccactccctcgcggcgttggcccgcatccacggcccgttgatgcacctccgcctcggcttcgtcgatgtcgtggttgccgcgtcggcctcggtggcggaacagttcttgaagattcatgactctaatttcagcagccggccaccgaacgccggcgcgaaatatatagcttataactaccaagatctggtgtttgccccctacggcccacgctggcgattgctccggaaactcacctccgttcacctcttctccggcaaggccatgaatgaatttagacacttgcgtcaggaagaggtagctagattgacatgcaacttggcaagttcagacacaaaagcagtgaatttgggacaattattgaatgtatgcaccaccaacgcattagcgagggcaatgattggacgaagagtgtttaacgatggcaatggagggtgtgatcctagggctgatgagtttaaggctatggtgatggaggtgatggtgttggctggagttttcaacattggtgactttattccttccttggagtggctagaccttcaaggggtgcaagctaagatgaaaaaattacacaaaagatttgatgcatttttaaccagcattattgaggagcacaataacagttcttccaagaatgagaatcataagaatttcttgagtatcttattgtcacttaaagatgtgagggatgatcatggaaaccatctcactgataccgagattaaagcactacttctgaacatgtttacggcaggaactgacacatcatcaagcaccacagaatgggccattgcggaactaataaaaaacccacaaattttggccaaactccaacaagagttggacaccgttgtgggtcgagataggagtgtcaaagaagaggacttggcccacctcccatacttacaagctgttatcaaggaaaccttcagactccacccatcaacccctctttctgtgccacgtgctgctgccgagagttgtgagatatttggctaccacatccccaagggtgctacactcttggtgaacatttgggccatagcccgagacccaaaagagtggaatgacccattggagtttaggcccgaaaggtttcttctaggtggtgagaaggccgatgttgatgttaggggcaatgactttgaggtgataccttttggtgctggacgaagaatttgtgctggacttagtcttgggcttcaaatggttcaacttctcactgcagccttggcccattcatttgattgggaactagaagattgcatgaacccagaaaagttgaacatggatgaagcgtatgggctaaccctacaacgggccgtgcctctttcagtgcaccctaggcccaggctcgcaccacatgtgtactcaatgtcttcctaatttttaagttctacattttggagtttttcttccttataattgttgtcttttcttttggttaacaaggatcctagtaacaataaaaacatacatggtgatatagtatgttagtgtgtgaagatccaaaaacatgaaaaggtgtcatttcatatgtttttggtagtgcctttaaaatttacttgtatatgtatatgaataattgaatatatgctatatggatgggattcaatgattaataaaaaaaaaaatgttccttcgagagatgcccgtaatatctaatg

SEQ ID NO: 3241 - DNA, 2288 bp, Glycine max
  misc_feature (31)..(32): n is a, c, g, or t
ctggtaccgcctgcaggtaccccggtccggnnaattccccgcgcccgcccactaaccaccacgagtttctctatctgctttcttcacaaagagtaactcagtcttctaaaaactttctcaaaaccattattattctctaatctttcgtttcttcaattaattaattggtttcttgctatggctgtggactctgcgatttcgtccccattgggtcccccggcctgtgagaaggacgcaaaggcgttgcggttcatcgaagaaatgactcgcaacgccgacgccgtccaggagagagtcctggaggagattctcacacgcaacgcccagacagagtaccttaaacgcttcgaactcgacggcgccgccgaccgccaagccttcaagtccaagattcccgtcataacctacgaggacgtccagccggagattcagcgcatcgccaatggcgaccgctcccccatcctgtccgctcaccccatctccgagtttctcaccagttctgggacttcagctggggaaagaaaactaatgcccacaatcaaggaagagctggatcgtcgccaacttctatacagcctcctcatgccagttatgaacctttatgtgcccggcttggacaagggaaagggcctatactttttgttcgtgaagtccgaaacaaggaccccgggtgggttactggcccgtccggttctcacaagctactacaaaagtgaccatttcaagacccgaccctatgacccgtacaatgtttacacaagtccaaatgaagccattctttgctcggactcattccaaagcatgtatactcaaatgctatgtggcctcattgagcgccaccatgtcctccgcctcggcgccgtcttcgcctccgggctcctccgtgcaatccggttcctccaactcaattggcccgaacttgcccatgatatccaaaccggaaccttaaattctcggatcaccgacccggcaattaggagttacatggacaaggtgctaaaatccgacccggaattggcccaatttgtgacacaacaatgttccaaggacaattgggaaggaatcatcacaaggatttggcccaacacaaaatacttggacgtcatcgtaacgggtgccatggcccaatacattcccactcttaactactacagcggaggagggttgccacttgcatgcaccatgtacgcttcatcagagtgttactttggactcaaccttaatccgatgtgcaagccctctgaggtttcatacaccattatgccaaacatggcatatttcgaattccttccccacgatcctaagcctggctccaccagttcaaaactagtggagttggcggacgttgaagtggggaaggaatacgaactggtgatcacaacctatgcgggactctatcggtaccgtgtgggcgacatcctccgagtcaccggtttccacaactcggcaccacaattccacttcgtgcgcaggaagaacgtgttgctgagcattgactcagacaaaacagacgagtcagagttgcaaaaggggattgagaatgcctcaaagcttttatcagagttcaatacaagcgttgtggagtacacgagttatgcagacacaacaacgattccgggtcactacgtgatttattgggaattgttgaccaaggactcgacgaactcacccagtcacgaggtgttgaatcggtgttgtttggagatggaggagtgcttgaactcggtgtatagacaatgtcgtgttgctgatcattccattggcccattggaaattcgtgttgtgaggaatgggacctttgaggagcttatggattatgcaatctcaagaggtgcgtccataaatcaatataaggtgccaagatgtgtgaatttcacacccataatggagttattggactctagggttgtgtctgtgcattttagccaggaattaccacattggacccctgaaaggaggaggtgaggttcttcgtatgtggcttattgggcttgagtcaaacatgtagatgtagattttatttgttgttttttttgctaaggttttgtattttttgggtagtgtgtaggactcatggtgagtctacatggagatgttgaattaggatgtctcttggttggattaattatgtatttcggttcgattaacttgtgtaaaagatgtgacttttttttttttttttccttttagcaaagttatatgttgtatgtattggtctttccatgtagaagtgaagaaatgtaattgagcagaggatattttcttttggcaagtaaaaaaaaaaaaaa

SEQ ID NO: 3242 - DNA, 1570 bp, Glycine max
aagagttgaaggatagaatggagcagtcacatggaacatgggaggatgtatataaaagtgctaagagggctgatagatcaaagaatgatttacacgaaagagatgaaggagagcttgagcggacaggacaaccgctatgcatatatgaaccttattttggggaaggatcctggccttttctacataaaaaatctctttatcgaggaattggcctgtccggtaaaggtcgaagaccagggagagatgatgttgatgctccttctcgtcttccactgctgaataatggttactatcgagatttacttagtgattatggagccttctttgcaattgcaaacaagattgaccgtttacacagaaatgcttggattggatttcagtcttggagagcaacagcaaggaaggcatctttgtccataattgctgaaaatgctttattagatgctatccaatccaaaaggtatggggatgcactatatttttgggtgcgcatggatatggattcacgaaacccttcgcaaacggacttttggtcattttgtgatgccgttaatgcgggaaattgcaagtttgctttctcagaagccatgaggggaatgtatggggtaaaaggtgatgcggattctttgcctcccatgccggtagatggtgacacatggtctgtcatgcagagttgggctatgcctacaagatcctttatggagtttgtaatgttctccagaatgtttgtggatgcattggatgcgcaaatgtatgatgaacaccattcaacaggacgctgttctttgagtttgtcaaaagataagcattgctattcacggcttctcgagcttcttgtgaatgtgtggacataccacagtgccagaaggatggtgtttgtggaccctgagacaggtctaatgcaggaacaacacaagttcccgagccgcagaggtcaaatgtggatcaaatggttctcatacagcacacttaagagcatggatgaggacttggcagagttatcagattctgaggatcctgcaagacattggttgtggccgtcaaccggcgaagtattctggcaaggtgtatttgaaagagagagaagcttaaggcacaaggagaaggaaaagaggaagcagaagagtatagaaaaacaaaacagaataaggaagcgtcatcgccaacaagtgatagggaaatatattaagcccccaccagacgaagaaagctctaattcatctattgcagtaacagcatcatgatgattttaaaaccattgttttgagtagttcctcgtataaaattcttttcttcttttgtaatttttatttgattttgcttagcatatgtgattttcgttagaaaggatgcacatttctgtggagggtcacgtatgtagaatatggcatcgttctagtcattgatgctgataaatagctagtgtgtaaagtatcttttattttgttttgacttattctgtaagtctattctttcaggataaaaaattcatttagagaggtgtggcaaaattgtaatgttggtaccactttgtcaatctaaatgaaaattaactatagtatcattaaaa

SEQ ID NO: 3243 - DNA, 1721 bp, Glycine max
ataaagattttttattttttctttgatctaactaacaggatggtcaagtcatgttgcgttatgtgcttgtgtttgatcttacttcacattttcctgcgctttgtgccaatacagtcagcacctgaaagtgccattgtgacacagattcctggcttcagtggcactctaccttccaagcactatgctgggtatgtgacggtggataagagtcatgggaggaacttgtactactattttgttgaatcagagggtaaaccttccgaggaccctgtggttctgtggcttaatgggggacctggctgctctagcttcgatggattcatatatgagcatggtccttttaattttgaggcagcaaagacaagggggggtcttcccacactgcacctcaatccatacagctggtcaaaggtttccagtgttatatatttggattctcctgctggtgtggggttttcatactcagagaataaaactgattacataactggagacataaagactgccactgattctcatgcctttctccttaagtggtttgaactataccccgagttcctttccaacccgttcttcattgctggagagtcatatgcaggagtttatgtgcctactctcgcttctgaagtagtgaaaggaattgatgccggggtggagcccaaactgaatttcaagggttacatggttggaaatggtgtcacagatgaacaaattgatggcaatgctcttgttccatttgtacatgggatgggacttatcccagatgaactgtttgaggaggttaaccgtgagtgcaatgggaatttttatgatccaacaagtgctaattgttctagcaagctttcaaaagttgatgagttggttgatgagataaacatatataacattctagaaccatgctatcacggcacagaagcagagaagattacagaatcctatattaggatgccatctaccttccggaagttgggtgagaccgaaagaccttttcctgtgaggaaaagaatgttcggtcgtgcttggcccctaagagctcctgtgagagatggaattgtaccaacttggccacaactgatgaatagtaaatctgctccaccatgcacggacgatgaggttgcaaattcatggttaaacaatgaagcagtcaggacagcaattcatactgcacagaaaagtgtggtcagtagttgggatttatgcactgacagaatttacttcgatcatgatgctgggagcatgatcaagtaccacaagaacttaacttccaaaggttatcgtgcacttatattcagcggcgatcatgacatgtgtgttccatacacggggagtcaagtgtggacgagatcagttggatacaagattgttgatgaatggaggccttggtcatccaatggtcaagttgctgggtatacacaaggatacgacaaaaatcttacttttctgaccgtaaagggatctgggcatactgttccggaatataaaccacgagaggcattggacttttacaaacgctttctcgctggattgccaatatgatatagaggaaaagagaagatggagtaacgctgcttcttattttgtttgtactttgttaataataatgatttaaggatgtatgaagacacattttatatttgtgttctatgtttaccttattaatttattaccatattaatattaaactagatgtcaacctagtttgcacaaaaaaaaaaaaaaaa

SEQ ID NO: 3244 - DNA, 1779 bp, Glycine max
cccacgcgttcgcccacgcgtccgcccgcgcgtcatttcccatataagactcataaccgttcgttcgttcgttcgttccccacttgcttttcattttttttctcccttttcgctaacctcaaagagagttcagtatttatacaaataaaagttttttctttttttatttctggttttcgttttggaatggctgggatttgctgtggagttgttggagaagccgccgagacttcttctcccatcgaacccacctcacgcccttccgcacgccggagtttggaccttttgcccttgaaatacatagctgctgacgtgtcagtcccgccgctggagaacagccggaagcgccagaggctggataggcgcgcttctccggcaagggagtgcgataacgcggttcatagttccaaatcgaaggtagttgaggttgttccgaattattcttcgaagagtccaacgttggactccacaagtccaacagttgtcgaggagtatccgaggtatggggtaacgtccgtttgtggaaggaggagggacatggaagacgccgtttcggtccatccatcgttttgccaagaaactttatctcatgataaaaaattagggtttcatttcttcgctgttttcgacggccacggttgctcacatgttgcgacgatgtgcaaggagaggttacacgagatagtgaaggaagaggttcaccaagcgaaggagaatttggaatgggaatcaacgatgaaaaagtgtttcgcgcgcatggacgaagaggttttaaggtggagtcagaacaacgagactccaagttgcaggtgcgagcttcagaccccgcactgcgacgctgtgggctccaccgcagttgtggccgtcgtcacgccggagaaaatcatcgtggcaaactgcggagactcacgcgccgtgctttgccgcaacaacgtagccgtcccactctccgacgatcacaagccggaccgacccgacgagttgcttcggatccaagtagcgggagggcgcgtgatatattgggacggacctagagtgcttggggtgttggctatgtccagagccataggggacaattatctgaagccgtatgtaatttcggaaccggaggtaacggtaactgagcgtagtgaggaggatgagtgtttgatattagggagtgatgggctatgggacacagtgcaaaacgacatcgcatgcaaagtggtgcggatgtgtctgaacgcgcagaagccgccatcgccgccctcgtctccgaggagggagatggcggtggactgctccgacaaggcttgctccaacgcctccattctgctgaccaaattggcgttggttaggcagagttccgacaatgtgagcgtggtggtggttgatttgaggagaacctaaaatgggaactgtgcgtggacacccgatgttgtggaattttgtttttgacaaaagaaaggggaagaaaatgcagggtgttgcgtggtgctttactgatttcttgtgattgtaattaaaatagtacttgtagataggtattttaatcaacgggggtgtgtgaaatttgtaattgtcagaaaaattatcaacaaattatgggaaattttaagagtagtgaaaacaattagtgtgtcaaccaagaggtaaatcagcctcctgaaacaccgttgtttttgttgtaattagatatataattgtaattgaaacccagcttggatctataaacgcgccaattttgttgtttggtttgcattaaaaaaaaaaaaaaaaaaaactcgagactagttctct

SEQ ID NO: 3245 - DNA, 1749 bp, Glycine max
cgtacggctgcgagaagacgacagaaggggaccgatcctgcgtttcatctcatatactactaacaccctcagaaccgttccccacttgcttttcaattttctttttttgcccttttcgccgccctcaaagagttcaaggatttatacaattaatagttttttaatttggaatggctggaatttgctgtggagttgttggagaatccggagagacttcttcctcttcaatcgaacccacctcgcgcccctccgctcgccggagtttggaccttttgcctttgagatacatagctgctgacgtgtcagtcccggcgccggagaacagccggaagcgccagaagctggatcggtgcgtttcttccgcaagggagtgcgaaaacgcggttcagagttccaaatcgaaggtagctaaggctgttcggaatcgttcttccaagattcttacgttggactcgacaagtccaacagtttacgaggggtgtctgaggtatggggtaacgtccgtttgtggaaggcggagagacatggaagacgccgtttcggtccgtccatcgttttgccaggaaaatttatctcaagatgataagaaagagtttcatttcttcgctgtcttcgacggccacggatgctcacatgtggcgactatgtgtaaggagaggttacacgaaatagtgaaggaagagattcacaaagcgaaggagaatttggaatgggaatcaacgatgaagaagtgtttcgcgcgcatggacgaagaggttctcaggtggagccagaacaacgagactccaaattgcaggtgcgagcttcaaaccccgcactgcgacgccgtaggctccaccgctgtcgtcgccgtcgtcacgccagagaaaatcatcgtcgccaactgcggcgattcacgcgccgtgctttgtcgcaacaaggtagccgtcccactctccgacgatcacaagccggaccggcccgacgagttgcttcggatccaagccgcgggagggcgcgtgatatattgggaccggcctagagtgcttggagtgttggctatgtccagagccataggggacaattatctgaaaccgtatgtaatttcggaaccggaggtaacggtaacggagcggagtgacaaggatgagtgtttgatactagggagcgatgggctttgggacacggtgcagaacgacaccgcatgtaaggtggtgcggatgtgtctgaacgcgcagaagccggcgtctccggtgaaggagatggcggtggactgctccgacaagtcgtgctccgacgcctccattcttctgaccaaattggcgttggtgaggcaaagctccgacaatgttagcgtggtggtggttgatttgtggagagaccaatcaatggcaacaacaaaaggaattaattaattaaatttttaaaaaatgctaatcaaccgccccaaacctaaaatgggaactgtgcgtggacaccctttgattttgtggaattttgttattgacaaaaaaagggaagaaaaatgaagggtgtttacgtagtgctgattccatgtgattgtaattaaaatagtagggtgaaatttgtaattttcaggatattatcaacgaaccttgggaaattttaagagtagtgtgtgaaccaagaggtaaatcaggctcttgaggcatcgttgttttggttgtaattagatatataattgaaattgaaatcagcttggatctaaaaaaacgccaaaaaaaaaaaaaaaaaaaaaaaaaaaaaatt

SEQ ID NO: 3246 - DNA, 1234 bp, Glycine max
atttttctcattcccacctccttctctttaatttcttggtcaagttcattcgttcggctcagtcaacataactataataattataactcctctctttctttctcaactctcacaacacaagaagatggcttctatctcacagggccttcttctcaccactgccatgcttctctccaccaccctgctttatgttgctttctccaggccttcatttcaaattcaccactctaacaaacccaccttgcgctcttgcttgtattcagaggaaaagaaaagggagagaaagaagaagaaaaagaagaaagtgaaatttgcagatagtgtgaaggatggaagagaaaggaatgagcaaagaagcaactgcagaagacaaagtggtggaatgccattgccagcaaacagaatggctttgtataacgggattctgagggaccgagtgcatagaatggagtgctcttactaattaaggataaaacgtagaacatagaaccctgttctgttctgttctgttacgtacgtgctgtagtgtacatttgtgttaggactgagctgatcaagctctctcattctctctctctctctctctctctctgaattttcaaatataattttgtgttggctgttaatacttcttacaatgcaaaaaaaaatgaaaaagaaaagatatatgtggtattcttgtggttgtagatacgtactggattttgtccaactccttaatatgaaatattgggcaaagttttgttttcttcctaaacaatccacttccacccactttcaacatatgtattgcagattgataaattttgcttgagatatattgattaatcagttagttaccaagacaagaaaattagatatgtctgttttttctatcaccccattcagcaaacaacatcaataaaataccctataaaaacaataattaattaacttcaaatttatatatatatatatttttataaaaataagatttaaatgttatagaaaaaaaatagtaattaattaagagtattatagaaaaaaatgagcaaattccttctcctatatatagtgtaattatgcaagcaaatcttacttttttaaccattacttttgtctttcttataggaagtgttaacataaggtttgagggcgcgattcaggaaaacaaaaggtttgacaggtatcttagggtatgttgttatttgcttaaaagttattaatgtaccaaataatacaaatagagtattat

SEQ ID NO: 3247 - DNA, 1516 bp, Glycine max
ttataaaaaattcaaacatttaccaatttagtgccattaatccactcctgccgcgtctcctggtccagattcatccttttttaagacacactcctcagctcctcttgtacaaagtggctctggcagtgatgttgtgtacacaccatctgaccctggtggactaggccactcaaggtcatggttttcatatgaagaactaatcaaggccacaaatggtttctcaactcaaaatcttttgggcgagggtggatttggttgtgtgtataaagggtgccttcctgatgggagagacatagcagtcaaacagctgaagattggtggaggccagggggagagagagttcaaggccgaagtggaaattattggtcgcatacatcatcgccatttggtttctctggtgggatactgcattgaagacagcagaagactacttgtctatgactatgtccctaacaataacctttattttcatctacatggggaaggccagcctgtgctagaatgggcaaaccgtgttaaaattgcagctggtgcagcccgaggacctgcgtagcccccccccccccgcaaccctaggatcattcacagggatatcaagtcatcaaagcattctcttagatttcaagtatttgaagccaaggtctcagatttgggctggccaaattagctctggatgcaaatacgcatataaccacccgtgtcatgggaacttttgggtatatggcccctgagtatgcgtcaagtggcaaattgactgagaagtctgatgtatattcttttggagtcgtgcttttggagctaattaccggaaggaagccagtagatgcatcccaacctttgggagatgagagcttagttgaatgggctcgacctttactgagtcatgcactcgacactgaggaatttgatagtttggcagatccaaggctagaaaagaattatgttgagagtgaattgtattgcatgattgaagttgctgctgcttgtgtgcggcattcagctgcaaagagacctcgcatgggacaggttgttagagcttttgatagcttaggaggttctgatctaactaatggaatgcgacttggggaaagcgaggtgtttgacgcacagcaatctgaagaaataagattatttcggaggatggcatttggtaatcaagattatagcacagacttctttagccgtgctagtttgaatccatgaaaggccactgtacatactggaagagcttattttggaccaaaatatcttgtgaagaagccaaggggaggccctggttaagttttcttggttgcttgcagatatggctaaggtgcactgttggttttgattctggaatttgactgcatcaggttcagatcctcattcttgtgcctgaatttcattattcttttcattagctggttttttggcagcaattttgcttttgtaattagaatttgtaaagttaatttttacactcccgataacaaagattaacatattagttgtgtaatgatagaaaagatgtgactcc

SEQ ID NO: 3248 - DNA, 1345 bp, Glycine max
tcagctacgtaggcccccccccactctcttcttacttcccttctctctctgtctctaaaaaccctttttttctctctctttcacacacaccaaccagactcgatcagtggtggcagatagagagagacatgatgtcaacttccggcgccggcaggtacatggcttttccgccgtctccgtccgcgcctccgtcgccgcacctctccggtcttcgctccactcccctctccgacccggacaaatatctagctgagttgttgggagaacgtaacaagcttagtcccttcatggctgtgcttcctcactgctttcgattgtttaaccaagagacccagcttgttacagtcctcatcaacacaaaactggctgagtccacaaggtagctcatctggtattattgttaaaaagacggtcagagtagatattcctgtggacgcatatcctaattttaactttgttggtcgcctcctaggccctagaggaaactctctaaagcgtgtagaagcaagtactgagtgtcgtgtcttgatcaggggccgaggtagcattaaggatccagctagggaggaaatgatgagaggaaaacctgggtatgagcatctgaatgaacctctccacattctagttgaggcagaattaccagttgaaatagtagatgctcgcctgatgcaggcacgtgaaatacttgaagatttgctcaaaccggtggatgaatctcaggatttctacaagaagcagcaacttcgggagctagcaatgctgaatggcactcttcgtgaggagggttctcccatgtctggttctgtttcacccttccacaacagccttggtatgaagagggccaagaccagggggtaaattatcctaaagggtgagagggattttggagcttgtgttaattttctacatcatcacttaccgtgccacaggtaatgctgtcaacgaatgccctgatctgcgatcggggcactggcatcatagtgccagttctaacttgttctatgtgcagtgtgtttatattgagtttgggggaggtttaaagatggtagcacgtagtaaaggtccaattgagtttggtgaatttgcttttatagtgttggttaaggtttggttagatattcaccaaatctgtctatactactattatatggggttatatttgctgataaaaaaaaatatggggttatatttaagcttgcaataacagttttgatatgtttttggtattttctgcgaggaaggtaatgttaatggtttgtacccagagaaaaaaaaaaaaaaaaaactacttcaatgcgtctatgggtgacattttgtagtatctaatttagattataaattcgtg

SEQ ID NO: 3249 - DNA, 820 bp, Glycine max
  misc_feature (767)..(767): n is a, c, g, or t
tcgagcagctacgtaggccccccccccgactctcttcttacttcccctctctctctgtctctaaaaaccctttttttctctctctttcacacacaccaaccagactcgatcagtggtggcagatagagagagacatgatgtcaacttccggcgccggcaggtacatggcttttccgccgtctccgtccgcgcctccgtcgccgcacctctccggtcttcgctccactcccctctccgacccggacaaatatctagctgagttgttgggagaacgtaacaagcttagtcccttcatggctgtgcttcctcactgctttcgattgtttaaccaagaaattttgcgtgtaaccacgctgatggggaatgcatcagttttaggtcaaagtgggcttgaacacgctagccccctggctactggaggaatattttcaaatggaggtgccgatgtgaacggatgggcatcacgatttcaatcagaaagacccagcttgttacagtcctcatcaacacaaaactggctgagtccacaaggtagctcatctggtattattgttaaaaagacggtcagagtagatattcctgtggacgcatatcctaattttaactttgttggtcgcctcctaggccctagaggaaactctctaaagcgtgtagaagcaagtaccgagtgtcgtgtcttgatcaggggccgaggtagcattaaggatccagctagggaggaaatgatgagagggaaacctgggtatgagcatctgaatgaacctctncacattctaggtgaggcagaatacccagtgaaatagtaaatgctcgcctgatg

SEQ ID NO: 3250 - DNA, 1567 bp, Glycine max
  misc_feature (41)..(41): n is a, c, g, or t
cttttcaaaaacggttttccagacagtgattgtttttcttntggtgtttacaaaaaaaaaaaaaaaaaaaaaaaaaaaaaaaaaaaaaatcaagactcacaattagacccccccaccacacctcactcataccttccgcggccaaacagagcaaaaacccaacacaccacactcttgcaatcaatcaatggcggaaccttcctcctcgaagcccgccgtccctctcctgaaggacgagctggacatcgtgatcccgacgatccgcaacctcgacttcctcgagatgtggcggcccttcttcgagccctatcacctcatcatcgtgcaggacggagaccccaacaggaccatcaaagttcccgatgggttcgattacgaactctacaaccgcaacgacatcaacaggatcttgggtcccaaggcctcctgcatctcgtttaaggattctgcttgtcgctgctttgggtacatggtgtctaagaagaagtacatctacaccatcgacgacgactgcttcgttgctaaagatccttctggaaaggacatcaatgcacttgagcagcacattaagaatctcctatgtccatccacaccatttttcttcaacaccctttatgatccttacagagctggtgctgattttgtccgtggatacccttttagtcttcgtgaaggtgccccaactgctgtttctcatggcctgtggcttaacatacctgattatgatgctccaacacagcttgtcaaacccctcgagaggaacaccaggtatgttgatgctgttcttaccattcccaaaggaacattgttccccatgtgtggtatgaatctggcattcgatcgtcagctgattggacctgcaatgtattttggactcatgggtgatggtcaacctataggacgatacgatgatatgtgggctggatggtgtgttaaggttatctgtgaccatttgggcttgggagtgaagactggccttccatacatctggcacagcaaagcaagcaatccttttgtgaatctcaaaaaggagtacaagggcattttctggcaagaagagatcattccattcttccaaagtgccaccattccaaaagaatgcacttctgtccaaaaatgctacattgaactctccaagcaagtcaaagagaagcttggggctgttgatccctacttcaccaagcttgcagatgccatggtgacttggattgaagcttgggatgagcttaacagcaccacatccgaagaagcttcttccaagtcagccaatggtgctgctgctgctaccaagtgaaccttttatggttgcggactttagttttcaaatcagagtaattttgttatcatattttttttataatgcaagattatagaccaatttattgattttgatatcatcattattactatttatattataaatatcattaatgtatttcaggataatttttttcgatattgtgaatttgtgattggaaccttagaaatttaattctgcttagtggatgagttttcctgtttatactaataatttatttttctattttaaaaaaaacaaaagaaaaaa

SEQ ID NO: 3251 - DNA, 645 bp, Glycine max
acacctctctctactcccacccctaccaccacctccaggaacagcgagatccagggctcgagatcgagatcccggccaggcagcaatggcagggacggtgactgtgcccggatcgtcggtgccatcaacgccgctgctcaaggacgagctggacatcgtgatcccgaccatccgcaatctcgacttcctcgagatgtggcgccccttcttccagccgtaccacctcatcatcgtgcaggacggcgaccccagcaaggtcatcaaggttcctgagggcttcgactacgagctctacaaccgcaacgacatcaaccgcattctcggccccaaggcctcatgcatctccttcaaggactccgcgtgccgctgcttcggctacatggtctccaagaagaagtacgtcttcaccatcgatgacgactgcttcgtggccaaggacccatctggcaaagacatcaatgctcttgagcagcacatcaagaacctcctcagcccgtccaccccgtttttcttcaacaccttgtatgacccctaccgtgaaggtgcggactttgtccgtggataccccttcagccttagggagggtgcccccaccgcggtctctcatgggcctttggctgaacatccctgactatgatgcaccca

SEQ ID NO: 3252 - DNA, 1209 bp, Glycine max
aacagacgagagaaaaaaataatagccaatatgccatgagttgttcaccagaaacaaaaatgccatctcggctttccatagcttttctttttcttaaattcttggtccacaaattgagtgggaacttaatcagcatgtctgtgccatctatggtgctaacgccatgaaactaggttctctcaatttattttttgatatgttgtggaaggacgcagagaataagttccgttttctgtttcttgataaaatatggtaagactacttttattcagaccatatttcaagaaagcataattgaaattgttattttatttctccactacagagggaggggaggagcctcaccatgccaataaaaggcccttaatcagctacgtaggcccccccccgcagctgcaaggaaacaaacaaatcacaactgagcaacacaaactattgcaatggcttctgctcagtgtgagaaacccaacaccacagttgaagttagccaaccaaaaagccatcacaaacccaatactgcaattgaagtatgccaacccaaaacccaacacagctcgttcggccaaaaattatctgagataactagcaaggctttcaaagggcgtcatggcagcaaccaaaatcaacttcaatactatagccaaactcaggttgagtcccaaggccacaatggcaccaaaacagaggctcactactatggccaaactcagacccaaaatgacaaaaaacatggggtctccaaaacccagatcacagttactgtcgtccaagcacaaattacccacaccgagaagaaggacccttatccttatgataccactacaacatgctttggggctcatgcaaagaagaatggagagctcaacaacaataagaaggatatgaacttgttccggaggattaagaatggcttatcccgccataataacaatgaaggaggcaacagcagcagcagtgatagcgaaagtgatgatgagaagtgcccaaagacaaagaaaggaggaaactgcaagcaggacgcaactaagacaaagccagtttaactgacggaaagaacatcgccacaaagtgtgtttacgatttcatctgttcttgtacccaaatagttgggaaaaataaattccaatatttcacttggctgtgagtatcttatgataaataatatattttgaagtttacccaaaaaaaaataaaaaaaaaaaaaaaaaa

SEQ ID NO: 3253 - DNA, 3292 bp, Glycine max
  misc_feature (463)..(463): n is a, c, g, or t
  misc_feature (507)..(507): n is a, c, g, or t
tccgggccgcctccgtggcccccccacaaaacccttcctcttctcaatccccttttctccctcccaattccccttatcgcgcctcgaaacatcttcaattttagggttagggatttcttcctctttccatttcacctctctctctcttcttttttcccttctacactgagactccctcgccccactgggtgctgacgtgggcgcaccctcgccgcttctcgttccatggaggccacggctgccgttgccactgccgccgccgtgcgcggtgcctcgctccagatgccgcctccttcgcgcaaagagtggcgcgctgtcgccgagcaccatcattctgcccgaaaccccgacgacgaggagttagacaatgccaaactagggcaatcagacgagagaaccatatatgagcaaggaagagagcctcttgatgttgatttttgttcaataacagtggatggagctntagacaatgatattttgcagcaacagctacataatgttgttagncaacctcctcgtccgctgcaaatggagattgaactaaaggctcaaatgattgctagaactgagataatggaaatgcgaaacacctttgatgctcaactcaaggaccatgttagtaatgccaacaagtttcaggagcaactttgtgaaagggagcagacaattcatgagcttgaaaggaaaatagaagagaaagacagagagctgcattctattaaattagacaatgaagcagcatgggcaaaacaggaccttctccgtgagcaaaacaaagaacttgcaacattcagaatggagcgcgatcattcagaagctgaaagagctcagcatataaaacaaatacacgatcagcaagaacatattcaagaaaaagataggcaacttaatgagttgcaggaacaacatagggttgctcaggagaccattatgtttaaagatgagcagttcagagaagcccaagcatggatagctcgtgttcgtgagatggatgtttttcaatcaacaacaaatcaaacattacaagctgaattgagagagcgcacagagcaatataatcagctctggatgggttttcagagacagtttgcagaaatggaaagagttcatttgcatgctattcagcaactacagcttgaactggctgatgcaagagagcggagtggaactttcaatgatgattcaagaatgtcccaaattaattcaaaaaataatgtaactcagtttggacaggaaaatggaagccaatttgacttgaatggaagcaatgcttcgggtggaaataatggtctccttccaagtgaaagcactgctaatgatggaccatttgtatctacaggcaatgcatcaatccagactgaacatgttgctggtgttcctattgctccatcatctctaattgtcccaccttcatacctcccacacagccaagtaactgcattgcatccatttgttatgcatcaacaaggagttcccaattcagttgcatcacatgttcctcaatcacatgttgggcattttcacccagtgccgtcaatgtcacctgtgcagcagtggcaaaatcatcagtctgtgtcagagggttcacaggtacctgtacaggaacattcttcaccatctcaaactgatcaacatttgatgagatcagatgctaagtttagctatgaaatgtctgttaatgggaaaactcttcatagagactatctggatgctcacatccagcaaggtgaggaggcacaaaccatgattttttcagctaccagtgaaacacagtcagtggataagggtcaacttgttgcttcccatcaagatcaaagcatgcaacaaatttcttcacagttctctgatgctttacaattgaactcttttgaaccaaatggtgaaatcaaggagcagaattctgtgacattatctaataatggacctgacgaccaagttttattggctgagcaagcgagttctgctgcaattgcatcatctgtcacaagccattcagttaatcataatgaaatgattcagaacaattctactgattctgttttgtctgaagtgttcacctcttctgcgttgacagcttcaacaattgcaaagacatcagagattactctcctcgatggaaaatcattattagcttgtattgttcgcactattccagctggtggccgaattcgaattagttcaacgctccctaataggctgggcaagatgcttgcacctctacattggcacgattacaaaaggaagtatgggaagctggatgattttgtggctagccatcctgaattattcttgattgagggtgactatattcagctccgtgaaggtgcacagaaaatggttgctgcaactgcagcagttgccaaagttgctgctgctgctgctgctgcatcaactccttattcttcatacatgtccactgtggctgttacaccaatggctcaatctcatcgcatgaaaaaggctccttcaaatctgggggatgatcctttaaaaatgtcagttatgcagcgtcagcaaactaatggtgcactcagtgttgctggtggtctttcaaatgtcaaaattttgagtaaatctaaggtttctcgggaaatggacggccctgaaagtagggttgtgcagtcttctgtacaattacctgttggcaatggtggaagcattgacaaatcaagtatgagcagtgcccaaatctcaggctcagcaaatggaaggctagtctcaagctttgcttctaaacagcagaccagggcaactggtgctgtgtacccttctcaaagataggaagatggaagggcgtgttagattatcctgtctcaccaggatgcggatgaaaacatacaagattatttatcgggtttgtgggagaatgttttttgaagcattgacggagtaatcttgtgccctgggcaaaatgtgattttaagttgccggtgctatctccatctccagtttctgtagtagtttatttctcccagctgttacaattcagtgtgctttcattaatgtgggcctcttgctgtggtattcttgctgcatacattgcatctgataaactgcgatttttttatgaatgcttgaaagattaatcagcatggttaaccttttcagtttgcaaaaaaaaaaaaaaaaaaaaaaaatttagtaattcaaatgtctctcagtctaacaagattcgaggatatggccaagctatatgacggttgcgtattacgacagtaatgagttaacgttgaagtatttgtacgtaggttaagttcttgtcattattatcttgccaccatatttggttgag

SEQ ID NO: 3254 - DNA, 1937 bp, Glycine max
acgagagttccccttttttgactttgcaaactgatgagtgacaactgattataagctaatgtttcttttacttttcaggccaaagcttgttcctcagctagcattgtttggctgaagaacataaacaggagaactgttgatgttattgcatccagactgtatttttactattcgtatagctatgaacttatgggagatcttgctgaaattcggggcaaccttcttgcattgcaccgaattgccaccctccgccatgatgagctgggtcaggaaacacttcttaatttgttacttcgtaactaccttcactacaacctatatgatcaggctgagaagttgaggtcgaaggctcctcgatttgaagcacattcaaaccagcagttttgtcgttatctcttctacctagggaaaattcggacaattcagctggagtataccgatgcaaaagagtctctcctgcaggccgcccggaaagctcctgttgctgcacggggttttcgaattcaatgtaacaagtgggctgtgatagtgcgtttactgttgggagaaatacctgagcggactgtcttcatgcagaaaggaatggagaaagctctaaggccttactttgagcttacaaatgctgtgcggattggagacttggaactgtttaggaatattgcggacaagtttgccactacctttaatgcagacagaacccataatttgattgttcgtttgcggcataatgtcatcaggactggtttacgcaacatcagcatctcctattctcgcatctctctagctgatgttgctaaaaaactgaggctgaactctgcaagtcctgttgcagatgctgagagcattgtatcaaaggctattcgtgatggtgcaattgatgctacattggatcatgccaatggttggatggtgtccaaagaaactggagatatttactccacaaatgagcctcagttagcctttaattctcggattgctttctgtcttaacatgcacaatgaggcggttcgagcacttcgatttccaccaaacacacacaaagagaaggaaagtgctgaaaagagaagagagagacaacagcaagagcaagagctggctaagcatattgcagaggaggatgacgatgatttctgataattgttttttttcaccctatgaattgctatctggataccttcatttccaacgtttgctcatcttttccttttgaagaactttcattatcatttcctttttcaaaaagtgaatttttcatttcctaagtggaagatctctgaaagtcagtttaacatatcgaaatatttacttttttttttcatccatgatgactgctatggtttgttccttgttaggagaattatgttttaggacctgaagaaaaaaaaatcaaatatttaggacgatgcgaattctgttcagaagttttattattagaaactgttaccctggaggatttattgaattatagcatgacaatctatttttctgtcaagaacgattcattttctttgtgccccgagatgaaatccttccttatgcatgtgtagatggggattttatgtaaacgtattagggcttttgaaaaaatgaggagaaaattgagcaaaggataagtgtggttatgcctatgcatgtgcaagcgatgatgtatgtgaaatgcccagcacaattttatttgcatctagtgcaatgcaagcatattatttgtcatggtgcactagtgaggtgatcctcgtttcggacttaaattggattgatcatattatttgcttgtgtttggaccaagctatttgcttcgtgaatttgagttcaatatagtgatctagaacaaatataccgtttaaaaagttattttaaacaatttattttatattaatatatgaaaaaattttttttgataaaattataaaaagggcttaatttatttataattatgg

SEQ ID NO: 3255 - DNA, 1404 bp, Glycine max
  misc_feature (27)..(27): n is a, c, g, or t
tcgagtcagctacgtaggccccccccnagctaatgtttctttttcctttgaggccaaagcttgttcctcggctagcattgtttggcttaagaacacaaacaggagaactgttgatgttattgcatccagactgtatttttactattcgtatagctatgagcttacaggagatcttgctgaaattcggggcaacctccttgcattgcaccgatttgcgactctccgccatgatgagctgggacaggaaacacttcttaatttgttacttcgaaactaccttcactacaacctatatgatcaggctgagaagttgaggtccaaggctcctcgatttgaagcacattcaaaccagcagttttgtcgttatctcttctaccttgggaaaattcggacaattcagctggagtatacagatgcaaaagagtctctcctgcaggccgcccggaaagctcctgttgctgcaaggggttttcgaattcaatgtaacaagtgggctgtgatagtgcgtttactgttgggagaaatacctgagcggactgtcttcatgcagaaaggaatggagaaagctttaaggccttactttgagcttacaaatgctgtgcggattggagacttggaactgtttaggaatattgcagacaagtttgccactacctttaatgcagacagaacccataatttgattgttcgtttgcggcataatgtcatcaggactggtttacgcaacatcagcatctcctattctcgcatctctctagctgatgttgctaaaaaactgaggctgaactctgcaaatcctgttgcagatgctgagagcattgtatcaaaggctattcgtgatggtgcaattgatgctacattggatcatgccaatggttggatggtgtccaaagaaactggagatatttactccacaaatgagccacagtcagccttcaattctcggattgctttctgtcttaacatgcacaatgaggcggttcgagctcttcgttttccaccaaacacacacaaagagaaggaaagtgctgaaaagagaagagagagacaacagcaagagcaagagctggctaagcatattgcagaggaggatgacgatgatttttgataattgtcttatttcaccctatgaattgctatgaggataccttcgtttccaacctttgctcatcttttccttttgaagaatttccattattatttccttttcaaaaggtgaatttttcattttctaagtggaagatctctgaaagtcagtttaacatatcgaaagatttactatttatttccatccatgatgactgctatggtttgttccttgtttggagaattatgttgtaggacctgaagaaaaaaatcaattatttaggaccaagcgaattctcttcagaagttttattatta

SEQ ID NO: 3256 - DNA, 1983 bp, Glycine max
acgtgattcccttgttaaaaggattttatattccgtccgaagggagtgttactgtgtgagcaaagttgcttcctctatcgtgttctttgcgttagggtttgcagatcgaaaaatactgacagcattgtgttgtgcggttacagaagatgagtgaagacgaggagatgaaagatcaggcaacgccttcacacttgctttcttcagttcctccatctacattgcaccatttgaagggaatagcatcaattattgaaaccggttcgtactcaaaggaagttcgtcgaattgctcgtgccctgcgccttacatttgcatttaggcgtaaattgacaacaccagttctctcatcttttcttgattatgttcttactcccgcttctgaacctcacactaggttatcctcttatctccctaatcctaaggagggtgatcgagagatggaagtggacagtgcaacatctactattcaaaccctggcggcgaagcacttggtgcctgagctagaaatctactgttacctccttgtccttctttttctgattgaccagaaaagatacgatgcggccaaagcttgttcctcagcaagcattgttcggctgaagagcctgaatagaagaactgtcgatgttattgcatctagactgtacttttattactcatatagctatgagcttacaggaaatcttgctgaaattcgaggcaacctccttgcattgcaccggattgctaccctgcgtcatgatgagctgggtcaggaaacccttctgaatctgttacttcgtaactatctacattacaacctatatgatcaggcagagaagttgaggtccaaggctccacgttttgaggcacattcaaaccagcagttctgtcgttatctcttctaccttgggaaaattcggacaattcagttggagtacacagatgcaaaagagtcactcttgcaggctgctcgtaaagctcccagtgcagcacagggttttcggattcaatgtaacaagtgggctgtgatagtgcgtttattattgggagaaatacctgagaggaccgtctttatgcagagaggaatggagaaagctttgaggccttactttgagcttactaatgctgtccggattggtgacttggagctatttaggaatgttgcagagaagtttggtactactttcaatagagaccgaactcataatttgattgttcggctccgtcataatgtcatccggactggtttacgcaacatcagcatatcatattcacgcatctcgctagttgatgtagctaaaaagttgaggttgaactctgcaagtcctgttgctgacgctgagagcattgtagcaaaggctatccgtgatggggctattgatgcttcattggatcatgccaatgggtggatggtatccaaggaaactggagatatctactctacaaatgagcctcagttggcatttaattctcggattgccttttgtcttaacatgcacaatgaggcagttcgagcactgcgttttccaccaaacacacagaaggaaaaggaaagtgctgagaagaggagagagaggcatcaacaagagcaagaattggctaaacatatcgcagaggaagatgatgatgacttttgataatgatttgctctttttatcttaccagtttgttgtcaggatgtatttatttcctatatttgctcatatttctccattggagaaacttccattaccatttcctttttggagcccgaagttttattttctaaaccaaaatcatctttaaatcctttgccatatcgagatatttgctgttaattacagatcatgggaacacattatttgtttcctgttaggtgaactatgttttgggatttgagtgaaatcaattatataggaccatgttagtgattcagttctaaagtttgaatattgtaaaatatttgctcattgacccaaaaaaaagaggtattataccactgagtctgagccattgcaatct

SEQ ID NO: 3257 - DNA, 1303 bp, Glycine max
cccgggtcggcccgcgtccgcccacgcgtccgcccacgcgtccggtaacctccttgcattgcaccggattgctaccctgcgccatgatgagctgggtcaggaaacccttctgaatctgttacttcataactacctacactacaacctatatgatcaggcagagaagttgaggtctaaggctccacgttttgaggcacattcaaaccagcagttctgccgttatctcttctaccttgggaaaattcgcacaattcagctggagtacaccaatgcaaaagacttgctcttgcaggctgctcgtaaagctcccagtgcagcacagggttttcagattcaatgtaacaagtgggctgtgatagtgcgtttgttattgggagaaatacctgagaggataatctttatgcagagaggaatggagaaatctttgaggccttactttgagcttactaatgctgtccggattggtgacttggagctatttaggaatgctacagagaagtttggtacgactttcagtagagaccgaactcataatttgattgttcggctccgtcataatgtcatccggactggtttacgcaacatcagcatatcatattcacgcatctcgctagctgatgtagctaaaaagttgaggttgaactctgcaagtcctgttgctgactctgagagcattgtagcaaaggctatccgtgatggggccattgatgcttcattggatcatgccaatgggtggatggtatccaagggaactggagatatttactctacaaatgagcctcagttggcctttaattctcggattgccttttgtcttaacatgcacaatgaggctgttcgagcactgcgttttccaccaaacaaagacaaggaaaaggaaaatgctgagaagaggagagagaggcatcaacaagagcaagaattggctaagcatatcgcagaggaagatgatgatgacttctgataatgacttgctcttttttatattgccagttgttgtcaggatctctttatttcctatatttgctgctcatatttctccattcgagaacttccattaccatttcctttttggagcgccaagttttattttctacaccaaagttatctgtaaatccttttgccttattgagatatttactgttaattacatttacagatcatggcgacaccgagtatttgtttcctgttcggtgaactatgttttgggatttgagtaaactaatcaattatctaggcccgtgttagtgattcatttctaaagtttgactattgaaacatccctgcccgccgccccagagga

SEQ ID NO: 3258 - DNA, 2836 bp, Glycine max
agctatgccaaaaacccatcaaagaattcaccaccctttttcttctcctcctccttctctttttccccccacatattattatcttttttcctgctctgtgattgccaacaaggttctgtgcagtgtttgtagagagagagagagagagagaggtagatagctagatagaccacagaactagaaaaaaaatattataggaagagagggagaaactaatagagagtcctatgctgggggactcagcagtgttgggaacaggaggaggaggctctggtgatgcagtggcagcagcaccacctgctgcatcaggaggagcacatgatggtggtgttgacggcggtgacggtggcggtggcggatcaaattcaggggatgatagagttgaggaaggtgagaggagctttggtgggaacaggtggccgaagcaagagactttggctttgttgaagatacggtcggatatggacgtggcttttagagatgcaagtgtaaagggtcccttgtgggaagaggtttctaggaagctggcagagcttggctaccacagaaatgccaagaagtgcaaagagaagtttgagaacgtttacaagtaccacaagagaaccaaagaaggtcgaagtgggaaatcagaaggcaaaacttatcgcttctttgatcaattacaagcccttgaaaacaaccctgcaattcatggaaagcaatctccaacacctccaaagccgccaccacaaacaacagcactatcagcaacaccagtgtcaatagtggtaacaacaactacaactacaccatcatcaataataatgccacttccattgccaccagtgtctaataacaacaacaacaccactgttccatccacaacatcacttcctatgcctcaaagcattctcaacataacaccaccatcaacactgaacatcacaatcccttcttttccaccatcaaaccctacaacatacttcccaacacaaacaccaaaccctactagcaacaacaacaacaaccctccaagcaccatcaccccaccttccttccccaatttccccgccgatctcttgtcgaattcgagttcttcatcgacttcttcggaggaaacaccgacgacggaggccagagggcgcaagaggaagaggaagtggaaggacttctttgagaggctcatgaaggaggtgatagagaagcaggaggagctgcaaaggaggttcttggaggccatagagaagagagaacaagagcgtgtggtgagagaggaagcgtggagaatgcaagagatgcaaaggatcaacagggaaagggagattctagcacaagagaggtccattgccgcagcaaaagatgctgctgttatgacatttttgcaaaagatagccgaacatcagcaacaagaaactatcaatcttgaaccagcattgaataacaacagcatcactgttgttccacagcaaccagtgccacaagcaacaccaacatcaactccaacaccacaacaagcacaaacaacaacagttcctgaggccccacaagtgcagccattggtcccacaactacaacaacaacaacaaatagtggtgagtaatgtggaaatcaacaaagctgataataacggtgagaatttgatgatggaagcaagctcttcaaggtggccaaaagtggaggtacaagcactgataaacctgaggacaagcctggaaacaaagtaccacagaaagtggaccaaaagggccactgtgggaggagatctcagcgttgatgaggaaaatggggtacaaccggaacgccaaaaggtgcaaagagaagtgggagaacatcaacaagtacttcaagaaggtcaaggaaagcaacaagaagaggcctgaagattcaaagacatgtccctattttcaccagttggaggctctatacagggagaagaacaagggagaggggcagatgaagccggagagcatgatggcgccgctcatggtgcagccggagcaacaatggcctcctcaaacaacgcttgtggtaccgccagaagtaaccatgggagacacccagaatgaccccatggaccggcagtaccatgaggagaatgaggatgacgaggacgacaaggaaattggagatgaagacgaggatgaggacgacgaaggaggtgataattatgagatagttgcgagcaaaccagccacagctgatgcttccggagagtgagaggaaaaaatattgaccaaaaagggcatcaattaaagaatgatggatcaatttgaattcacatattgtcggaaaaatggtggtgttgggatgaaatttggtattgatggtggatggtgatgtgattgtattgaagattttgaaaatgcacgtacttcagaatgacacatgggtataggggtagccagtagggtgggggaatctgggttggaagtacttggtacaatagcagcatatagtcagtaagattatatgttttttttgttttgaaagaagaaataattaattattttttgagctcaataaataagttgatgagggagaggggaagggttataagatagagaaaaaacttcagacttgcatgagaggtgaggttcaacataaaatgaataagcaagaaaccttgattaatgttatggtactagctatataggttttttgtactaaattttcatgttcatgttgatgtaaatgcgagaaacgattaattgtggggggggtttgtctttattttgtttctttaatttccttttcaattttgttactcttcaaatgttgtcaatcatttttgtttcttttcctccttcattgtatattatcttgtcttgatgagttaaaaaaaaaaaaaaggggcggc

SEQ ID NO: 3259 - DNA, 1288 bp, Glycine max
tcgcccgcgctcgcctccgtctctgcaattacgatggcgcccagggacaagactagtgccgttaagcctagcggtaacgccggggtgaaggacctgcattttcgtggagtcaggaagagaccgtgggggaggttcgccgccgagatcagagatcccgccaagaagacccgcgtctggctcggaaccttcgacaccgcggaggaggcggcccgtgcctacgacgccgccgcgcgggagtttcgcggccctaaggcgaagacaaacttccctctcccttcggaaaattttaagaacgcgagccctagccaaagcagcacggtggagtcctccagccgcgaccgcgacgtcgccgccgattcctctccgctcgacctcaacctcgcccccgtcgccgtctcctccgctcgattccccttccggaaccagttcccggttttccccggcgcggtgccggcggcgaaccaggttatgtacttcgacgccgtcctacgcgccggcatggccggtccacgtggcttcgcgtttggctacaatcctcatcccgtcgcggcgagtgagtaccacgcgacgacgagcgactcggactcgtcctccgttatcgatctgaatcataacgaaggcgttgttaaggggaacggttctagaatgttcgatctcgaccttaaccatcctcctccacatgagatcgcttgatccagaatctgactcatgccttgagtttttctttttctaattttgttttttaaagtagagaaagtagcagcgttcgataaggaaggaagggaagggaaggtaaagaaatactatgtgaatacgtagtcggtatgattgtctctatttttttgcgacagaggaaccaccagtttcatgctgttttttcttaaatcacgaagcgctcatccggtttttctttcgttttgattgatattttactacggtgtaatgttttttggttgcagccataatttggttcaatgaaattaacacggaaagtttgaattattttgattgtgatatacattttcaattaaatacgaatggggaaggaaagaaaagctgtgggtgaagcgtacttggtagtaatggtcgttgttgttggcgttgatttgattgacaggtggctcttgttacctctcccttcaaggtgactccaacgtccaatggtgcgtgggctatgtaactacacgactggtggcacagtgccacattctcaattcgctcccatcttcatgatgaaaatgaatttcatggtaaaaaattaactaaagtatgcaaaagtcatttaatt

SEQ ID NO: 3260 - DNA, 1529 bp, Glycine max
  misc_feature (38)..(39): n is a, c, g, or t
  misc_feature (56)..(56): n is a, c, g, or t
tttttaaaaagggacaaaaccaatattccattctcaannggcttataaatgtgatntgaggtaatataagagacatccaaagtaagttattcgagtatgcataaacagagtatgcagtcctgcttcttgacctcaatggaaacagtattttcttctttgactcgtcctaatcctcctcgtcgttttctagcaatatcctcttcaatgcttcgtaacacatgaaagagattccagcggctggtaccaacttcatgcaactaggtgctagccctctatataaaccatgtatgccttcttgttcaaatatgcatgcaagggcatgaaacacattcttgtaaacctgccttccactgagagctccaagttgcatctgcttgcgagccacctcaagtggaaaagttgcactacttgaaaaagcaccagctaccgaaccaatcaaaagggtttcaatgttgccgaccttctcttctttaaaaattttctggtatgctttccttaaagtgtcgtaggcatagtaattggtagcagcatacgggacaactccaataagactagctgcgaggcctctataaagttgagcaggaccctcttctcgaattattttcacgaatgcatgaagcagaccatgataaatatcgctctggacagttaatctagtcttgactaattcaagaggatatgtacatatagttgaactgattccagcacaggcacctgcaatcaaagatgcaggaattgggattttggactgctctccaggctttggggataggttcttgtttactgtatcaaaagcaaatagctcaatggccttgctaggcgcaacccgaatgacattaacaaaattacccctaaacaatcccttccagccatcagttttcataatattgtcgaacacctcagtggtggaatggccactactccccaccatcaagagagtccttatagtctccaaaggcgccacagcagtccgagacacggcaccggcaactgccccactaaacaacctcctcagtgaagggttcctgatcttaagcttgagtgaaacaccaccaccctttctattcttcttccccttagctccttcctcaacaacctcttccttcccctgaggttgaacatgcttgaggaacaattcgtttaagggaagtttcatgccaccattgtcacgagaatcagaagggtcgttaggttgcacgccaacccccattcccatttgaccaacactggcaaacaaacctccgaattgatggtagccatctttggattcaaaccccaaattgctgacagagaaaaaaacatctattttctcatcaaacagttggattccccttctacccatcaactacagaagctttgtgaattgtgatatgcgataaagattacttttttgcacaatgattgccgtccctcacagtcatggtttcagggagattgtgaatttgtcattctcagacagaatcgaaggaataaggttggtaaagaaaagtgggtgaacgaatgaagatgttattattgtgtgaactgtg

SEQ ID NO: 3261 - DNA, 3643 bp, Glycine max
  misc_feature (3423)..(3423): n is a, c, g, or t
ggtccggattcccgggtcgacccagcgtccgcgtttctctcggcacctcgcaactcaacacactcttcgaaactctggatctgttcttctgcttctaagagacaacattctcttcttgaatctcaatctctcggaaactaaaccctaagaacagacaaagatggtttacaccatctcgggaattcgatttccggttcttccttcgctgcacaactcccgcttccgtggcgatcgcagaactgcgtctcttcccgtttttctcagaaacaactccttctctcgtaaaacccttgctctaaaatcttcccatgattctgattccttgtcttctgcgattgccaaatctgataaagtacttattcctcaagatcaagataactctgcatccttgacagatcaacttgaaactcctgatataacctcagaggatacacagaacttagaggatttaaccatggaagatgaggataaatacaacattagtgaagcagctagcagttacagacatattgaagatggacaaggctctgttgtatcatcacttgtagatgtgaacattccggccaagaaagcgtcggtatctgttggtaggaaatcaaagatagtaagtgatgaagttaaacctaagatcattcccccacctggcactggacagaaaatatatgagatagatccatctttgctagctcaccgtgaccatcttgatttccgttatggacaatacaaaagattgtgttatgaaattgacaagcatgaaggcggtctggatacattttctcgtggttatgaaaaatttggcttcatacgcagtgctacaggcattacttacagagagtgggcacctggagctaagtcagcagcattaattggagacttcaacaattggaatccaaatgcagatgtaatgaccaggaatgaatttggtgtgtgggagatcttcttgccaaacaatgtggatggttcaccaccaattccccatggttctcgggtcaagatccgcatggatactccctctggaatcaaggactcaattcctgcttggattaagttttctgtacaggctcctggtgaaattccatacagcggaatatactatgatcccccagaagaggaaaaatatgtcttcaaacatccacagccaaagagaccaaaatcacttagaatatatgagtcacacatcggaatgagcagtccggagccaaaaatcaatacatatgtcaattttagagatgatgtactgcctcgcattaaaaggcttggctataatgctgtccagattatggctatccaagaacattcttattatgccagctttgggtaccatgttacaaatttctttgcacctagcagccgatttggaactccagaggaacttaagtctctgatagacagagcccatgaactgggtctgcttgttctgatggatattgtacacagccatgcatcaaataatacattggatgggctgaacatgtttgatggaactgatggtcattacttccatcctgggtcacgaggttatcattggatgtgggattctcgcctttttaactatggaagctgggaagttctaaggtatctactttcgaatgcacgatggtggctggatgaatacaagtttgatggatttcgatttgatggtgttacatcaatgatgtacacacatcatggattggaggtagcatttactggaaattacaatgagtattttggttttgcaactgatgttgatgctgtggtttacctgatgctgactaatgatgtcattcatgggctcttccctgaggctgttacaattggtgaagatgtgagtggaatgcctacattctgccttcctacacaagatggtgggattggctttgattatcgcctgcacatggccattgcagacaagtggattgagattctcaagaagaacgatgaagactggaaaatgggtgatatcatccacacattaacaaacagaaggtggctggaaaaatgtgtagcttatgctgaaagtcatgaccaggccttggttggtgacaagacaattgcattctggttgatggacaaggatatgtatgacttcatggctttagacagaccatccactcctattatagatcgtggtatagcgttgcacaaaatgattaggcttattaccatgggccttggtggtgaagggtatttaaattttatggggaatgaattcggccatcctgagtggattgatttcccaaggggtgatcaacatcttcctaatggcgtagtagttccagggaataacaacagttttgacaagtgcaggcgtagatttgacttgggcgatgcggactatctaagatatcaagggatgcaagaatttgatcaggctatgcagcacctagaagaaaagtttggtttcatgactgctgagcaccagtatatttcacggaaaaatgaaggtgacaaaattatagtcttcgaaaggggcaacctcatctttgtcttcaattttcattggaccaacagctattcagattacagagttggctgctcaacccctgggaaatataagattgtcttggattcagatgatgccttgtttggtggcttcagtaggctcaatcacgctgctgagtacttcacctcagaaggatggtatgatgaccgacctcgatcctttcttatctatgcaccttctagaacagcagtggtttatgccctagcagatgaagctgaacctgccctagcagatgcaactgaaccagagccagttgatcttgatgacaagcttctgggatgaatgttacgagtgcacaaaggcatggatgcagtaaacccctagtcaaactagccaaccagcgtctgatggtttaaccgccactggaacatcaaagaagcagaattttgaagtggaataagtgaagcgctagttcatctttagtgaggcaggagactagcctcgaaatctagtacatgtgccttgctaggtaataagttgtgatagcacacccatcttcctatttttactttttaggatttatcgtcttgacatgttataagttgcgccgcgattgagaaatgtgaatcaacaaagctatggtccgcgaacctgagactcaatgtacctatgcacatatcaatcttcattaagtgcatactctgttaagagttggaagcttccaaggggcttttaccgtgggaaattttgcaggaggcttttaaatatgtttcctttagattttatttttatttattgattaaactgtttcctttatatttcaaagttgagttgtagcacaactcagagtattctatgcagtgtaataaagacattgtacacggtcataaaaaagaaaataaaataatcgcctactgtatatagggtcgctccttcacttcctttcaccatgtatttgtttaaaataatagagaatgtttacattcattgtgcatggnagagagaaaggaacggagcatagcaatgctagtatgtattgagcgggaggagcgagagtgaggaatggagagagagaaggtaaggtggcgaagcgtaggaatgtacgttaggtagtgatgggaagggagtgttgcgtaggttaggttgagaatgtatggtgaggttcgatagggagcgtagttattcgagtgtaaggtatgctagtatacggtagagtag

SEQ ID NO: 3262 - DNA, 1230 bp, Glycine max
ggctcgaggaaattcgagtcggctacgttggtcccccccccgtccttgtggggagctgagatatccgtcttatccagaaagctaaggaacatggaggtttccgggaattggagaattccagtgctatgacaagtatatgagagcttccttggaagcatcaactgaggccattgggaagaaagagtggggaaaaaatggaccacatgactcaggccaatacaaccaatttcctgaggacactggatttttcaaaagggaaggtacatggaacacagaatatggacaattcttccttgactggtactccaccaaacttgttgaacatggtgagaaaatccttgtatcagccaaaggcatattcaactcatgtggggtgaaactatctgccaaagtagctggaattcattggcactacaagactaggtcacacgcggctgaactaactgcaggctactacaacacgcggtttcgcgatggatacctaccaatagcacaaatggtggcaaaacatggagttgtgttaaacttcacctgcatggaaatgagggacagagagcaacctgagcattgttcccctgaggggttggttcatcaagtgaagatggcagccagaacagcagaagcagaacttgctggggagaatgcacttgagagatatgatgcaggtgctttttctcaagttctgtcaacaagtaactctggttctggattggctgcattcacttatctgagaatgaataggaggttgtttgagggagacaattggaggcactttgtggagtttgtgaaatgcatgtctgaaggtggaaagagacaaaggcttcctcaatctgattcttgtgggactcatctttatgttggacacatcacaggaattcagaagcagcaagagcaagctcaagaggttgctcttgtgtgaataagtatagcatcatgtggaggggtcactgtgtatactgtctagttaagttaaaagcatcatagttttatagaagagaaaaagagatagaattatgatgggtatacgcaaggaaaatggcgtattctagaccaaaccctgagatcattaggaaaaatattgttttatttcatgttagaaatccaataagtgctgtgcggttaattcccgcaaattgatcttatgtggtatttcacaggaattcgtttgttaatttgttccaatcatatgttcaaactctttaaagagaaaaatgaaaaatctttccatat

SEQ ID NO: 3263 - DNA, 1879 bp, Glycine max
  misc_feature (1778)..(1778): n is a, c, g, or t
agccgcgtctcagctacgtaggcccccccccccccccttaaaaatccttgctttctctgttgggtctgtttcatttcatcttctggttttggatcattcagcgccacacagacatacatggctcttgagtcagctcctgcttcagctgacatcagaggagttcacactcatggtggaggctatgttcagtataatatctatggaaacctctttgaggtctctaggaagtatgtccctcctattcgccctgtgggaagaggagcatatggaattgtttgtgctgctgtaaatgcagagacgcatgaagaagttgccattaagaaggttggcaatgcatttgacaacagaatagatgccaaaaggaccctacgagaaattaaacttcttcggcacatggaacatgaaaatgtgatagcccttaaagacattattcgaccaccacaaaggtataacttcaatgacgtgtacattgtttatgagttaatggatactgatctgcatcaaataattcaatccaatcaacaattgactgatgatcattgtcggtattttctgtatcagttgttacgaggactcaaatatgtacactcagcaaatgttctgcaccgtgatctaaagcctagcaacttgctactgaatgccaactgtgatcttaagattgcagactttggtctcgctagaactacatctgagactgatttcatgactgagtatgtggttactcggtggtaccgagctccagagttacttcttaattgctcagaatatactgccgccattgatatttggtctgttggttgcatccttggtgaaatcataacaagacaacccctatttctggggaaagattatgttcatcagctcaggctgattacggagctcataggctcacctgatgacactagccttggatttctacgaagtgataatgctcgtagatatgtgagacagcttccacaatatccaaggcaacaatttgctgctagatttccaagtatgtctcctggtgctgttgatttgttagagaagatgcttgtctttgatccaaataggcgcatcacagttgaagaagctctgtgtcacccatacttggctcctcttcatgatattaatgaggaacctgcttgcgttagacctttcagttttgattttgagcaaccatctttcactgaagaagatatcaaggaactcatctggagagaatctgtgttattcaatcctgatccacctatttattgagatttggaatttactatcatatgtgcatagtgaaatactttttgactggattacaacactaccgaggagttgttagctctctacagaagtatttaacatattggatatactgagattcttttggtaaaaattatttgaaatttaatgaaaaaaaaaaaaaattcttccttttgattattattttacattcttggatgtttttctcgttgagatgtacaattggagtaattagaagccaaacagcatactttcaggtttcagcaggaacatccataggctttgtctccttgttgtttgttggtgtatttctatccttcagcttactaggacaaacaattttagtgcagttaactgactctgtcagtttctccatcctttagaatgtagacacacaaatagtatgaaaggaaactgtctggatccaattacaaggtattggacttgagtcccatattgaatgtatgggattctagtgtatgtatggtttataagtttttgggcttttcaattacaacaactatcttttgtggtgttgttcnctctaggcccccaccacaaactttttatttgtggggacagacattatcccattgtatgaaataaaatataacagtttgttagtgtttgaaaatgttttcag

SEQ ID NO: 3264 - DNA, 1434 bp, Glycine max
aaagagacgtagagctgctatgggagattatgcatggtctgttggggatagagttgatgcatggatacaagaaagctggcaggaaggagtcataacagagaagaataaaaaagatgaaacaacatttactgttcactttcctgctagtggagaaacgttggttgttagagcttggcatctccgtccatcccttatctggaaggatggaaaatggattgaatcttacaaagtggggacaaatgacagttctacccatgagggtgatacaccaaatgaaaaacgacctaaattgggtagtcatgcggtagatgtaaaagggagagacgtgggcccccccccccccggtgctgtggagtcggcaaaacctgatgagatgacattacttaatttggctgaaaacgataaagtgtttaacattggtaagagcagcaagaatggaaataaatttgatgcacacagaatggtgaggactggacttcaaaaagaaggatcaaaagtaatttttggtgttcctaaacctgggaagaaaaggaaatttatggaagtaagcaagcattacgtggcccatgaaaacagtaagatcggtgatagaaatgattcagttaaacttacaaatttcttgatgcctccaagttccggacccagaggatggaaaaatagttccaaaaatgatgccaaagagaaacatggagccgactccaagcccaagacaagccatacagaaaggattaaggattcttcaaatctcttcaagaatgctgcttccaagagtgaaagtaaggtggagagagcaccccactctgcaagtgatggagcaacaggaccatttttgttttcatcgctggcaacttcggtggatgctcatcccactaaaagggcatcctcatcaagagcaagtaaagggaaacttgcgcctgcacgtgttaaatcaggtaaagttgagatggaaaaggctttaaacgacaatcccatgaaatcagcatccgacatggttgagccccggagatccaatcgcaggatccagccaacatcaagactattagaaggattgcagagctctttgatcatctcaaagattccttcggtttcacataatcgtaataccaagagttaaatggaagggagcttgcaatgattatgatgcggacacttaaaagaccggcctgttatttagatgaccgacatacctagcatagatgtgtatatttataatagagaaccaacctaggaatggaaattcttgcttcctatgtttcagtagacggtcggtcatatttgattttagtatttatttaaatttgaatgtgatttgatccataggctgtgctgtatatggatattctccatgttaccttgtttgtagaggtttgttcatcaaatgataacataacgcgatgctctactctactctacatgccaatcgctgcattcact

SEQ ID NO: 3265 - DNA, 4335 bp, Glycine max
  misc_feature (1494)..(1494): n is a, c, g, or t
ccggtccggattcccggtcgacccacgcgtccgcaaatacatgtgtattgccaaaatcttcaagtaaagatgattctatctcggaggggcaagcagttgaggttagtaatttaaattgtgaaaattgtccaaatatgcaccagaatgtggatgtcatagagaagacgacacatggcggcagcagtgttactaaggaagatgagctattgaacactggtgatcatgtggatacagtgattttgtcaagcaagtcagagacatctatgcctactgcagaagaaagtaacatttccactattaatgaaggaaatagtgacaatatggtaggaagtttttcaagtagcagtgcgacggccttttcaacaaaatcttccattttgggtgagtctactcaaatatgtgtaaacaatgaacctgacagacagaatgaccatgaaaaatgtgatctagatgtctctgtcaatgatcaggatgaactaatgaacactggtgatcatgtggatacagttatattgtcgaacaagtcagaggcatctatatttacttctgaggaaaataacatttcctccatccgtgaaggaaacagtggcaaaaaggtagaaggttttcctagtggcagtgtgaaggatttttcaacaaaatcttccattttgggcaagtctactcaaatatgtgcaaacaatgaatctgacagacagaatgaccaggaaaaatgcgatcaagttgtctctgtcaatgatcaggagcatgaaaaggttccttctgattctagccagaagcattgtgatgtcgataagggtgttgtttcatcatctattagtgaaggtagcatggaaatcaagttgacaacttccacagtatcaatccatgtcacacctatcaataattctgtttcacaagttgtttcggaaaataatagtttgacatcacatgagataatagacattccaccttctagcaaagttgtttccactcatgaagttactagtcacaatgaatttcaagggataactcctgttggaaattcttctgccgaggaaaagggagaatctacagcaaaagctgaggaagcaggcacatctaccctcgttggatcttctgagctggaaactgctccttgtcctgtcacaggaactgaaaaacatcattcttctgatacttctaggctattgttacgtgacagcgattgccagcacaatgtagggactagtgctataaagattggtgaacctcaaggaacagcaaatgataaagttattcaggaatctgcaaaagagactggtatgcctcaagttctatgtgcatcatccaagaaacagagtgacgttgtcacagtttctttagttaaggatgacaagaagactgtgcaggagaatcctaacgagtcttcctcagaaaaattaggaggtggaagcctttcccaaactgaaaaggacaaaaatcaagttgaggcttctgctaatcagaacacccaagtttctgaggtgataaatnggtggtccgaaaaatacattgtctactgctgaagatctaaaggagaataatgcatctaaagaccacgcgtccgcaactcctgaggtaaattcagtgattgatttgtccaaaaaggatgttgcagatgatgttggcaagatgcaaccaattcctgttactgaaaccgtcaaaacatcatcagctatggagggatctccttcaacttttgggcgaggtccctcaaaaaccaaatctgttggagaggtagcaacaaatggtgcttctaaagctacggctgagcgcaaaactaggcgagcatctaataagagtgctggaaaggaatcttctagaagaggaagtcatgcagaggacactatagactggctagacagactgatagaggtgataaatcaaccaaagtttccctgagcccatctcctggttttcagatgatgcagtcaaacgaggtgcagcagtttgggcatattgactcaaatagtacaaagtcatttgctgttgtaaatacttcaacatctagccttccagatttgaacacttctgcttctccacctgttttgtttcatcagcctttcacagatcagcagcaagtacaattacgtgcacagatctttgtatatggagctttgattcaaggcatggtaccagatgaggcttatatgatatcagcttttggaggatcagatggtggaaggagcctttgggagaatgcttggcgtgcctgcatggaaaggcaacatggtcaaaaatctcatcctgctaacccagaaacacctctgcaatcacgatctgttgctagaacctctgatttgccacataagcaaagtgctgctcaagcgaaaaggtatctcttcgccacttggtcgaaccagcagcaaggctactccaccaattgtaaaccccttaatacctctttcatctccactttggagtctatcaactctaggtctaggtagtgattccctgcaatctagtgccattgcaagaggttctgtcgtggattatccacaggcaattactccattacatccttatcaaactactcctgtgaggaattttcttggacataacacaccttggatgtcccaaaccccccttcgagggccatggattgcttctccaactcctgtaactgacaatagcccccagatttctgcatcacctgcctcagatacaattaagctaggatcagtcaaaggatctctgcctccttcctctggcataaagaatgttacttctggtgtctctacttccagtacaggtttgcaaagtatctttacaggaactgcctctctgcttgatgcaaacaacgtgacagtatcacctgctcaacacaattcagatccaaagcccaaaaaaagaaaaaaagttgtggtctctgaggatctaggccagagggcttttcaatcactggctcctgctgtcggtagccatacatctactcctgttgcagttgtggtccctgttgggaatgtgccaataactactattgaaaagtcagttgtgtctgtatctcctcttgctgatcaatccaaaaatgatcagaatgttgagaagaggattatgtcagatgagtctcttttgaaagttaaggaggccagggtacatgcagaggaagcttctgctctctctgctgctgcagtgaatcatagcctagagttatggaatcagttggataaacataaaaattctgggttgatgcctgatattgaggctaaattagcttctgcagcagttgccgttgcagctgctgcagccattgcgaaggcagcagcagcagctgccaatgttgcctcaaatgctgctcttcaagcaaaactaatggctgatgaagcattgctttcatctggttataataattccagccaaagtaatcaaatttgtctttctgagggtaccaataacttaggaaaagcaacccctgcttccatcttgaaaggtgctaatggaaccaatagtcctggttctatcattgttgctgccaaggaagctgttaaaaggagagtggaagctgcttcagctgccaccaaaagagctgaaaatatggatgccattgtgaaggctgctgagctggcagcagaagctgtatctcaagcaggaaaaattgtaactatgggtgatcctttgccaataagtcagttggtagaagctggcccagagggatgtttgaaagcaacccgagagtcttctcagcaagttggattattcaaagacattaccagagatatggtgaacaataatgtgagagatattcctgaaacttcttatacacataacagagacattttatctggtggcatttctgctcctattaagatcaatgaaaagaattcaagaggagcaaagggacacaaggttgtttctgatttagtcaagcctattgacgtggttcctggatctgagcctgaaattcaggctcctccttttactgttagtaatggatctgaaaatctggtggaaagtagcatcaaggagggcttactcgtagaggttttcaaagatgaggaagggttcaaagctgcctggttctcagccaatattttgactttgaaggataataaagcttatgtaggctacacttcacttgtagctgctgaaggtgcagggccattaaaagaatgggtttcacttgaatgtgatggagacaaaccccctagaatacgtgctgctcgtcctcttaatactttacaatatgaaggaacaagaaagagacgtagagctgctatgggagattatgcatggtctgttggggatagagttgatgcatggatacaagaaagctggcaggaaggagtcataacagaaaaaaaaaaaaaaaaacctttactggtcactttcctgcta

SEQ ID NO: 3266 - DNA, 1984 bp, Glycine max
cggacgcgtgggttcctaaagccccatctggttggtcttcttcttccctctaaattcggcttggtcttccctcacacaaccaagccttcttcttcccttcccaccactttcttcatttcacacttctcctctgcccctctctcttcctacggaccctccctccacgtccggactcccggcccctccccgcccccgaacgacgccgttctctgcgaagaagccttcacgcgagtcttccacctcgccgcactccgcgtcccctcctccgaatgctccgccctcgagagccgcctccgtggccacctccttaactggccccgcctccgcaatatcgcccgcgtccccggcgacgacatcgaccccaccctcgcccctctcttgcctcaaccaggtaacggagaattcgacttcgacgaaaatgaagtagaagaaagacgtctcgtctcgctgcaacgccggattcacggcaaggcggacggcgacggcgacgtgttgagccccgtgctgtaccgtgacaggctcgcgaggacgttcaacaccagcggcttcgtgaagttccgccacctcgcgaagatttcgcggccgaacaggaataagaggaggaggaagaggaaggagaaggagtcgagtgaaggggttaagcgcgtgggggagaatgggtttgctgcagttgaggttattgaggaagaagaagaaggagaagaaagtggtggtttgaggaatttgcttggagaagagtttgcgaggaaaaaatggagaggttccacgaggttgctgcttctggatgaacgctacgccgatcgcggtttcgaggagttgcctgaggcaactaaggctgttttgaaggagtatgcagaaaagagtacaaatttgatgcttgagctagttagatgcaagttgacactattctatgattactggcagatgaatgaggtcttggagaccttgctgcctgagggtatgattattccttccgcttttgagactgttggtcatatagcacacctgaatttgagagacgaacatttaccatacaagtggctaatagctaaggttgtgctggataagaataagccaaggatacaaacggttgtgaacaagattgatacaattcaaaatgagtacaggaccatgcagcttgaggttttagcaggaaaccactctcttgtgactacagtagttgagaatggtattcactttcaggttgacttagcgacagtatattggagttctaggctaggaactgaaagacaaaggcttctgagtggttttacacggaacgatgtcgtctgtgatgttttctctggagttggtcctttagccatatctgcagcaaggatagttaaacgtgtttttgctaatgacttaaatccttatgcagttgagtatctggaaagaaattgtgttctaaacaaacttgacaggaagattaaggtctttaacatggatggaagaaggttcattaaatctatgtatgacagtgatatatctcagtccatcacacaggtggttatgaacttgccaagtgaagctgcagaatttctagatgcatttcggggaatatacaaaaatagacccaaggatggggaatatactttgccattgatccatgtttatggattctccaaagcacgagatccagaatttgattttcacgagagaataagaattgcactgctagaagttgcagtcaatgtagacatgagacgggtaaggcttgttgctcctggaaaatggatgttgtgcgcatcgttccttctccctaaaagtgtagcatttgctgatactgcagttgatacctaaacagtatttagattgttatttattcattggatgtagtaaattttgttccattgcattagttgtctaaattgatattgtgtatatatctaacatgacttttttttttaacctctagtctctagcattactaattagtggatattgaaaaaaaaaaataaagcccatgatattggaccctttt

SEQ ID NO: 3267 - DNA, 855 bp, Glycine max
  misc_feature (656)..(656): n is a, c, g, or t
  misc_feature (732)..(732): n is a, c, g, or t
  misc_feature (744)..(744): n is a, c, g, or t
  misc_feature (768)..(768): n is a, c, g, or t
  misc_feature (771)..(771): n is a, c, g, or t
  misc_feature (835)..(835): n is a, c, g, or t
aacactactaacgtttctctgaattgtgttgtgttgcaaacagaaaggaaaaaagaagaaaataagagaaagaagaaaaatatgagttacttgaatcgtgtttggatggcggcaacggtggcggtagcgcaaggccacaccgatcccggccacaagtgcaagacggcgctcaactccatccaccacaaccggagccgcctcttctccggcggagccctgtctgatctccggccgctgtccggcgtcgttggacctgacgtctctggcgcggcagcggggagctccgacgcgaagaatagggtgagccaagccgatgactctctgaggaaagtgatgtactttagttgctggggtcagggctgaaccacacgtgatgaacggtggagattaaagtagtcgccggagaaagtgaaccgggtctgttttcgggtcgggttcggatctgagttgacctggccgagtctgatcggatgactcggttggagaaaaaaacttggaatgttctgatcttgtaaataggttatgtatgtgtatagaggatatgggttttttctcactcacaagagtagatgatgacgatgagatctgatattaataagaatacctaaacttatacgaaaaaaaaaaaaaaaactcagagtcttttaaacggccgnggcccatgatttcaccggtgggtccaggtaatgtccattgccttaggagcgatacatcatggcgcgttaacgctgntggaacctggtncactatgcttgagaatccttccantgnatcaaagccacgtgctcaatgcactatgaatgacattaggtagtaccgttatgtggttaatcancagtatagctactaatgcta

SEQ ID NO: 3268 - DNA, 657 bp, Glycine max
  misc_feature (654)..(654): n is a, c, g, or t
  misc_feature (657)..(657): n is a, c, g, or t
tcgagtcagctacgtaggccccccccccgactactaacgtttctttgaattgtgctgtgttgtgttgcaaacaaagaggagaaaaatatgagttacttgaaccgtgtttggatggcggcgacggtggcggtggcgcagggccacaccgatcccggccacaagtgcaagacggcgctcacctccatccaccacaaccggagccgcctcttctccggcggagccctgtcagatctccggcctctttccggcgtcgtgggatctgacgtggccggctcggtggcggggagctccgacgtggagaatagggtgaggcaagccgacgactctctgaggaaagtgatgtacttgagctgctggggtcagggctgaaccacacgtggcgttatgaacggtggagattgaagtggtggccggagaaagtgacccgggtcgggttcggatctgagttgacctgaccgagtcagatcggatgactcggttggagagaaaaacttggaatgttctgatcttgtaaataggttatgtgtggatgtatgtgtacagaggataaaaatagtttttcccactcccgagtggatggagatgatgagatctgaaattaataagaatacctaaaattatacaaaaaaaaaaaaaaaaactcgagagtacttntan

SEQ ID NO: 3269 - DNA, 971 bp, Glycine max
cccacgcgtccgcccacgcggccgtccggctgaggaagtgacataaccttctatgcttgaagacggtggattagaacctcaacaagagaaagagactcgtcagagaatatgatccttgcggtgctgtttgccaacgctgagggcaatatcctcatcgaacgttttcatggagttcctgcagaggagcgtctgcactggcgttcattcttagtcaaactaggagctgataatcttaagggtgtcaaaaacgaagagctcctagttgcttgccacaaatcggtttatattgtatacacagtgcttggcgatgtcagcatctatgtcgtgggcaaggatgagtatgacgaacttgccttgtccgaagtgatctttgtgataacctcagctgtgaaggatgtatgtgggaagcccccaagtgagcgccttttccttgacaagtatggaagaatttgtctgtgtctggatgaaattgtatggcagggatatttggaaaatacagaaaaggatagaatcaaaagactgataaggttaaagcctccaacagagttttgaatgaaaagtccagagccagtcatagttcaatgattagtctgagtcctgtgggtcatagtgtggcattttgtaaacggatatgggcaagcaaccgaagattgtgctggatgtatgcgctctgcaatgattgtattaaaatacttgcattaaaatcttcttaaattttagcacttgtattttgtagcattcccaaactctgcattatttcatttgcgtattttgcacctcttttatcccttactattgtttgctatggcaatcatgtttccattttatgtttccattttatggaatgagagattttcatgcttggttaaagaaatcgcatttcatttcagtgcgggtccgcgtcaaaaacactaggaaagaatctatatatctatttataaataatgctaaagttataatacaattgtcgc

SEQ ID NO: 3270 - DNA, 1257 bp, Glycine max
ggctcgagctcgagccgaattacagatagatccatttgactcactgccatctgtatctgcatagcataaataccgcacgcacgcgattcctatgatttgttttttcactctgggcgattttccctattctttttgagtgccgagcaaaaccctaatcgagttcgattgcaacacacctccgttgctgtattccaccttctccgacgaatggcaaccaaacctcttacaaccgaggctattgcgcttacagaaaagaagatggacatgacattagatgacataatcaaaatgtctaaaaatacgaagaataagaagccaagaagggttctgaacaaaagtcaaaagttttcaaataattttactcaagataagtctgcaaaggtccaacgttatatggaatcaagatcttctcttagacagggggctcttgcaaaaagaaggtctaatttccagggaaaccaatttcctgctgcagttgaagttgcacgaaaagctgttactgctcctctgcacaatagagtccctaatcgtaatagggtggctaactggaataaaacaagatttcgagttcctgtagatcagagaagggctgctaatggaggctttgctgctaagcagcaaccacttccttcccctcagaagcagcaggagaatgtggatatagtgccaaagcaaaagcctcagacgctggattccctgtttgcaaacatgaaggagcaaagaatgagagttttgtcaatgcagaataatgttgtgcaacgcaatggaggtggaaataagaggctcccatggagaagaggccgatttggcaactaagttgttcacacaatggggaatttcatgatatcaccttttgaacctatgtcctggcctgctgcgtcctgactcctcctgggttgatgcaagtgaaaaatttctcgagtgcagaagaaaactctagattccccaccccctagttggatggattatctttccccctttcattcgaatggacttcttcatttgctcgtccgttgtatattagtgtcttccgtggcttaatgtttgttctggtctggtctgtggtccatatgtggacacaattcctagcagttacaatataatgtcatttgagaggcctttgggcccgtagcaggtttatctgtactggtatgtttttctttttttgatatttagttatgggacagtatttctttgctaatgttcaactacaatgatgggcttttgcgtttcaagaaaaggttggtattttttgcc

SEQ ID NO: 3271 - DNA, 1379 bp, Glycine max
tcagctacgtaggcccccccccccccccaggatctgtgagtgagtgagtaaagtgaaggatgaaggaaggggaacagcaacgagtgcctttgagggagagagcggagtggtcagatgttactccgcttcctcaaaacgacggccctaaccctgtcgttccgatccagtacacggaagacttttcccaagttatggattactttcgcgccgtttacctcgccgatgaacgctcccctcgcgccctcgctctcaccgccgaagctgttcaattcaactccggcaactacactgtatgtcaagttcgaattaaatgcttccgattgcatttatttttgtttatttcgtctttgttgcaggtgtggcatttccgacggttgttacttgagtcgctaaaagttgacttgaacgctgaactggactttgtggagcgtatggccgctggaaattctaaaaattatcagatgtggcatcatagacgatgggttgctgagaagttaggtccagaagctagaaaaaatgagcttgagttcaccaaaaagatactgtccgttgatgccaaacattatcatgcatggtctcatagacagtgggttcttcaagcactaggaggatgggaagatgaacttaattattgcacagaacttcttaaagaagacatttttaacaattcgcttggaatcagagatattttgtcataacaaggtctcctttcttggggggcctaaaagctatgagagagtctgaagtgctttacaccatcgaagccattatagcctaccctgaaaatgaaagctcgtggagatatctacgaggactttataaaggtgaaaccacttcatgggtaaatgatccccaagtttcttcagtatgtttaaagattttgagaactaagagtaactacgtgtttgctcttagcactattttggatcttatatgctttggttatctaccaaatgaagactttagagatgccattgacgccttaaagaccgcagatatggataagcaaaatttagatgataatgagaaaggggaacagcaaaatttaaatatagctcaaaatatttgttctatcctagaacaagttgatccaattagaaccaactattggatttggcgcaagagcagacttcctctatcagcttagtaatcaaagtaattaaaggacaagtctgtgtcatgtgtactttatacctagtttattgaaagtggatgtttatttttttgtgatgttgtcattttgctgtttgtgcaaatgtctttttgtcatgtcattactggcatatgactctgagtgtaaggattgaaagccaaatctagtacgggctatgcaaataatttaagttttttttttccgtcaaaaaaaaaaaaaaaaaaaa

SEQ ID NO: 3272 - DNA, 1307 bp, Glycine max
  misc_feature (7)..(7): n is a, c, g, or t
gtccggnattcccgggtcgcggctgcgagaagacgacttgcgtgtggagtgaagaagattaacgaaggatggaatctgggtctagcgaaggagaagaggtgcagcaacgcgtgccgttgagggagagagtggagtggtcagatgttactccggttcctcaaaacgacggccctaaccctgtcgttccgatccagtacactgaagagttttccgaagttatggattactttcgcgccgtttacctcaccgatgaacgctcccctcgcgccctcgctctcacagccgaagccgttcaattcaactccggcaactacactgtgtggcatttccgacggttgttacttgagtcgctaaaagtcgacttgaacgatgaactggagtttgtggagcgtatggccgctggaaattctaaaaattatcagatgtggcatcatagacgatgggttgccgagaagttaggtcctgaagctagaaacaatgagctcgagttcaccaaaaagatactgtccgttgatgccaaacattatcatgcatggtctcatagacagtgggctcttcaaacactaggaggatgggaagatgaacttaattattgcacagaactacttaaagaagacatttttaacaattctgcttggaatcagagatattttgtcataacaaggtctcctttcttggggggcctaaaagctatgagagagtctgaagtgctttacaccattgaagccattatagcctaccctgaaaatgaaagctcgtggagatatctacgaggactttataaaggtgaaactacttcatgggtaaatgatcctcaagtttcttcagtatgcttaaagattttgcgcccacgcgtccgctacgtgtttgctcttagcactattttagatcttatatgctttggttatcaaccaaatgaagacattagagatgccattgacgccttaaagaccgcagatatggataaacaagatttagatgatgatgagaaaggggaacaacaaaatttaaatatagcacgaaatatttgttctatcctaaaacaagttgatccaattagaaccaactattggatttggcgcaagagcagacttcctctatcagcttagtaaccaaagtaattaaagggcaactctgtgttatgtgtaacctagtttattgaaactggatgtttatttattattattttttatgttgtcatgtatctgtttgtgcaaatttatctttttgtcatgccattactggcatttgagtgtaaggattgaaagccatgcagaataagaaatttaagtttttttttccgttgg

SEQ ID NO: 3273 - DNA, 2078 bp, Glycine max
cacgcgtccgcactttaaaaaaacttttctcaacatccaatatctcaaaatcagtatattcccttttgttcaattactcttcttccttccttaaacccaatcaaagagaaacaaaatgttcttccacaatccagcacataccaactgaaaagaaaacccagtttgtgggtttatactttgattgattgattaattaattattagttagttagttaatcaatggaagagtgtcacacggtgttcggaaagtacgagatggggaggcttctggggaagggcacgtttgccaaagtgtattacgggaagcaaataagcacgggcgagagcgtggcaatcaaagtaatcaacaaagagcaagtgagaaaagaaggaatgatggaacaaatcaaacgcgaaatttccgtgatgcgtttggtgcgacacccaaacgtggtggaaatcaaggaagtgatggccacaaagacaaaaatcttcttcgtgatggaatacgtgcgtggcggggaactcttcgccaaaatctccaaaggcaaactcaaagaagatctcgcccgcaagtattttcagcagttaatcagcgccgttgattactgccacagcagaggtgtatcccaccgtgatctcaaaccagagaatctactcctcgacgaagacgaaaaccttaaaatctccgatttcggtctctctgcgctgccggaacagcttcgttacgatgggctcctccacacacagtgcggcacccctgcctacgtggcacccgaagtgttaagaaaaaaaggctacgatggttccaaagctgatatctggtcatgcggcgtcgttttgtatgttcttctcgctggctttcttcctttccaacacgagaatctcatgacgatgtataacaaagttctcagagccgagtttgagtttccaccgtggttttcgcctgattcgaagaggctaatctccaagattctagtggcggatccctcgaagaggaccgcgatttccgccatagctcgcgtgtcgtggttccggaagggcttttcttcgctttccgcgccggacttgtgtcagttggagaaacaagaagatgccgttacggttacggttacggaggaagagaataattccaaggtccccaagttcttcaacgcgttcgagtttatttcttcgatgtcttccgggtttgatctctcggggctgtttgagagtaagcggaagacagcgacggtgttcacgtcgaagtgttcggcggcggcgattgtggcgaagattgcggcggcggcgcgggggctgagtttccgcgtggcggaggttaaggacttcaagatccggctgcagggcgcggcggaggggaggaaagggaggctggcggtcacggctgaggtgttcgaggtggcgccggaggtcgccgttgttgagttttcgaagtccgccggcgacacgttggaatacgcgaagttctgtgaggaggacgtgaggcccgcgctgaaggacattgtttggacgtggcaaggggatgccacgtgtgctgctaacgttcccgcctgtcacggtgaggagtgtcataagcaggttgttgttgttagtactatataaattaattaattataattagcgtgacagtccacggagagggttctagaaacggtaatgttctaacgacttttctttcttttgctttgggtttgtcgctttcgtctttattccctgcctgattttttggaaagatagggttttgcaccttttgaaggtgaggctgtacataaactgcaattaaatatattgtgctgctgctacattcggaatggaacttatttctgtgtccaaaattactttggtataaaattgtgaatgcaaatattattttaaagagttatgtatgatggtgaactcaatcaatataaaaatattattggttggcatttttaaataagttaattataatgacatcagtaacactgtttatgataagttagaaaacatctatgaagtaacagtagtgactacttctgaaaattaacttgactctgatttaagaataatttacaaatttatcttacctttattctataatgttacatgagtttaatttc

SEQ ID NO: 3274 - DNA, 763 bp, Glycine max
tttttgtttttttttttttttgttgttttttttgtttttttttttttttttttttttttttttttaagcatgtgttaactaattaattaattaaagaaacaaaaacgaaatttccatgtctatgccgcaatacaatgaatccttcatccctttctattctgtttttttttttcactttctgcttttacaattaattcccttttcatattaacaccgtaacttaaaaaaaaaaaaaacatgaaacgaagcaatcccatcggaaccttcaagaaaccccaaaatgtggcaccggctgatccggtttcccaccaccttcgctacgtcgacgcgtaaacgacgccgttttgatctgatggcgagaacgcgagcaacatgagcgccgccatgatcccgacggggaagaagagaaaaactagtggcggcggcgggagcggcggcagcatcagcggcagaaccaccatcgacgccgcgagcgccgccagaaccagaacggaacctaaaccaaaacaacgcgccatgtcgatatcgatgttgttgttcctacggacatgttcctctccgacaccaccagaagaagggcaaaaccgtaacttcacttccgcaagtgcgtgctttctgctttctgaactaaaaaaaaaaaaagagctcctctgaaaactctgaatgatgaaaatgaacgtaacacctttgggtttgggaaagcttaattatggttttatccccttctgtcgtctgctcgccggacgcgttgtcggacccgcga

SEQ ID NO: 3275 - DNA, 1698 bp, Glycine max
  misc_feature (7)..(8): n is a, c, g, or t
  misc_feature (14)..(14): n is a, c, g, or t
  misc_feature (16)..(17): n is a, c, g, or t
  misc_feature (32)..(34): n is a, c, g, or t
  misc_feature (43)..(43): n is a, c, g, or t
  misc_feature (45)..(46): n is a, c, g, or t
  misc_feature (55)..(55): n is a, c, g, or t
  misc_feature (57)..(58): n is a, c, g, or t
  misc_feature (64)..(65): n is a, c, g, or t
  misc_feature (73)..(75): n is a, c, g, or t
  misc_feature (107)..(107): n is a, c, g, or t
  misc_feature (116)..(117): n is a, c, g, or t
  misc_feature (127)..(128): n is a, c, g, or t
  misc_feature (180)..(180): n is a, c, g, or t
  misc_feature (182)..(183): n is a, c, g, or t
  misc_feature (198)..(199): n is a, c, g, or t
  misc_feature (219)..(219): n is a, c, g, or t
acacagnntggtangnnctgaaggggactagnnnagaaaatcncnnctgttgatncnntgcttnnggcagccnnnttctcccttttcgtcatttacccaaattttanttatgaaanntaaattttannaatttatggaagaaaagttgaagaaaaaagaaattggtttagaattacaacncnnggctgtcccggatgnntcaattgttgaagaaggtgnctgtgaagagcattcgaatggccaacttgtcaattgttggctcccatgctgtgaatggtgtttcaaaattacatttagatacactgaaaatgaatacatttaaggacttctatgagctatggcctgaaaaatttcaatacaagacaaatggtgtaacccagcgtcggtggattgttgtgagcaatcccagtttatgtgctcttatatcaaaatggctaggaactgaggcttggattcgtaatgccgaccttctgacaggattgagagatcttgttgacaatactgatttccatcaagaatggaaaatggttaaaaaggtcaataaaatgaggcttgctgaatacatcgaaacaatgagtggtgtgaaggtcagtttggatgctatgtttgatgttcaggtgaagcgtatacatgaatacaaaagacaattgcttaatatacttggaataatccatagatatgattgtatcaagaatatggacaagaatgacaggaggaaagttgtaccccgtgtttgcataattggtgggaaagcagctcctggttatgaaattgctaagaagattatcaaactttctcatgctgtggcagaaaaaatcaataatgacactgatattggagatcttctgaaattggtttttatccctgattataatgtctctgttgctgaattggtaataccaggggctgacctttctcaacatttaagcactgcaggacatgaagcttcaggaactgggagcatgaaatttatgatgaatggatgtttacttttagctacggcagatggatctacgatagaaataattgaagaaataggatcggataacttgtttctctttggtgcaaaagtgcaggaagttgcagaactgcgtgaaaaaggatctactttaaaagtacctctacaatttgctcgcgtgttaaggatggttcgagatggatattttggtcataaagactacttcgaatccttatgtgacacggtggaaattggtaatgatttctatctgcttggccctgattttggcagttaccttgaggcacaggctgctgccgataaagcatttgttgaaccagagaagtggatcaagatgagtatccttagtgttgctggctctgggagatttagcagtgacagaaccattcaagattatgcagagaggacatggaaaattgatccctgccgatgccctctctgatctcattattagaaattttagttttgtttggggaggccagaagaaaagggacaatgaaaaattgtaatatcttgctcatttagaataataaaattttggtcatgacccatgacaacaaagttcactagtctagccctgaagtacatttgcttaatttgttgtcccgttacttcggggaaaattactattacttctggtgattgactcactgtatcttaacctacctgactgaaaatcgatatcgatactaaagtaattttcattaatcttgagaaaaaaa

SEQ ID NO: 3276 - DNA, 1297 bp, Glycine max
gccaacccaagttgaaccagtggagttgcgaggaactaaacacagaacactaaaccgcgacaccccaaacgagaggaccaaaaccaaagacattccgttgcacacaggtgtcagctacgtaggccccccccccccccacatcaaagttcaaaacctttttcaaccacctcaaaacgctgctatctctttctccactctccccaacatggccgtcgttggcgtcctcgcgctgcaaggatctttcaacgaacacatagctgctcttagaaggttaggggtgcaaggcgtggagattcgaaagccagagcagcttaacacaattagttccctcattatccctggtggagaaagcaccaccatggctaagctcgccgagtatcacaacctgtttcctgctttgcgagagtttgtacaaatgggaaagcctgtttggggaacctgtgcagggcttatattcttggcaaataaagctataggacagaagactggtggtcaatatttggttggtggacttgattgtacagtgcatagaaatttctttggcagccagattcaaagctttgaggcagagctttcagtgccggagcttgtctccaaggaaggaggtcctgaaacattttgtggaatttttattcgtgcccctgcaattcttgaagcagggccagaagttcaagtgctggctgattatcctgtaccttctagcagattgttgagttctgattcctctattgaagaccaaacggagaatgctgagaaagaaagtaaagttatagttgctgtgagacaagggaacatattagccactgctttccatcctgaattgacagccgatactcgatggcatagttatttcgtaaaaatgtcaaatgaaattagagaagaggcctcttcgagtagccttgttcctgcacaagtcagtagtacaagtcaatatcaacagccccggaatgaccttcctatctatcgataggaccagaatactccccaagcctttcttgaacaattgtggatgatttttttttctttctatatttttctcgaacattttatcatataattgttggatcttagaagatatagctagctgtttattattcttttttctatttggacaaacagtattgtatttagactttgatgttttctgttaagtagtcatctatctgccaaatattcattccagctttttctgatggtcgatcaaaagtagctattagctaccttttggtgatgtcatgctattttctttttctttgggccatgtaacattatctaggaaaaagtgttaagcttttag

SEQ ID NO: 3277 - DNA, 1710 bp, Glycine max
ataaccacacacacaaatccatccaagatttcccccttgtaagagagagagataaaagaaaatcagcgtcctacagcaccccaccatgggaacccaccaagcacttgtttttatcatgtttttccatcctatatacggccagctacgtcggcccccccccattcacagccattctttatctctcatttttttaggctcataaatcttttttatgggtttcagggtcactactactctgtctctgctctccctgttttggctcttgtccctgcaccaagcaagagctgcaaagttccacaatgtgagtggcttgagagggaaaaagccagttgtagcaaatgggtgcaatttgttcctgggaagttgggtggttgacacgtcttatcctctctatgactcttcaacatgccccttcattgatcccgagtttgattgccaaaagtatggaagacctgacaaacagtacctcaaatacgcttggaaacctgattcatgtgccatacccaggttcgatggtgcggctttcctgaacagttggaggggtaagaagataatgtttgtgggtgactcactgagtctcaacatgtgggaatcactgtcctgtatgattcacgcgtcggtgccaaatgccaagaccggctttttgagaaaagaatcactgtccactgtgaccttccaggactatggagtaactatacagctataccgcacaccgtatttggtagacataattcgtgaaaatgtggggcgagtgcttacattggactccattgttgctggaaatgcgtggaaaggcatggacatgctgattttcaactcgtggcattggtggacccacactggaaaatctcaggggtgggattatattagagatggacccaatcttgtgaagaacatggaccgtttggaggcctacaataaaggattaaccacttgggctaattgggttgatcagaatgttgatccctccaaaactaaagtcttctttcaaggcatttctcctacacactatcagggcaaggattggaatcaaccaaaaagaagctgtagtggagagcttcaaccattgtctggatcaacatatccagcaggtctacctccagcaactaccatattgaacaatgtgttaaggaagatgagtactccagtttatctacttgatataacactcctctcacaattaaggaaggatgctcacccttctgcttatagtggggaccatgcaggcaatgactgcagccactggtgcctaccaggattaccggacacttggaaccagctcctatatgcagctctcaccaaatgaaggtgaaggccccatacaaattgatccttttcttcatcccttggttatatattcagctagtgtttttagaatttctttattatttgggggatatatagatactacagaggggtgaaactcaattgtaaaattatatataggattcttggaagaataatttacaaaacaaaataagttccttagagatcaaaattgttgcatactaagatgagtactttgtttacaagggttcgtaaactaattttattgaatcacagaatgatgttgaattctatcattggttgatgcacggatcatgtataacatcccatacttgtgacagctacagggttaatcgtaactatgaaactgtttccttccttctgagaaagaaagggtcttattgcatattactactaaaaaaa

SEQ ID NO: 3278 - DNA, 1041 bp, Glycine max
tttttttttttttttttttttttgaaaaagccgaaaaagcattccataggaatacacgttaaattatatacacagctctttaaatttccaaacttcaaagcagcttcgtagatcctcaatcatgtcttctatataagtacaaaccttcacccatctcacatatcacaacactgtcacaaaggaaaagtacttttttttttaaaaaaattatcttatttgagtgtgatcgatggcatacccaaacccttatccggcgcaaccgtatccctccacctccgtgccgatgccggcggtgcccaccgccgtgatcggcccccagttctgtgcgccctacccgctggatctggcggtggtgaagaaggtgatgacgctctccgacggtaactttgtggtcaccgacgtcaacggcaacgtcgtcttcaaagttaagggatcgctcatgaccctccgtgaccgccgcatcctcgtcgacgccgccggcaaccccctcgtcaccctacgccggaagataatgaccgcgcatgatcgatggcaagctttcaggggtgaaagcacagaggccaaagatctaatctttactctgaagcgttcgtcccttatccagtttaagaccaaattagatgtgtttttggccaataacacaaaagaagatgtttgtgactttaaggtcaaaggtagttggttggaacgatcttgcgttgtttatgctggtgaatctaacaacatcgtagcccagatgcataaaaagcacacggttcagagtattttgattgggaaagaccaattcatggtcacagtgtatcccaacattgattatgcgttcgttgtggcactaattgttattcttgacgagattaacgaagatgagaaagaagattagagaaatgctacacattcagcaaatcgtgttgtactttttatcgacggtggcatatttccactgaagctattgtgtttgtttaggtgtttcgtctttctaatttatgagtaaataaaaatatttaaattcgagctgcattcaaaacaaaaaaaaaaaaaaaa

SEQ ID NO: 3279 - DNA, 1032 bp, Glycine max
tcagctacgtaggcccccccccccgacatatcacaaaacaacatcactctcacaaacggaaactaaactacgttttttattttttccagacaataatactttaatatttgagtgtgatcgatggcatacccaaacccttatccggctcagccctatccctccgcctccgcgccgatgccggcggttccctccgccgtgatcggcccccagttctgcgcgccgtacccggtggatctggcggtggtgaagaaggtgatgaccatctctgacaacttcgttgtcaccgacgtcaacggcaacatcgtattcaaagttaagggatcgctcgcgaccctccgtgaccgccgcgtcctcctcgacgccgccggcaaccccctcgtcacccttcgccggaagataatgacggcacatgatcgatggcaagcttttaggggtgaaagcacagatgccaaagatctaatctttactctgaagcggtcgtcccttatccagtttaagaccaaattacatgtgtttttggccaataacaccaaagaagatgtttgtgactttaaggtcaaaggtagttggttggaacgatcctgcgttgtttatgctggtgaatctaacaacatcgttgcccagatgcataaaaagcacacggttcagagtattttgattgggaaagaccatttcatggtcacggtttatcccaacattgattatgcgttcatagtggcgctaatcgtgattcttgacgagattaacgacgatgagaaggaagattagaggaaagctatacattcagcgaatctttttgtttgtttaggtgtttcgtctttctaatttatgagtgaataaaaatatttaaattcgagctgcattcatttttaattttttatgtttggtaccatcttaattaagatcctaggttattctgtagtgtgtgaagatattctcacaaattttgatttttttttttaaccgcctaattaattttcgatcagaatttaatccaacttaaattatttttctcttcccggggggaaaaaa

SEQ ID NO: 3280 - DNA, 1011 bp, Glycine max
atcgttggttccgtggcatttgccaactccagaagacgaaacagtccaactgcaaaaaaacgactataactgaattctccttttcctccagctctttctgcaatgtcctttaaaattccgtctcgagtgtttgttttttgcttttctgccaaaagaaaatacagattttgcatgggccacacaattttattatgtgattttttacaagaatgacatatggagctgctgtttcagcatacagcctattctatctatgtttatggttttgcacttcagtcaatacaataatgaacccaaatacacagaatgccaaatggatttttcttcataactagcagaaatcttaaaattgttgcacacagcatggccacttgctgcatggtttacaccattgctccctttgcttccttgtatagttgatcaatatgatccttgtagtacttgagcaattgtggtctcttcaatttgaatgttggagttattaaatctctttctatgtcgaagggatttggttccagatgaatggcttttagcagctcaaatcctctaagttggtgtttctgaccagtgctgttgagctcatccaaaatgtgttttcttgctttaagattatcacataaagatttaaaatcatcagtcaaattgtgctcttttgcccaatcctcaatggcttttctttcagggaccacaacagccaccaagaatgactcaaagctgtttccatacacccaaatcgatgctataagagggcattgcaaatacttgttttcaatattctccacagcaatatattctccttgagacaatttaaagatattcttcttccgatcaataattttcatggccccatttgattgccattctccaatgtcacctgtatgaaaccagccatcaaccataacttctttggtaagatcttcacgcttgtgataaccggagaacaaggtatttcctctcagacaaatttctccacggggtacattggagagggcatcatatcccatctctggc

SEQ ID NO: 3281 - DNA, 1934 bp, Glycine max
tacggctgcgagaagacgacagaaggcggagaaataaccaacagaatctactctctattttcctagcttagattccttctccaatggctcttgccgtttccactacttcttcctcttcagctgcagcagcagcagcagcgtcgagctctttcttctcgcgccttggatcttcatcggacgctaaagctccgcaaattggttcctttcggtttccggagaggcctcaagtttcgtctggtgttgttaatttaactcaaagacgctcctcggtgaggccactcaatgccgaaccgcaacggaatgattctgttgttcctcttgcagcaactatcgttgctcctgaggttgagaaggagaaagaagattttgagcaattagcgaaagaccttgaaaattcatctcctcttgagattatggataaggccctcgagaaatttgggaacgacatcgctattgcctttagtggtgctgaagatgttgctttgattgagtatgcacatttgacgggtcgaccctacagagtgtttagtcttgacactgggagactgaacccagaaacctacaaattttttgacgctgttgagaagcattatggaattcatattgagtacatgttccctgatgcggttgaggttcaggcattagtaagaactaaggggctcttctcattttacgaggatgggcatcaagagtgctgtagagtaagaaaggtgaggcccttgaggagagcccttaagggtctcaaagcatggattactggacagagaaaagaccagtctcctggtactaggtctgaaatccctattgtccaggttgatcctgtttttgagggactggatggtggaattggcagcctggtgaagtggaacccggttgcaaatgttaatggtctagacatatggaacttccttaggaccatgaatgttcctgtaaattcattgcattcccaaggatatgtttcgattggctgtgagccatgcacaaggccggttttacccggacaacatgaaagagaaggaaggtggtggtgggaggatgccaaagccaaggagtgtggtcttcacaaaggtaatttgaaacaggaagatgctgcccagcttaatggaaatgggacctcccaaggaaatggctctgccactgttgctgacattttcatctcccagaatgtggtcagcttgagcaggtccgggattgagaatttggcaaaattagagaaccgaaaagaacactggcttgttgtgctctatgcaccatggtgccgcttctgtcaggctatggaggagtcgtatgttgatctggcagagaagttagcaaggtcaggagtgaaggttgcaaaattcagagccgatggagagcagaaggaatatgcaaagagtgaactgcagttgggaagcttccccacaatacttctcttccccaagcactcttctcaaccaattaagtacccttcagaaaagagagatgttgattcattgacggcattcgtgaatgccttacggtgatggtcaattgagtatcttgctcaatgttccgtcgtaccataccggcaataaatttcttcacagatttgggcaattcactgaaaatgggaatggcagtttttgatagcaaaacgaagattctcagctagcagtatccctgtatagatttagataaccttcctcacaaatataattgtagtagtcattctatgaggaggatgtgatttcctgttttgttagatgagtagagttatggttgtattatgttgtttcttcactatcataatctacttttttagattttgccaaatttacaagaaaaaacgtctaacctactgtgtactcccaggttccgtgtgcaataatgtccctgtcacgtatgttttcatggactggtgcagtcaaaatgttctagccacaacggaacaaaaatccatttggatttgatcattg

SEQ ID NO: 3282 - DNA, 1452 bp, Glycine max
aggcatcaaaatcttcaagttcaggcagaaacaagaagcctgtgacaaagaaggtcatggagtattgttatgaacctgaaatggaggaggcttatcggtcaagcatgttgaaagctttcaagaaaaatgttgaggaaggagttttcacctttattattgtggatgaccgcaatctgcgggtagctgattttgctcaattttgggcaactgcaaagagatcggggtatgaagtttacattttagaagctacatacaaggatccggtgggttgtgctgctaggaatgtccatggatttacacaggaagacatagaaaagatgtctaagcaatgggaagaagctccatccttgtatctgcagcttgatgtgaagtcattatttcatggagatgatctaaaggaaagcagaatacaggaggttgacatggatatggaagatgatctaggtgatgcattacctccatttcaaggaaaagaagatgagaaagttgttgaccctcctgttggggaagatgcaagtttcctaaaggctgggaagaattggcatgctgaagaggaacatccaacagaagtcagggaattgggtaaaagcaaatggtcagaagattttggtgaagatgacattgatcaaactgaaggtatgaagggcaatattaatgctctgtctgggttaattcatcaatatggcaaggaacgaaaatctgtacattggggtgataagggtggcaagacagggttttcaataggggctgcaaggaaggtaaatgctttgtcgttagtgatcggacctggtgctggatataacctgaaatctaatccattacctgaagaggatagtccaacccgtaatagtgtggattcaaagaagcatagcatatttcaagaacaaatccgggctgaacgagaatctttcaaagctatttttgataggagacggcacaggattggtggacttgatgtggaagaggactaaaagagagccacccaatgcagaaatgctttcacaaaacagagtatggggagggtagatatatcatgtattcagctttatccctccctgcgttggagaagttgttaccaggatttgaatcctccacaagacggatgtggagactgattccgaattttggttttaatgtcatcaaaacagacggattacttgaaagtcatacttccatgtattagaggagtttaggtgaaagaatagagttgagttgtttggttggctgggaaaagaacatgatgttcccaatgagtttttgtggaatgatgtaaaattttattcaaggattaatatgaaatatctgtgataaggtcaactcagcgtctatctgagtgtaggtttatgtttttcttttcttgtaccagcacgctatttgacattttacactgaaagaagaaaatattaagtttagcagacgtctgcagaggaaatacgttcatgttattccttc

SEQ ID NO: 3283 - DNA, 1512 bp, Glycine max
atttttaaaacgaacaccggatcaaacgcagctttattaccttgcctgcgaagcgttgataagcggaggatgacatgggcccatgatgagagatatgcgcacaaatcatcacgctattaatactactgctccgctacttgctgcctaggctagtgcgcacccctgtcttcaacctcttaccgtgcgaatctctcaattcatcaaaactaacaacatcatcaccatcgtcgcaccgaaatcaatcgccacaacctcgggatctcagattcgacgcgccaaatcatgtcgaaggcgcgtgtctacaccgatgtcaatgtccttcgccccaaggagtattcggattacgagtctctcacccttcaatggggtgatcaagatgattatgaggttgtgcgaaaagtgggcaggggtaaatatagtgaagtttttgaaggcataaatgtcaatagcaatgagcgctgtataattaagattctgaaacctgtcaagaaaaagaagattaaaagagagataaaaatacttcagaatatttgcggaggcccaaatattgttaagcttcttgatattgtcagagatcaacattcgaaaactcccagtttgatatttgagtatgtcaacagtacagattttaaagttttgtatccaaccttgactgattatgacatacgctattacatatatgagctccttaaggccttggattactgccattctcaaggcatcatgcatagggatgtcaagcctcataatgttatgatagatcatgagttacgaaaacttcgcttgatagattggggtcttgctgaattttatcatcctggaaaggaatataatgttcgtgtggcttcaagatactttaaggggcctgaacttctagttgatttgcaagactatgactactcattagatatgtggagccttggctgcatgtttgctggaatgatatttcgcaaagaacctttcttttatggtcatgacaaccatgatcagcttgtcaaaatagctaaggtgcttgggactgatgaactgaatgcatatcttaataagtatcatctggagcttgatcctcaacttgatgcacttgttggaagacacagtcgaaaaccctggtccaaatttatcaatgcagataatcagcatcttgtgtctcctgaggtgactcttcagttttcctatctggcattgaccttgcatttagtatagattgcaatttaacaattcttgtatgacacgtaggcaattgattttcttgataagctccttcgatatgatcaccaggacaggctaacagctagagaagcaatggtaatgataaagagctcattagtttgtagttttcaatttgcagtaacaagggtcttttgttgcatgaactttaaaatattttcggttaacgaatatttatattttggcaaaattataatttttggcttctaattttaggtttaaaatatttttgtattcaatttcatcctgtaagttcttttttcgtgccaatgtttttctctaaat

SEQ ID NO: 3284 - DNA, 1640 bp, Glycine max
cacgcgtccggcaaaagcgtagatagaagcaagagaagaagatgatgctgacgtggccagcttgcgccgttgaggaagaaaataagtgatcctaaacccggaggaaggagtattattcgtttgacttcacatataaaaaaaataaataagagaatgtaaaaaagtagtatgtgtaagtgtaaatattatcgctatacgcgcattaaatatgcgcaggaagcaccaccagcactacttctccgcttcttgctagtgtgcacccttgttgccttgcgtgcgccggttgcgcagccccctatcgtgcgcatcccccccaatcacctcaccgaaactactaacaccgtcatcacaatcgttcaccagcgccacagaacccagatctcgggttccactcgcccagccatgtccaaggcgcgtgtctacaccgatgtcaacgttctccgccccaaagagtactgggattacgagtctctcaccgttcaatggggtgatcaagatgattatgaggttgtgcgcaaagtgggaaggggaaagtacagtgaggtttttgaaggcataaatgttaatagcaatgagcgttgtataatcaagattcttaagcctgtcaagaaaaagaagattaaaagagagataaaaatacttcagaacctttgtggtggcccaaatattgtcaagcttcttgatattgtcagagatcagcactctaaaactcctagcttaatatttgagtatgtcaacagtacagattttaaagttttgtatccaaccttgactgattatgacatacgctattacatatatgagcttcttaaggccatagattactgccattctcaaggcataatgcatagagatgtcaagcctcataatgttatgatagatcatgaattacggaaactccgcttgatagattggggtcttgctgaattttatcatcctggaaaggaatacaatgttcgtgtggcttcaagatactttaagggccctgaacttctagttgatttacaagactatgactactcattagacatgtggagtcttggctgcatgtttgctggaatgatatttcgcaaggaacctttcttttatggtcacgacaaccatgaccagcttgtcaaaatagctaaggtgcttgggactgatgaactgaacgcatatctgaataagtatcatctggagcttgatcctcaacttgatgcactggttgggaggcacagtcgcaagccttggtctaaatttatcaatgcagataatcaacatcttgtgtctcctgaggcaattgattttcttgataaactccttcgatacgatcaccaggacaggttaacagcaagagaagcaatggcacatccatatttctctcaagtaagggcagctgaaagtagcagaatgaggacacagtaacttaaaacatttttggatccataaacctgagttcacatatgtgggattgttttataataccctaaaatgtggcatggttgccttctgttaaaattatagtttgttagttttgttgtggaatgtaacaatatcatatcttgttccagctgaataatttgttagcctgttgttgaaaattcaaattttatattaaaaaggttgtgattataaactgtaataaaaaaaaaaaaaaaaaa

SEQ ID NO: 3285 - DNA, 2127 bp, Glycine max
  misc_feature (1)..(1): n is a, c, g, or t
  misc_feature (2022)..(2024): n is a, c, g, or t
  misc_feature (2026)..(2026): n is a, c, g, or t
ngactcgcttccgaaggaaagcgtattcagttttgaggttatttactcccaccgatgactgatcatcattaacacctttttctttcttcaattatcccaaacctcttcttcttcttcttctttccctatcacaaaaacgcgtcaacaaaacacaaaaaccctattatcaccacacacttccctttcttggatctgtagatctaacgctgttgcatcacataaccgttcctctgcaacctagtgctgttttcactgaaattcaacgcttgaatttcttggattttagtgtttggactttgatttgaaattgattggtaacaatagaatatgtgtgtttattattagttatttagttatataatactagtaataataggtgaggaagggtttgtggggggtggggttggagcatccatttgtggatgtgaaggaataggaggttgttttggggtgaaatgagggatgctatcaaggttgatggactttctgactgcctgctggcggcgaagatccttctccgacggcaagggtggttccgaggttacggggcggaaggaagggctgctgtggtacaaggatgcggggcagcacttgtttggtgaatactcaatggctgttgtccaggccaacaacctgctcgaggaccagagccagattgagtctggtcctctcagcctgcttgacactggcccttatgggacctttgttggtgtatatgatggacacggtggacccgagacgtcgcgctacgtctgtgatcatctcttccaacatctaaaacgatttgcatctgagcagaagtccatgtctgaggaggttattcggaaggcataccaagccacagaagaaggttttttgtcagtggttaccaaacagtggcccatgaatccccaaattgctgctgtgggatcttgttgtttggttggtgtgatttgtggtggtatcctctatattgctaaccttggtgattcccgtgctgtgcttggccgggtggtcagagcaaccggggaggttttggcgatccagctttcgtcagagcataatgtggccagagaatctgtgagacaagagatgcattctttgcatccggatgactcaaaaattgtggttctaaagcacaatgtatggcgggtgaagggtctgatacagatttctagatccattggcgatgtatacctaaaaaaggctgaatttaacaaggaaccgttgtatgctaagtttcgtgtgcgggaaggttttaagaggcccattttgagctctgacccatcaatttctgtccatgaacttcaacagcatgatcaatttctcatatttgcttctgatggtctttgggaacaccttagcaatcaggatgccgttgatatagttcaaaacaacccacacaatggaattgctcggaggctcatcaaagctgcgttgcaagaagcagcaaaaaagagagagatgaggtactctgatttgaagaaaattgaccgtggtgtccgccggcatttccatgatgacatcacagttgtagttgtatttcttgactccaatcttgtcagcagagccagctcagtaagaggtcctcctttatcggtgagaggaggtggtgttcccctaccttctagaactttggctccctgtgctgcacctatggaaacttagttcaggttgatgaagctggctgtataatctgttatgcttctatttagtgttgtacccttagcagacattgagctctggtgatccaccagattgtatatccaatttaacagattgaaaaaatgtccggtccattagtacaatgtaacaagagacttggggtatgtagcttgcgtgagtataaagcatcatggaagtagagtaccaaagccaaaggtgacctttaatatttgatcattaagaggcaatcatgtttgcattgcatctcatatttttctcatccaatggggagtgatttctgtaaaattttcgtacactcctttgaatgcacagttagtttgttgcacgcaataggaaaactatatagataagtatccnnnanaaaaaaaaaaaaaaaaaaaaaaaaaaaaaaaaaaaaaaaaaaaaaaaaaaaaaaaaaaaaaaaaaaaaaaaaaaaaaaaaaaaaaaaaaaaaaaaaaaaaa

SEQ ID NO: 3286 - DNA, 1702 bp, Glycine max
tcagctacgtaggcccccccccctaggtgttccgtctaattcccacctcagacaaaaagcgtacgatagaaccaacccaggttcgatgtctccatggtccataggctgatcacattcaccgccgaaaactacacaaccccgaaagctaaataaaaataaaatcaccttcgaataggaaaagcaaatctcaaattggtagcgcaagcttgtcacttgaggtttgcttcgattcttcgatctcagattaaagtgtacgaaagaagaggcttttctaaacaaaagaggaagcgtgcaatggtgggatgaagaagagaggaacatggcgagaggcaagtgggtttgttcctacaagaaaaccactcttttagtttgcttcttcaacattgctgttgctctctacgttcttcgctctctctatgcttctctttacatctactccggaaacgtttcccgcaacgctgcgttgtatagcccagatcagattcggaaaatggaggaatcaatccaaatccgctgggaatttaaacctgtggagttaattaagtgggtgaaggctttagaagcggagttttcgagtgaaactgaggcagttaagttgccctggcatttgaaacagaacataattgatgagatcttgcagagactaaggagcttgaattccagtagaacagatattgctatggaacgagaagtagttgagagttggcgcaaagaaaaactggaagaggtcaagtcagctcttgtgaaggggacttccaattcaaccatcccccatgaagaagctggtatgctagtaagagctttggagtctgattgggctgtgctctgtgaagagattggcctctggatacctgctcaagtttctaataaagaacatgacgacaaacctgagggtgcagaggagtttgaggaggaggtccttcctggcagacccgtttcacccgagtgccatgctgaactgcacacagattatgatggcgccgcagtaagatggggtcttaccttccacaaagatagtgcagctgattgctgtcaggcttgcttggaccatgcgaaacatgccaaagaaggggaaaagaaatgcaatatatgggtttattgcccatctgagtttgggtgtcattctccagatatctaccagcacaaacatcaggaatgttggctgaaatatgctgagaaacctcgactaaattttaaggataagtatcctgaatcatatcgaaattcacatccttctgcaccagtgatcgttccatgggtctctggagttatcagttcatgagtcaaataaccaaataccaaatgtgacgagatcaaccagagctaccttgtagactacacaagagtgcaaagctagcttagcaaagcctttgcatgctcgtggattatataccattgttcttcaacatgttttttgtgtaaaagaaatgaactggggagcaaagaattttccctatgttcatttatgacttgttttggtcaaaatgcggtttttgacagactcacctcagtgccaaggattttccaccaaggtcgggtctaacactgaggaaaggtgacttttaactgatgagcatgttgttttgttgtaagctatctgataacataattcattgtatctgtgggacttagaatcctactcatagtatcattcttgttcgtgatgttgatgatcatcaattcaaaaaaaaaaaaaaaaaac

SEQ ID NO: 3287 - DNA, 766 bp, Glycine max
  misc_feature (5)..(5): n is a, c, g, or t
ccggngacggctgcgagttgaccccggatccggataaacccttttgtaaaaccctaacaattgacctcaactttctcgacaagaggctctctgtcggtgttctctcccttccctttggtgtcgtgtcttccaaatggcgaagcgtttgattcctctgttcaatcgggttttggtggagaaaatcgtgcctccatcgaagaccaccgctggcattttgttacccgagaaatccaccaagctgaattccggaaaagttattgctgttggccctggctttcacagtaaggatgggaagctaattcctgtggctgtaaaggaaggtgacactgttcttttgcctgaatatgggggaactgaggtgaagcttgataacaaagagtatcatctgtttagagacgatgatatactggggacattgcatgattgatgtcaaaatcattcgtggaaatttacatgctaggtgctctgctacatttgaggagtttctttatgttctgatttttatgtatgatgtctaaatcaacattttggtgtggagcaaacacttggaactttttttgggcttaccatgaatgttattttctgcaacaactggaaaaactattttgtagctcatgaaatttattgccttaacattttgtagttctgttttttttttgcttggttaagagtatttattgttgtcacattttctgttgcatactcgcggatggcgattcccaactttttgcaaaaaaaaaaaaacaaaagccactaaggccccggc

SEQ ID NO: 3288 - DNA, 695 bp, Glycine max
aaataaaccctttgtaaaaccctaacaagtgacctcaaatttctcaaccagaggttctgtcggtgttctctcccttccgtttcgtggcgtgtgttccaaatggcgaagcgtttgattccactgttcaatcgggttttggtggagaaaatcgtgcctccatcaaagaccaacgctggcattttgttacccgagaaatcctccaagctaaattctggaaaagttattgctgttggccctggctttcacagtaaggatgggaagctaattcctgtggctgttaaggaaggtgatactgttcttttgcctgaatatgggggaactgaggtgaagcttgataacaaagagtatcatctgtttagagacgatgatattctggggacattgcatgattgatgtcaaaatgatccgcggaaatttacatgctaggtgttctgctacatttgaggagtttctttctgttctgatttttatgtatgatgtctaaatcaacattttgttgtggagcaaaacactttaacttttttttttaaaacttacaatgaatgttattttctgcaacaactgggaaaactattttgttgctcatgaaatttattgtcttaacataaaaaaaaaaaaaaaatcacgtggggggggggggggagggcggccgctcttgaatgcatccaaagcttacggtacggcgtgcgtgcgac

SEQ ID NO: 3289 - DNA, 1415 bp, Glycine max
  misc_feature (17)..(17): n is a, c, g, or t
  misc_feature (19)..(19): n is a, c, g, or t
tcgagtagctacgtagngnccccccccaaattttcaggtaagaacacacaatacaacgctgactcttcctcctcctgttcctacttgtgcgtttccactgtcatcagacactgctcacagcaatcacagttactggaaatctttatagtcaagcctctcagattcgttgcttccaccatggaggaacaaatcccatttaagaatctccatagcagagagtattcgggtcacaagaagaaggtgcactctgtggcttggaattgcattggcacaaaacttgcttctggttccgtggaccaaactgcgcgaatatggcatattgagccacatgggcatggcaaggtcaaagatattgaattgaaaggtcacactgatagtgtggatcagctatgctgggaccccaaacatgctgatttgattgcaactgcatcgggtgacaagactgttcgtttgtgggatgctcgaagtggaaaatgctctcaacaggcggaacttagtggggagaatattaacatcacttacaaacctgatgggactcatgtagctgttggtaacagggatgatgaattaacaatactggatgttcggaagttcaaaccaattcataggcgcaagttcaattatgaggtaaatgagatttcttggaacatgacgggtgagatgttctttctaacaacaggaaatgggactgtggaagttctctcttacccatctcttcgacctcttgacactctcatggcccatacagctggttgttattgcatcgcaattgatccagtaggaagatattttgctgttggaagtgctgattcccttgtaagtctgtgggatatatcagagatgctctgcgtgcgtaccttcacaaagctggaatggcctgtccggacaattggcttcaattattctggagattttattgcttctgcaagtgaagacttgttcattgatatttcaaatgttcatactggaagaacagtgcatcaaattccttgtagggctgctatgaacagtgttgagtggaatcctaaatacaatttacttgcatatgctggtgatgacaaaaacaagcatcaggctgatgaaggtgtttttcgcatttttggttttaaaaatgcttagtatatatggcaggggcactgtttttactggtttgagaatgcaaacaaaggggaagactgagagagcctaatggaggttgatttgtaatctgaatgaatttgattattatgtgtagaacaaggggcagcattcacggacatgaatagtagtaagtaaaagggatattttttttttccattctttagtaattgtatggaaaaatgatatcgttcaacagcacattgccctatacaagttgtgacacaagttgtgaccaaaaaaaaaaaaaaaaagacataatagttcttttacttttt

SEQ ID NO: 3290 - DNA, 2787 bp, Glycine max
tcagctacgtaggccccccccccacagacacccttcaacgaccgtagttaaacctcctaactcactctagttgctttgtttgtcttcaatggaataagaacagcagaaagaaagaacacaactttggccagaagacttggtgggggcattttcttttcagccaagaagggattcggtgttgatgagcaatattgatctgttgctgcagtaggggaccgagtaagaatgccaaaccagctatggtttgcactgccaatgatttacaaggatggaaagatttcccaaagggacttagagttcttctgcttgaaggagatagtagttctgctgctgagataagagaacaacttgaggccatggactataaggtttccactttctacgacgagaatgaagccttgtcagcactctcaagtagtcctaaaggcttccatgttgccatagtggaggtgagtacaagctgtagccttggaggtttcaaatttcttgagaatgcaaaggacttgcctaccattatgacttcaaaggaccagtgtctgaacaccatgatgaagtgcattgcgcttggtgcagttgagtttctcagtaaaccactctctgaggacaagctcaagaatatttggcagcatgttgttcacaaggcatttaattctggggaaaatgtcctttctgaatcactaaaacctgtcaaagaatctgtagaatccatgctgcagctccaaacagacattggacaagataaaagtaggatttcaattgatttagagaatgtgtcgaggtttagtgataatgaccatgagcagtctgctgtatgtgataaatatccggctccgtcaacccctcaattaaagcaggggacaaggttactggatgatggagattgccatgagcagactaattgctcaacagaaaaagaaagtggggaacatgatagggaatgtaaatctgtcgaaacttcatgtgggaatttgaatgccgaaagttctcctcagccaagggaacctgataagactctgattagggaggaagatgattttgccaatgtttccaagggtgagagcgctgtttcactgaatccacataataaaaagtttctcagcaatgccgatggtaatacatctccaaataaaacgggtgtacttaatgattcatgtgagattaaagctaatcggaagaaggtgaaagtagactggacacctgagctgcataaaaaatttgtaaaggctgtcgaacaactaggtattgatcaagccattccttctagaatattggagataatgaaagtggaaggtttgacaaggcacaatgtggcaagccatcttcagaaatatagaatacacaagagacaaagtgcacccagggaagaagatcggaaatggcataatcaaggggatgcaatgcaaaggaactattatatgcaaagaccaatcatggcataccctccatatcattcacatcacaccctttctccagctcctatatatcctatgtggggacaacctggcagtcaaacagccggtgtacagatttggggccatcctggttatcccatgtggcatcctacagaaagttggcactggaagccttatccgggggtgcatgtggatgcttggggatgcccgttggtgccacctcctcaagctccttgttttccctacaatcaaaatacacctggattgcacaatcctaaagcagttgactatagattcagcatgccacgaagttcctttgagcatcatccggcagaggaggtggtagacaaggtagtgaaggaagcaatgagccagccatggctaccattgcccttaggactcaaacctccttccatggatagtgtgttggctgaactctccaaacaaggcatacccagcatccctcttggcaacaagggttcttctactcctaaaccccgtcgagatgtacgaccgaccccgccaccgggtcccacatagtagtggttttgatgatggggccagccagttacatatcaacgccctgttgactcttgtaattattttgtttctcaaatttccttcccaggttgcaactacagtggtagatttggctggaagttgggaccattttactttgcctggtggtccccgccgctacaccgaccactcatgatgtctctccttaagctgttgagcgatgatggttgatatgatatgatatcatcaggtctggtcatacaccaccatgatgcatcacaaatggacaataatacattgatcctattccatggccacttgccaaaacaaaacgctaaaaataacattaaaaaaaaaggttaagctatgcagcagcattcagcagtttcaatgcagtgcatggcatcatttgttgaaactaaggactggccacgcatttgttgaagctttatacaaaatattgtggctgaaagaaagataacaatgtggactttttgatggttgtggtggtgaggggtttttggttgtaagtgaccagcttcggggtccatgtaaaaatagcatgacagggactggaggtgtcttggttctgttggtgttgttggggagggggtctagttgaggtctaataatggaaaaaaaggatagttaggatagtgttgtgaataaaaaatgagtccaggctttggtttatgctaacttgttcttttcccaattcaatttgttcactcagctattttagcttaagttcagcattgagaacaacactttgtgcatgttcagttgtttttgctcactttatctttttaacgttttgaaaataattctaagctatgatcattactttcttttaaaa

SEQ ID NO: 3291 - DNA, 1341 bp, Glycine max
attatgttaggaagacgcccctttatccatttggccggacaccacacaccgaagctattcagctattgtctattgcattgccattttcaagtaatggcgctactacgtcttgtttgcttaccttcaacaaatcaattatccactcaaccccattcccattcccaatccacctctttctcttttcttcgcaaaacgccccattctcaacccatcaatttcagtctctcttcctttcactttccacgcctatcccttatcacaaccaaacaaacccttaacctcactcccacacatgcctccacttccgaacaacaaaccgaggagcctcttgtctctgaagaagaattttctcgcaccaggttgctcgctcagaacgtgccctggacaagcacccctgaagacattcgcaccctcttcgaaaaacatgggaaagtcctcgaagtcgagctttctatgtataagaaaaaccgaaaccggggtttggcctttgtcgaaatgggttccccagaagaggcactggaagctctcaataatctcgaatcgtatgagtttgagggtcgtgtaattaaagtcaattatgctcggccaaaaaaggagaaaacagcgccgccccctgtgaaaccaaaggtggtgacgtttaacttgtttgttgctaacttatcctatgatgcttgcccccaaagatcttaaggagttttttgatttgggaactggtagagttgtctctgctgaggttgtgtatcgtgataatcctagaaggccgtctggatatggatttgtgtccttcaagtctaagaaagaagctgaggctgctcttgctgagttccaaggaaaggtttttatgggaaggccaatcagggtggatcggggtcggcgttttgttcaacaaccaggggacgggagtgcaaagtctgaagatactccttctgagttgagtgtgaatggggcagaagctccacaaccagcagaggggagtgcaaagtctgaagatactccttctgagttgagtgtgaatggggaagaagctgacaaagctgattgatatcagtttttccctgatgcatatcgatattattgatgttgtatgtccttgcttcagacattttgaatgtttgctctttcttgcagataatccgaaatctttgattggtttagattatgtgttttactggtggttttcacccttatataccagaggcccttgagatacaaggagcggataggtgtaagcacaagcacttccgtgattcaagaatccatttatcttcattgcataatttaacaattgttggcaagctactatatcttaagaaagcgagaaatatatgtaaaaaaaaaaaa

SEQ ID NO: 3292 - DNA, 1008 bp, Glycine max
ctggctcctataacagttgaaatgccttctttataaaccaacaaattaaaacaaaacagtcaacaaattaaaacaaaacagtctccatttgacacagtcctagtggtgtactacttattatggccacaccagcatccatcactaatgtcactgtggagttccttcaattccccgcactggtgacacctcctggctctaccaaatcctatttccttggcggcgcaggggtgagagggttgaatattcaagaagaatttgtgaagttcacgggaataggtgtttatttggaagacaaggccgtgtcatcactcgctgccaaatggaagggcaagagtgcagctgaattgctcgactcccttgacttctacagagatatcatcaaaggcccctttgagaagttaattcgagggtcaaagttaagaacattggatggtcgtgaatacgtaaggaaggtatcagagaactgtgtggcacatatgcaatctgttgggacttacagtgatgaggaggaaaaagctattgaggaatttagaaatgctttcaaggatcaaaatttcccaccaggctccactgttttctacaaacaatcacccactggaacattggggcttagtttctcgaaagatgagacaataccagaacatgagcatgcagtgatagacaacaagccactttcggaggcagtgctggagactatgatcggagagattcctgtttcccctgctttgaaagagagtttggctacaaggtttcatcagttcttcaaagagttagaggccaatcccaacattgaaaactgagagttgcagcagttgccaactatctttagaagaccttggaaacaagaagaagaacagcaaaaatttgaagagacatctaaataatgtaacccccccctccccgcagttatgtgtgcactttggtggatttgtaccccatttaataaacgagcaaaccgagttattgctaagcattttagtgtaagttaaaaaaaaaaaaaaaaaaaaa

SEQ ID NO: 3293 - DNA, 1251 bp, Glycine max
gaaatcccagtaagaagaaaaaaaatatcaagttccatcccagtgagtggcactgaactaaaaaatgaactgtcttcagaatctttctcgattctctgttttgcccttcgatacacttgttacgcgccaccgcaagaaccttcccctttccctgggtttcgtcaataattctcatcaaaatctaactatggcactcaaggctgcctcaggttctataccgagtgcagacacaagtagtgccgataaggaggaagaaaagtctgagacatatagtcatagcatgacagaagccatgggtgctgttttgacttataggcatgaattaggaatgaactataatttcatccgtccagacttgattgtgggatcatgcctacagactcctgaagatgtagacaagttgtgtagaattggagtgaaaactatattttgcttacaacaagatccagaccttgaatatttcggagttgatattaatgccatacgagaatatgccaagacatgcaatgacattcaacacttgcgtgcggagataagggactttgatgcatttgatctacggaggcggcttccagttgtagttagcaaattatacaaggcaataaattccaatggaggtgtaacatatatacattgcactgctggacttggaagagctccagctgttgcgttggcttatatgttttgggttttgggttataaacttaacgaggctcatacactacttcagagcaaaaggtcatgctttccaaaactggatgccattaaaagtgcaacagctgatattcctacaggcctcagtaagaagtctgtcactttgtcatgggaaggcagcaattgctctaccgtggaaatttcaggacttgatattggatgggggcagagaatacccctaaattttgatgacaaagagggtttgtggtttctcaagagggaattgcctgaaggactctatgagtacaagtacattgttgatggggaatggacatgcaatacagatgagcttgtaacctctcccaacaaagatggccatgtcaacaattttattcaagtccttgatgatacaaacagagtccgtgcctcccttcgggagagattgaccggtgatgatcctgatctcacaacagatgaacgactgagaataaaggagtttcttgaagcttgtcctgatgaggattagtgaaccatcaatgcacgtggttgttgatgtaaagtactagatgcacgcatacatattacctaataagattg

SEQ ID NO: 3294 - DNA, 2215 bp, Glycine max
acagtttcatttctacaaacaaacgacgactttcctgcagcgttccttccaaattccaaacccaccataatatctagcttcttgtgaaggctgttagtttgattatagaagttggtatcgataatttgctgtgatgggtggccaaaggagtggttatggtaagcgtccccactctcaatctgaccatgataatgggccaaataaaaggaggaatcatggtgatgatagagagcagtttgtgattgattcggaggataccgtgtatcgttatgtgtgcccgggtcgaaagattggcagtgttattggtaggggaggtgagattgttaagcagctgagggtggagactaaggctaagattaggattggtgagacggtgccggggtgcgaagagcgtgtcgttactatttatagtcccagtgatgagactaatgctgttgagggtggtggcaactatgtgtctccggctcaggatgctttgtttaaggtgcatgacagagtggttgccgaggactttcacggtgaccaggatgatgatggaggccaacaagtgactgctaagctgctagtgccatctgatcagataggttgtgttattggaaaaggtgggtcaatagttcagaaccggccgcgtgttccggggccccagattcggatactgaaggatgatcatttacctttgtgcgctttgagctctgatgaacttgtgcagattactggggatgcttcagttgtgaaaaaggctctgtgtcaaattgcatctcgacttcatgacaatccttcacgatctcagcatcttcttacttctgctgttcctggtgtatatcctgccggtggttcactcattggtccaggtgctggagctccaattgtggggatagctcctcttgttggtgcttatgggggatataaaggtgacactggtgactggccgccgcggtccatgtactcagctccaagggatgaggcatctacaaaggaattttcagttcgattggtttgtccaacaggaaacattggaggtgtgataggaaaaggtggtatgataatcaatcaaattaggcaggagtccggggcaacaatcaaagttgatagttcaacaacagaaggagatgaatgcttgatagccatttcgaccaaagagttctttgaagagactttctctccaacaatagaagcagctgtgcgtttgcaacctcgatgcagtgagaaggttgaaagagattcaggaatcatctctttcactacccgtctgctggtaccaacctcacgtattggttgccttattggtaaaggggggtctatcataactgagatgaggaggcttacaaaagctaacattcgcattatttcgaaggaaaatcttcctaagattgcatctgaagatgatgaaatggtgcagatttcaggagaccttgatattgccaaggatgctctagtgcatgtacttacgcggttgagagcaaatctttttgatagggagggtgctctctcttcattccttccagttctgccatatctccctgtttcagcagatggatcagatggcctaaactatgatggtagagatggtaaaagacatggacgtggacattcatattcaagtgggtatggaggctcaagtgatttagcagctggtgacatttatggaagctatggtggttctcagcttggaagcaacagtgcttatggggcttatggaagttattctttgggacggtctagtactgctgggttgtcaagtcagagtggtgcttctaggaggagaaaccatgcttactagacttaatggtccatgcagctgagatctatgaagcctgcagcctgcctactgcctaaaccagaagacctgatgaaccagggtttgacaaacttatggcccaccctgaagcttctacttagaggaccaaacatatgtggagactattgaaattggccatgtccattttaccttaattcccaagcttgataacttgtgcacccaagaacctataaagctggcttgcctttgcttctgtttttattattgtggttcatttgtctttaaaactgaaaacaccatgtagctttgatcagcctgcagttgtatactatttaatgttttttggttttattttctcatagttcactgtcacatgcagtatgaacttttctggttatttgaatttcatctttttccttctaagttgaccttattatatacatcaaagtttggtgg

SEQ ID NO: 3295 - DNA, 1286 bp, Glycine max
acccgtccggaattcccggtcggaccaacccgtccgccaagccgtccgccaacccgtccgacggtttggtttaagcgacaactctctaagtaaaatcttaaatttctgaacattgaacaactcttcacacaacaaaacttttttctggcattgtagcatcatgactggcagagaaatcctccatatgatgaaggtgaaagcagggtttggaacaccagacacagggaatggaaaaggcaaaatatcaaaacacattacacatggctttcacttgatgaagggcaaatcagcgcatcctatggaagattatttagtttcagaatttaagcaagaaaaggacagagaattaggcttgtttgcaatatttgatggccacttaggccatgatgtagcaagctatttgcagaaccaccttttccaaaacatcttgcaacagcatgacttttggactgagacagaaagcgcagtgaaaaaagcttacgttgaaacagatgagaaaatattggaacaagaacttgtgttggggcgaggagggtcaacagctgtgactgcaatacttattgatggtcagaagcttgtagtagcaaatgttggtgactcaagagctattatctgtgagaatggaaaggcaagacaactatcagtggatcatgaaccaagcaaggaaaaaaaatcgattgagaggcgtgggggttttgtatcaaacattccaggagatgtccctcgagtagatggacagctggcagtagcaagggcttttggtgacaggagcctgaagatgcatcttagttcagaacctgatgtgattgtacaggaagtagatcaacatacagagtttcttattctggctagtgatggaatatggaaggttatgtcaaacgaagaagcagtggaatctattagacaaataaaggatgctcaagctgcagcaaagcaattgattgaagaggcagtttgcaagaaaagtaaggatgacatatcttgcatagttgtgaggttccaatgacatgtttttggttaagcacaggaatcctttccgaaacccaagaatgaaggccctgctggacatttagctagcactgattgcatgtataaatgattcaataataacttttgctttttcaagagatttttttttttaaactgtttgcatcttaatgagtagttgttaccgccacaatttccatgtataagtgtatcttctcacctgttgaatggtagatgagagaattaaatagaataatcatggctttaatgtgttttttccagtaaaaaaaaaaaaaaaa

SEQ ID NO: 3296 - DNA, 1179 bp, Glycine max
tcgtacggctgcgagaagacgacagaaggcggaagtcttgaatttctgaacatagaacaactcttcacacaacacaactttttctagcattgtagcatcatgactggcaaagacatcctccatataatgaaggtgaaagcagggtttgcaccaccagacacagggaaaggaaaaggcaaaatatcaaaacacatcacacatggctttcacttgatgaagggcaaatcggcacatcctatggaagattatttagtttcggaatttaagcaagaaaaggatagagaattaggcttgtttgcaatatttgatggccacttaggccatgatgttgccagctatttgcagaaccaccttttccaaaacatcttgaaagagcatgacttttggactgagacagaaagcgcggtgaagagagcttaccttgaaacagatgagaaaatattggaacaagcacttgtgttggggcgaggagggtcaacagctgtgactgcaatacttattgatggtcagaagcttatagtagcaaatgttggtgactcaagagctgttatttgtgagaatggaaaggcaagacaactatctgtggatcatgaaccaagcaaggaaaaaaaatggattgagaggcgtggcgggtttgtatcaaaaattccaggagatgtccctcgagtagatggacagctggcagtagcaagggcttttggtgacaggagcctgaagatgcatcttagttcagaacctgatgtgcttgtagaggaagtagatccacatacagagtttcttattctggctagtgatggaatatggaaggttatgtcaaacgaagaagcagtggaatctattcgacaaataaaggatgctcaagctgcagcaaagcacttgatagaagaggcagtttccaggaaaagcaaggatgatatatcttgcatagttgtaaggttctaatgacatgttttttatggataagcagaggaatcctttcccaaaccaagattgaaggccctggtggacatttagaattttagatgatcagatgaacttcatcatgttctttcttagctaaaatgcctgcagaaactcacaagctagcactgattgcatgtataaatgattcaataataacttttatttttttaaatgagattttttaaattgtttgcatcttaaaaaaaaaaaaaaaaa

SEQ ID NO: 3297 - DNA, 2001 bp, Glycine max
cggctcgagcggctcgagcggctcccctcgctcctggattttatgtttgtttttgcgagcgtaaggttgaggagaagagatggtgggagcacggccacgggacatagatgacttgcccaagaacgccgccaactacacagcgcttacgccgttgtggtttctagagagagctgctacggtccaccccaccagaaactccctcatccacggatctcgtcgctacacgtggcagcagacttaccaccgttgccgtcgattcgcctccgctctttctaatcattccatcggtcttggaaacactgtagctgttattgcacccaacattccagctctttatgaagctcactttgggattccaatgtcaggggctgtgttgaaccctgttaatattaggctaaatgcatccacggtagcttttcttcttggtcattgcacagctgcagcagtaatagttgatcaagagtttttttctttggcagaagaagctttgaaaatatggtctgagaaggccaaaaccttcagccctccacttttaatagtcatcagtgatgaaaattgcgaccctaaggcacttaaatatgctctgggcaaaggagccattgaatatgaggattttcttcaaagtggtgatcctgagtatgcatggaaacccccagaggatgagtggcagagcattgcattgggttacacatccggtaccactgctagtccgaagggtgtggttttacatcaccgtggagcttatctcatgtctctgagtggagctcttatttggggaatgactgaaggtgctgtgtatctttggacacttcccatgttccattgcaatggttggtgctacacttggacacttgcagctctgtgtggtactaacatatgccttcgccaggtaacagcgaaggcagtgtatggagccattgccaagtataaagtgactcatttttgtgcagcaccagtggttcttaacacactaattaatgccccagctgaggacaccattcttcctctaccccatgttgtgcatgtgaatacagctggggctgcacctcctccttctgttctttccggcatgtctgaacgtggatttcgtgtcacacacacttatggtctctcagaaacctatggcccctctgtctactgtgcctggaaaccagaatgggaatcacttccccctgaaaaccaagcccggctcaatgcaagacaaggtgttaggtacattggcttggaaggcctggctgttgtgaacacaaaaaccatggaacctgttcctgctgatggtaaaactgttggtgagattgtgatgcggggtaattctgtgatgaaaggctacttaaagaaccctaaggctaacgaggagacctttgcaaatggatggtttcattctggggatcttgctgtgaagcacccagatggatatatagaaattaaagacagatcaaaggacatcataatctctggtgctgaaaatatcagcagtgtagagatagagaatactctttactcacatccttcaatactggaggcagcagtggttgcaagggcagatgaaaaatggggcgagtctccctgcgcttttgtgacattaaagccaggagtggataaaagcaatgagcagcgtataattgaggatatactaaagttcagcagggccaagatgcctgcttattgggttccaaaatcagttgtgtttggagccttacctaagacagctactgggaagatacagaagcatatactgagggccaaggcaaaagagatgggacctgtaaagttgagcaagttataaacatattgaaatgatcatgacgaaaaacgaactagttataaacatattgagtactttataaacatattgagatagcctatttgtgattgggattctgcatacttatctataataatatagccgaaccttttatatgtggttcaaaagtagttgttggataaaaaaaaggcggccgctagggcggtgcctgtataggatcgagggcatcggacgtc

SEQ ID NO: 3298 - DNA, 1647 bp, Glycine max
ttctgaattggtcactcgagatgacagttatgtgaagaaagccaaatcatcgttttactccaatgggtatggatttgagccccctcgcccccctccacccggccgcttggattcatcgttaaaacctacatcaactgcaggccaagatggggataagttgagtttgatcaagcttgctagcttaattgaagtgtctgcgaagaaagggactcgtgatctcaaactgcagaacaagttgatggatcaggttgattggctacctgattcgatagggaagttgtccagcttggtgactcttgatttgtctgagaatcggattatggccctacctgctacgattggtgggctttcgtcgttgaccagattggacttgcattccaatagaatcacggagcttcctgattctgttgggaatcttcttagtctgctttatcttgatctgaggggaaatcagttaacactattgcctgcttcttttagcaggttggtgcgtctagaggagctcgatttgagttcaaatcagctttcagcgcttcctgactctatagggtcgcttgttagactaaaaatattgaatgtggaaacaaatgatatagaggaacttccacattctgttggtagttgttcttcccttagggagcttcgcgttgactataaccggcttaaggccctgcctgaagccgttggaaagattcagagcctggagattttgtctgtgcggtacaataacatcaaacaactacctacaacaatgtcatctctaacaaacctcaaggaacttaatgtgagtttcaatgagctcgagtcggtgccagagagcttgtgttttgccacctctcttgtcaagatgaacataggaaacaattttgctgacatgagatccttaccgagatccattgggaaccttgaattgcttgaggaattggatatcagcaataatcagatacgtgtgcttcctgaatcgtttaggatgctcactcgactacgcatcctgcgagcagaagagaatcctcttgaagtcccaccaagagaaatagctgataagggagctcaggctgttgtccagtacatggatgagcttgttgagaagagggaaaagaaagatgttaaagcacagccactaaagcagaaaaagagttgggctcagatctgcttcttttcaaagtctaacaaaagaaagcgtgacggggttgattatgtgaaaacctgatttcattcaatgacaccattgttggcaagcaacagattctatgtggatatgcatttaaaaatagagacaaatatatctcttagtgtgcggtcaataatatgcagagatatggatcgtgcaagaatgaattgacagcctctgtaggctgttataatttgctttgacttggcggcacaaattgtagatttcttgttcagtattttctgatttttttccctgtataatttgaattttcgatttatttcatttgtatttctattgctgctttgaaagtagaaagaagtgtacacaacccaacaggcaaacagagacgacggatagtgggggagaaagagaaaccgaagatgattatgtactatggttattatatatgtacaattgtaacttcactctattgttaaacgaattacagtttaccctttgtaccacttcccgag

SEQ ID NO: 3299 - DNA, 1173 bp, Glycine max
tacggctgcgagaagacgacagaaggggattgagaagtaagatggaggttgttatgcgccgtaagtaatttgtttgttggattggaattgagaaaacagcaacaaggggaaatgggagatagagaagaacaaggcgagggtgctggctcctccttggaattggaagctcctattccagagacccaaaaagaaatcccaatttcagatggcatcgcattcaacaatcagagcgcgattttccaagccatcgaggttgtggaacgagactcgttggccatcgctcagagtttcacttctctcttcgcttccctccgattggccctctccgaatccacatccacctctctccatcacatgcagtgcttcaccgatgccaccggtcgccttcaggaatctgtgcttgatgcagctaccaaggggaatcgctatataaattcctgtctcagattgaatgaggagatgaagagtgttgatggtctcgcctctcaattaaaaatcttaagaaagcatgtcgatgctctggacgcagctgttaacaagcttcttcatatcccctgaaactggggggatgcagtcttgtacaaggcaaacatgaaaatgaatatttcgaacgcaggctcatgaatttcatctacaaggcaacttgagctagtgttttgaatttcacctacaaggcaacttgagcacttttccatgtgacatggttatgctttgaaagcaccactccattttaaatattctgaattaggatagacacctcgctgttacctaacctatggttcatatgtaacttacattcttctatggtaaaagtgggtaaatgatgctagtaacgtgtgaaatcattaactggaactgaatatgatgtataatgatttgattcttaaaatgtgttagtgtaagcattgtgtgcgggactgatagttgcacctagtatgcaagatatataatagaatttggattgatttgggagggatattataatgaaacctactacctagagagacatcttgcaacaacgtattgaggtataagcacagacatgaaaagtgattattaattgaaaatgcatatagttaccacattttaagttatcggcaggtaattaaatgtctttttatattattgtacttttatcaactagttcaataattaggtttactatatattttt

SEQ ID NO: 3300 - DNA, 1065 bp, Glycine max
aaattttaaacggaatgtaatggtgggtcggcccgttatatgatgcaacaaacaaacgcagaagccaccaccgcttgcagaggtgagagcgaatcgccgtcgacgaacaccacccaaacatgtcttctcttcgaaacgccattcctaggcgtgctcacaaagagcgttctcaaccgtcgtcgaggaaaaaattcggcctgttagaaaagcacaaagactatgtccagcgcgctaaagcattccacaagaaagaaggcactttgcggaaacttagggaaaaagctgcaaatagaaatgaagatgagttttacttcaagatggttagaacaaaaaccgttgatggagttcataaaccagagagtgaagcgaataagtacactcagcaagagcttatgctgatgaagactcaggatatgggttacattctccagaagattcagagtgagagaaataaaattgaaaggcttactgcctcgctgcactctatcgataaacagccagtgaacaagcatgttttgtttgccgaggagaggaaaacagctcagtcttaccaagagttggaagcaaggagaagtagactcaaccaactagagaaaatctacatggatatggcaatgcagaaggagttgcagaaaaaaggcaggaagcgcaaactaggtgaagacgagattgtctgtccaacctctaaaccagtatacaagtggtgtgctgaaagaaaacgatgaaagagttaataattctgaggttctttttttctttttcacaattttgcataatgatttaatactctactgggttggatccggagttgaagaatttgcatgtcttagatgaagcaccaacattgctagctgcagcatcgaatgtcttacattaagtgggatcactactgttgccaacaactgtcgctttcttgtttagagttcctttatcatgtaaccattttctttactctgttgagtattcttccttgtaccttcgatgttctgcgactggattttgtaagtcttataaatatattcaatttttgttattttatcgggcaaaaaaaaaaaaaaaaaaaaa

SEQ ID NO: 3301 - DNA, 2256 bp, Glycine max
  misc_feature (2080)..(2080): n is a, c, g, or t
  misc_feature (2100)..(2101): n is a, c, g, or t
  misc_feature (2120)..(2120): n is a, c, g, or t
  misc_feature (2170)..(2170): n is a, c, g, or t
tcggcacgaggacccccccagtccctccttggttctacacaacacaactcctattgttcctgctcctcgaacccttgagagcgagaaaccacgtttctctcttgaggttaattattattattattgagtattgagcatggaggcgccatctctcaccaaacccaacgacccaacaaaaccttccaacacttccagcacccttagtctggagggggggccgggcgaagcgagcccactccgaaaaatgtttgcggtggcgtccatcgccgccggcatacagttcgggtgggctctgcagctgtctctcttaaccccctacgttcagctcttaggagtcccccacgcggcggcctccttcatctggctctgtgggcccatctcggggctggtggtgcagcccattgtgggctactacagcgaccactgcacctctcgcttcggccgaaggcgccccttcatcctcggaggcgccttagccgtcgccatcgccgtgttcctcatcggctacgcggccgacataggacactccgctggcgacgacataactaaaaaaacccgaccccgtgcagttggggtcttcgtcataggattctggatcctagacgtggccaacaacatgctccagggaccctgccgcgcctttttagctgacctcgctgccggcgaccagcaaaaaacgagaatcgccaacggtttcttctcgttcttcatggccgtcggcaacgtgcttgggtatgctgcagggtcctacagcggtctccacaagatcttccccttcacggagaccaaggcctgtgacgtcttctgcgcaaacttaaaaagctgtttctttttctcgatcctactgcttctctttttagcaactgttgctctgctctacgttaaggacaagcaagttgaagcaattcctctggatgatgccactcaaccctcttgtttctttcagcttttcggtgctctgaaagagctcaagagaccgatgtggatgctgatgctggtcacagctgtgaactgggtggggtggtttccttacttccttttcgacactgactggatgggtcgtgaggtctacggtggaactgctggggaggacgcgtacgcgaagggagtgcgcgtgggatcgttagggctgatggtaaacgccgtcgtgttgggcttcatgtcgttggcggtggagccgttggggaagatggttgggggagtgaagaggctttgggcgattgtgaactttattctcgcgattgggttcggaatgacggtggtgatcaccaaggtggcggagcaccagcgccggatgaaccccgccgccgtgggccacccctccgagggggtggtggttgggtccatggttttctttggggttcttggagttccccttgcgattactttcagtgtcccttttgctctagcatcaatatactgcagcgcttcaggagcaggacaaggtttatctttgggagttctcaatcttgcaattgtggtaccacagatggtggtgtctgcattaagtggtccttgggattccttgtttggtggtggcaacttgccggctttcatggtgggtgctgcggcagccgcgttgagcgccataatggcgattgtcttgctgccaactccaaagccagctgatgaggccaaggcttcaagcatgatggcagggggctttcactagttaatggagttttgcatgtttcagttttgtcccctgctttaatagaaagaaaaaaaaaaacagtaataaaagaggaaaaattggatagtctcttttgatttgaagctggtgtgtaattatgtaatagacccaccaagtgctacatttgtaaccttttgtagcacccactgaacatagtaattgcagagtttggtgtgattgtacataattgcagtggttggaacttcttggaagacccttcctcttatataattttagtctgtttcagtgttcagaggaatgtggtgattaaggatgagtcttagtttaagactttacatcaattaatgataataagggaaatgctactttttacaaaaaaaaaaaaaaaaaaaaaaaaaaaaaaaaaaaaaaaaaaatcttcctgcnagcccgtggcatccactaannttagagcgcccgccaccgnagatgaagctccagtttttgttcccttttaggggaggtttaagttcaaanaaagaaacacccatgaaaaatagtttgttcccggaggtaaattgggaatcccatacccaaatccaaccccacccccccccccccac

SEQ ID NO: 3302 - DNA, 889 bp, Glycine max
  misc_feature (841)..(841): n is a, c, g, or t
cccacgcgtccgcccacgcgtccgcccattctccccacgctataaaatccccccactccttcttgcttcacacaacatatctttctcttgttccttctccttgtgatcttcttcaaccttcagagtgagaaaacacattcagaaaccacgtttctctcttcttcttcttcttcttctttttcttctctcgaggtcattattaagtattcaccatggaggcaccatctcccaccaaacccaacgacccaacaaaaccttccaacacttccaccacccttagtctggaggccggcccggcccaagcgagcccactccgaaaaatgtttgccgtggcgtccatcgccgccggcatacagttcgggtgggctctccagctctctcttctaaccccctacgttcagcttttaggagtcccccacgcggcggcctccttcatctggctctgcgggcccatctccgggctcgtggtacagcccattgtgggctactacagcgaccactgtacctcccgctttggtcgcaggcgcccctttattctcgggggcgccttagccgtcgccgtcgccgtgttcctcattggttacgcagccgatataggatacgcggcgggcgacgacatatcgaaaacgacccgaccccgagcggtcggggtcttcgtcataggattttggatcctagacgtggccaacaacatgcttcaaggaccctgtcgcgcctttctagcagacctagctgccggcgaccaacgaaaaacaagaattgctaacggttttttctcgtttttcatggcccgtgggcaacgtgctaggttacgcagcagggtcctacaaaggtctgcacnaagatgtttcccttcacggagaccaagggctgccgacgtgttctgcgc

SEQ ID NO: 3303 - DNA, 1015 bp, Glycine max
tggctcgagctcgagccgcacggacacgggatgtgattatgggatctgtagtcctgtgactccgaacaccctcctccctctatatatctatatccaaatctcccttcaattctcaatctctgaaaccacaattcacaaccgaaacagtttccatctctctcacaaaatgacaacaatatcaaattgctcccttctcttcctcttcctcttcctctccaccctccacatagcttccaccctctcaacccccaccaacttcatcaagtcctcctgcagcaccacccagtacccagccctctgcatccagtccctctccgtctacgcctccaccatccagcaagacccccacgagctcgtccagacagccctctccctctccctcaaccacaccgaggccaccaaaaccttcgtcgcaaaatgcaacaaattcagaggcctcaaaccgagagaatacgctgccttgaaggactgcgctgaagaaatcagtgacagcgtcgaccggctcagccggtcgctgaaggaactcaaattgtgtaaggtgaagggtgaggacttcacgtggcacatcagcaacgttgagacgtgggtgagttcggctttgaccgatgagagcacttgcggcgatgggttcgccgggaaggcgctgaatgggaagattaaggaggcgattagggctagaatggtcaatgttgctcaggttactagcaatgctctctcgcttattaatcagtatgctgcacaacactagggggagttgggaagaaagtttttgttttttgttttcgttttttcctttgaggggaaaaaaaaaaagaacaaacagttctatgtggttggttaatggttaattttgtgttttgtgtggtgtatgtaattgtgagtttttatagagatatggatcttgtgttgcttctgatcaaatgtgaaatatgagttctgtttttgtatgaaaaaattaaaaaaaaacctcgcgacctgtgctcccgtaaagtaatgttccttagtccggacgaac

SEQ ID NO: 3304 - DNA, 1186 bp, Glycine max
gtggtttcgtcgcccaccctcatggcaaatcaaaaccaaagagagtgtgctgaatgtctgacttggctttgctttttgcttatcactctctctctctctttctttcttttttgttttaaagtagcttctgttgtgtgcatatataaggagcctgcgggggcgcctctgcttttcagtctcgatcagtttcattcattggaagatatgggaacattagaacaaattgatgcccctcaaaccaggtcatcatcatcttcatcttcttccattgatagcaacaaccacccttctaggactaggactccaccaccctcttccccttcatcaagtgcctgcagaaacagaactgatttgagcactgacctcagacttggtcttagcatctctccttcttctcaatctgaattacccttcaattcaacaccaagggaggaaagttttgactggccaccaattaagtctatattgaggagcacccttgtggggaaacaaagccatctgagccaaagaccctccttgtttgtcaaagtctacatggaaggcatccccataggaagaaaattgaatctgatggcacattatagctatgatggactagtgaaaactcttggccatatgtttaggactaacattctctgtcctaactctcaacctcttaattctaggaattttcacgtgctaacttatgaggatcaagaaggggactggatgatggttggagatgtgccgtgggagatgttcttgaacagtgtgaagaggctgaagatcacaagagctgaccgatgctagttaatttaatgatgtatacaatctctctcacaacacaagctcctcctgatcaattttcattgttcataaatttttgctgtagatctagttattaattagtgggttggtgaaactcgttgaagtatttcaccaaaaagaatggatcccgtgattatcatatatctaatagctttatacaccgaaaaacaatatagatgtgtaacttcttacctaattctcaattcagtacatagctgcagtattcctagtctctctgtttgatgatggagtcatctaattttcctctttgttttggaactagctccattattttgtagtcatttggaacaatgcatgtcccttttgtcttcatacctttaatgcatgatgtttcttggtgtctcttttaaaaaaaaaa

SEQ ID NO: 3305 - DNA, 1326 bp, Glycine max
atgcacacacatatcagcataagaacaaatgatcatgaagtgaagtgaagtgaagtgtatataaaatactttggaagtgtcgtgaagagccaataacggttttttgtgtgtttctttctctctcatgttgtagtatctcacttgtgtttttcattcgtttctgaaccacacaaacatcaccaccgaacaatgccgacggggttaccggcggcgaattccttagtggcgccggacgaagaggggtgggtgtgggggcagatcaaggcggaggcgcgccgcgacgccgagtcggagcctgctttggcgagctacctctactcgacgatcctctcgcactcgtcgctcgagcgttctctgtcttttcacctcggaaataagctctgttcctccacgcttctctcgacgctcctttacgacctgttcctcaacgccttctcctccgacccctccctccgctccgccgccgtcgccgatctccgcgctgcccgcgaacgcgaccccgcctgcgtctcctactcccactgcctcctcaattacaaaggcttcctcgcttgccaggcgcaccgtgtggcgcatctgttgtggcggcaatcacggcggccgttggctttagcgctgcactctcgcatcgcagatgtgtttgcggtggacattcacccggcggcaaggattgggaaggggattctgttcgaccatgccactggggtggtggtaggggagacagcggtaatcgggaacaatgtgtcgatcctgcaccatgttactctgggtgggactggcaaggttggtggagaccggcatcctaagattggggatggggtgcttattggtgctggtgctaccattctggggaatattaagattggggaaggtgcaaaggttggtgctggttcagtggttttaattgatgtgccaccacggacaacagcagttgggaacccggcgaggttggttggtgggaaggagaagccctctaagcatgaggatgtgcctggggagtctatggaccatacttcctttatctctgagtggtcagattatatcatttgaatttctaaggttaatcaattaatgaatgaatacttcaaatcaaatgctatgtgttctgctgttctagagttttgtaattttatatttggattgagattttgtagagaccacactctgcttaattatactgtattatgactggaaattttggcagcctgcaatatagtgacatattgtgcaacagattatataaagctggttttgttggttatgttaaaaaaaaaaaaaaaaaaaaaaaaaaatataaaaaaaaaaaaaaaaaaaaaaaaaaaaaaa

SEQ ID NO: 3306 - DNA, 1302 bp, Glycine max
tacggctgcgagaagacggcgcccacgccgtccggaaaaaaaaaacagaattacacagaaactcaatcaaaataaaaatttattatggatcataggttacgttgttttgtgacaatacccaaaattccttttctattgctactttctctgattctcgtcttcagttacgttaacgcagccttcgacctcgctactatacccttcaacgatggctattctccgctcttcggagatagcaacgttgttcgctccgaggatggcaacggcgtacaactccgcctcgatcgctacacaggttcgggtttcatttcctccagtatgtaccagtatggattcttcagcgcgagaatcaagttaccatcgaattatagtgctggtatttgcgtggccttttatacatcaaacggtgatgtgttcgagaagtcccatgatgagttggactttgaattcctaggtaacgttgccggaaaaccatggcggtttcagacgaacttgtacggcaacggcagcacaaatcgtggccgtgaggagcggtaccgtctgtggttcgatccaaccaaagaattccacagatacagcatcctttggaccgcaaagaatgtcatattttacattgatgaagttccaattagagaagtgctacaaagtgaagaaatgggaggtgactacccatcaaagccaatgtcattatacgccaccatatgggatgcatcaaattgggccacatccggtggaaaatacaaagtgaactataagtatgcaccttttgtgaccgaattcaaggacctagtcctaaagggttgctccgccgatcccattcaagaggttaccggcaccaagtcttgctccgaccaacacgctgatctcgaggctcaagactatgccggcgtgacccccatgcgccgcctcaccatgcggcggttccgtcagcgttacatgtactattcatattgctatgatactttaaggtaccctgtgccacaacccgagtgtgtcattgtaccctccgagaaacaaaggtttaaggagaccggaaggttgaaatttggcggcagtcaccaccggcaatctcgacggaggggccgtacaacaactccggtggatcataccgatcagggtgatatgtgatgattgatattgagatgtatataatagtgtcaattttttagatctttatttgtggttttttttttttacattatatatttatttgccgacaggcataaataaaccaatcgatttatatatggtctttatttttgtttaataaatgtgttttggtgtttaaaaaaaaaataaaaa

SEQ ID NO: 3307 - DNA, 1148 bp, Glycine max
  misc_feature (1102)..(1102): n is a, c, g, or t
ccaatatatattcttgtgtataaatatggaatagaatagagtgaagggagaaaactaaggagtggagagagagaaaaaaaaaaaaaaaacagaacaacacagaaactcaaaaccaaaataaaattattatggatcacattcataggttacgttgttttgggacaatacccaaaattccttttctattgctactttccctgcttctcttcagtttcgttaacgcatccttcgacctcgctactatacccttcaacgacggctattctccgctcttcggagctagcaacgttgttcgctccgaggatggatacggcgtacaactccgcctcgatcgctacacaggttcgggtttcatttcctccagtatgtaccagtatggattcttcagcgcgagaatcaagttaccatcgaattatagtgctggtatttgcgtggccttttatacatcaaacggtgatgtgttcgagaagtcccatgatgagttggactttgaattcctaggtaacgttgccggaaaaccatggcggtttcagacgaacttgtacggcaacggcagcacaaatcgtggccgtgaggagcggtaccgtctgtggttcgatccaaccaaagaattccacagatacagcatcctttggaccgcaaagaatgtcatattttacattgatgaagttccaattagagaagtgctacaaagtgaagaaatgggaggtgactacccatcaaagccaatgtcattatacgccaccatatgggatgcatcaaattgggccacatccggtggaaaatacaaagtgaactataagtatgcaccttttgtgaccgaattcaaggacctagtcctaaagggttgctccgccgatcccattcaagaggttaccggcaccaagtcttgctccgaccaacacgctgatctcgaggctcaagactatgccggcgtgacccccatgcgccgactcaccatgcggcgggtccgtcagcggtacatgtactattcatattgctatgatactttaaggtaccctgtgccagcacccgagtgtgtcattgtaccctgcgagatacataggtttaaggagaccggaaggttgaaatgtggcggcantcaccgacagcaatcttgacggaaggaccgacaacagctacggagg

SEQ ID NO: 3308 - DNA, 1062 bp, Glycine max
ccacgcgtccgttttgattctgttcatctcaccgccctttttccacctcatcgttgtcataattcatccacacacgatacacaccccttttctttttcttttctttctctctgaaattgcaaatctcaaaagcctcaaaagttagaagagagagaaagaccaccacgcacagaaacagcaataattcactttcttttccaactatatccttccctctctctctactatctctctctctctgaaactcatcatcatcatcgccgttgagatctcagaaattgtgtttgctgataaagaaaggatactctagaaggaacttttagccatgtctagctcagcaaaagttttggatcctgcattccagggagttggtcaaagagtaggaactgaaatatggaggattgagaattttcagccagttgcattgcccaaatctgagtatggcaaattctacacgggagattcgtacatcatcttgcagacaactcaaggcaaaggaggcacttatttttatgatttacacttttggattggaaaggatacaagtcaggatgaggctggaactgcagccattaaaactgttgaacttgatgctgctattggagggcgtgcagtgcagcacagggaaatccaagggcatgagtctgacaagtttttgtcatactttaaaccatgtattataccattggagggtggagttgcatctgggtttaaaaaacctgaagaagagaagtttgaaacatgtttgtatgtatgcagagggaaaagagttgttagattgagacaggtcccttttgcaaggtcttcattgaaccatgaagatgtattcatactagacactcagaataagatttatcaattcaatggtgcaaattccaatattcaggaaagagccaaggctttggaagtcatacagtttctgaaagaaaaataccatgaagggaaatgtgatgttgcaattgttgacgatggaaaattagacacggagtcagactcaggtgagttttgggtcctctttggtgggttttgctcccatgggaaagaggtaatcagtgaggatga

SEQ ID NO: 3309 - DNA, 1121 bp, Glycine max
  misc_feature (836)..(836): n is a, c, g, or t
  misc_feature (857)..(857): n is a, c, g, or t
  misc_feature (893)..(893): n is a, c, g, or t
  misc_feature (903)..(903): n is a, c, g, or t
  misc_feature (921)..(921): n is a, c, g, or t
  misc_feature (934)..(934): n is a, c, g, or t
  misc_feature (949)..(949): n is a, c, g, or t
  misc_feature (962)..(962): n is a, c, g, or t
  misc_feature (969)..(970): n is a, c, g, or t
  misc_feature (973)..(973): n is a, c, g, or t
  misc_feature (980)..(980): n is a, c, g, or t
  misc_feature (982)..(982): n is a, c, g, or t
  misc_feature (986)..(986): n is a, c, g, or t
  misc_feature (988)..(989): n is a, c, g, or t
  misc_feature (992)..(992): n is a, c, g, or t
  misc_feature (996)..(1006): n is a, c, g, or t
  misc_feature (1009)..(1009): n is a, c, g, or t
  misc_feature (1011)..(1012): n is a, c, g, or t
  misc_feature (1015)..(1017): n is a, c, g, or t
  misc_feature (1020)..(1020): n is a, c, g, or t
  misc_feature (1024)..(1024): n is a, c, g, or t
  misc_feature (1026)..(1044): n is a, c, g, or t
  misc_feature (1046)..(1066): n is a, c, g, or t
  misc_feature (1068)..(1073): n is a, c, g, or t
  misc_feature (1075)..(1075): n is a, c, g, or t
  misc_feature (1077)..(1079): n is a, c, g, or t
  misc_feature (1081)..(1089): n is a, c, g, or t
  misc_feature (1091)..(1114): n is a, c, g, or t
  misc_feature (1116)..(1118): n is a, c, g, or t
  misc_feature (1120)..(1121): n is a, c, g, or t
tcgagtagctacgtaggcccccccccccaacaaaacataccttactcactagcctaatttgctcctttagcctcactcctgctctcttctacgtcaaatcctaagaaacccatttgaaattttaaatctcgttctggctaattccatgttcattgtttactatacctcaccactccaagggtctcataaatttcttctgcttccaactctgctgcagaaaaagaaactgttggttctagatacaagtgggtttccagagtagaagtgaggctattgggcatgagataaacagcaagcaccatcatctacgacccttttgactatattataagcaacacaaaaatggagagtgacttgagctgggagcagaacacgctcataaatgagctaattcaggggatggaggtagcaaggaagttgaaggcagacttgaggatgccgtattcagttgactcaagagatttgcttgtgcagaggatattatcttcttatgaaaaggctctactgattctaagatgcaatgcatcatcaacttccgagttgcaggccatgagtcaagcaacaccaactttgctacccgagtccccattatctgtccatggaagtcctctgcgcgaggacgttgatgggaccatcaaggatcaccaagaagttaaacatgattcaaagaaaagaaaggcaacgcccaaatggatggatcatgtaagagggacctgtgaaagtggtcttgaaggaccacatgaagatagctacaactggagaaaatatggtcagaaagacatccttggagccaaatatcccagaagttactataggtgcaccttccgcacactcanggctgttgggcaacaaagcangtgcagagatcagatgaagatccccagtatttgacntaacttacanaggcaacatcctgtctcnggaacaatgccgnctgccctaagcccanaaaaaaaaaaaanattttcnnccnggggtcntntttnannccncccnnnnnnnnnnnttntnnctnnntgnggtntnnnnnnnnnnnnnnnnnnngnnnnnnnnnnnnnnnnnnnnncnnnnnncncnnncnnnnnnnnngnnnnnnnnnnnnnnnnnnnnnnnntnnncnn

SEQ ID NO: 3310 - DNA, 1851 bp, Glycine max
tgggaccggcccctccagccagttacgacgcccccccccccacaccttacctttcactagcctaattcgctctcttctaccacaaaccactcaatcctaagaaatccatttgaaatttcaagtctcgttctggctaagtccatgttcattgtttactatacctcaccactccaaggttctcgtaattttcttcagcagaaaacgaaactattgcttccagagaagagcatcatctacgaccattttggcaatattataaaacaagacaaaaatggagagtgacttgagctgggagcggaacacactcatcaatgagctaattcaggggatggaggtagcaaggaagttgaaggctgacttgaagttgccgtattcagttgacacaagagatctgcttctgcagaggatattatcttcttacgaaaaggctctactgattctaagatgcagcaatgcatcaacttccgagttgcagggcatgaatcaagcaacaccaactttgctacccgagtccccattatctgtccatggaagtcctctgcgcgaggacgttcatggggccatcaaggatcaccataattcaaagaaaagaaagataacgcccaaatggatggatcgtgtaagagtgagctgtgagagtggtcttgaaggaccacatgaagatggttacaactggagaaaatatggtcagaaagacatccttggagccaaatatcccagaagttactataggtgcaccttccgcagcactcagggctgttgggcaacaaagcaagtgcagagatcagatgaagatcccacaatgtttgacataacttacagaggaaatcatacctgttctcagggaaacaatgccgttctgccacccaagtcaccagaaaaacatgagaaaccagcacacagtcataacattgacattcaccatgcacaggcatcacaagaaagccttgcaaagttcagaagtatcttgtctgtcaacacagataatctggacaatggagatatggcatatgctttcactttcccttccacttcatttggatgcatgaaacaagacaaccacagcttgattcctttggccctggagaatgactccttcttaagcgacctataccaaacacacctgttatccccaacaacaccagaatcaaattatttcccatctccaactttccagatgaatgagtttgatgggatctacaacaggtcacattcgaaatccgatatcaatgagatcatttccaccaacacatcagcaaccaattctccaattcctgatttcaatttctcacttgatccggtggaaattgatccaaatttccctttcaataccccaggatttttgtgctgattgcactataaatggaatactataagaatgtagtcttcataaaacgggacaatttcagacagcagtagaattgtagaataaagaatgagcaactgcagcacttatgaacgtccttgtagtcaatatcagaattgcaattttggctccgtgttagcaattagcagtatgcactttcaaataaaatagtttctgcaaaaaaaaaaaaaaaaaacctacaagacacgtctttagtagaagggcattaaagggagcagataaaaaattacacatcttgcattggatacgctggccaaaactctgtaatttcattccaattgatgacttagttacacaaatatccatatttatttacagcagccccagagcctgaaatgatacaaatatataatgatagtgacaaagtgacaatagaatggcttgtaacatgaaatctgcatcctaggattcttgttgttgttgttctactcgtccaagactgagttaggagtggaagcattttg

SEQ ID NO: 3311 - DNA, 1716 bp, Glycine max
  misc_feature (1708)..(1708): n is a, c, g, or t
  misc_feature (1710)..(1711): n is a, c, g, or t
  misc_feature (1713)..(1713): n is a, c, g, or t
tacgtatggattgcttgttggtccgtttggcccaatggaggataggattctggaatggagtcctgagaaacgttctggcacatgtaacaggaaggaggactttgcacgtctggtttggtccagaagatttatcttgatattccacgagctttccatgactggagctccactttcaatgatggagttggcaactgaacttttgagctgtggggccactgtttcagctgttgtgcttagcaggaaaggtggtttaatgtcagagcttgctaggagacggatcaaggtgcttgaggacaaatcagatctcagcttcaaaactgcaatgaaggctgatcttgtaattgctggttcagctgtctgtgcatcatggattgaacaatatattgatcatttcccagctggtgcaagccaagttgcctggtggattatggaaaatcgacgagagtactttgatcgttcaaaggatatattgcacagagtaaagatgttggtttttctttctgaatcacaatctaaacagtggcaaaaatggtgtgaagaggaaagcataaaactgagatccctccctgaaattgttgcattgtctgttaatgaagaactggcatttgtagctggtattccttcaacacttaacactccatcctttagtaccgagaaaatggttgagaaaaagcagttattgagggaatcagtccgaaaagaaatgggcctaactgataatgacatgcttgtgatatctctaagcagcatcaaccctgggaagggccagctattgcttcttgaatcagtaagctcagtacttgaacaaggacagttgcaagatgataagaaaatgaaaaaagtgtcaaatataaaggaaggcctatcttccctgactagaaagcatcgtattagaaaattgttgccattgatgaagaatgggaaagtagcttcaaatagtatctcaagcaattctttaagcagaaggaaacaagtgttgcctaatggcaaaggaacaattcaacaatctctcaaacttctcattggttctgttagatcaaagagtaacaaggcagattatgttaaaagccttctaagtttcttagaacaacatccaaacgcctcgacatcaattttttggactccagccacaactcgagttgcctcactttactctgctgcagatgtttatgttataaactctcaggggctgggagaaacatttggacgtgtgactatagaagcaatggcatttggtcttccggttcttggaacggatgctggaggaacacgggagattgttgagaacaatgttactggtcttcttcatcctgttggacatccggggaatgatgttcttgcacagaatctccggtttttactcaaaaaccagttggcaaggaagcaaatgggggtggaaggaagaaagaaggtgcagaagatgtatttgaagcaacacatgtataagaattttgtagaggttattactaggtgcatgagaagcaaataagtgaaagaactgcttggtacttgcaatgcaatgctcccattcttttattggattgcacaaacccgtgactgttagtttctttgtactactactactgagtccaatttatgagaaagattaccggctcctttgttttctttcatttggacaaaataaataaatatagagatgttcctgaaaagcagtattcatataaaaaaaaaaaaaaaaaaaaaaaanannanaaa

SEQ ID NO: 3312 - DNA, 1787 bp, Glycine max
cacggtcctaaaaaatagttcacaatccctatccctcctttcccgttatatatagacgcacgcgtgaaggcgcccccccctgacttgtaataattcttataacacaacacaacccatggccaccacctccgcattcctcctccttcccctcctcctgctgctccacctcgccatcgccgctcacggcatcggcatcaactacggcacgctcggcgacaaccttccaccgcccgcggcggtggcgaacttcctgaagacgaagacgaccatcgaccgcgtgaagatctacgacgtgaacccggacatcctgcgggccttcgccggcagcggcatctccgtgacggtgaccgcccccaacggcgacatcgccgccttaaccaaaatcgactcggcgaggcagtgggtggcgacgcacatcaaaccctttcaccctcagaccaaaattaattacatcctcgtcggcagcgaggttctccactggggcgacaccaacatgatccgcggcctcgtccccgccatgagaacccttcactcagccctcctagccgagggcataaccgacattaaggtaaccactgctcactctctggcgataatgcggtcatcgataccaccaagtatgggcaggttcaggcccgggtacgcaaagcacgtgttgggcccaatgctgaagtttctgagggagacgagaacacccttgatggtgaacccgtacccgtacttcggttacaacgggaaaaacgtgaactttcttctgttcaggcccaaccgaggcttgtacgacaggtacacgaagaggagttacacgaaccagttcgacgctctgatggacgcggtgcactcggcgatgaatgctttggggtacggtgacgtggacatcgccgtcggcgaaacggggtggccctccgtttgcgacggttgggacgcgtgcagcgtggcgaacgcgcagtcctttaacagggaactggtgaagcacctggcgacggggaagggaacgccattgatgccaaaccgaagcttcgagacttacatcttcgcgctcttcaatgagaaccaaaagcccggcccaatagccgaacgcaactggggcctcttccaacctgatttcactcccgtctacgactccggaatcctccgcaacggacaggcagttacacctgcaagacctacacctacaagacctgcagctcctacaaaacctgcacctgcagtaggaggtcaaaaatggtgtgtgccaaaggcagatgctagcaaccaagctttgcaagcaaacataaactatgtgtgcagccaaggagttgattgtaggccaattcaaccaggaggagattgctttgcagccaacaacgttaaggctcttgccacttatgccatgaatgcctactaccaggccaatgggcgccatgatttcaactgtgacttctctcaaactggtgttattactactactaatccaagccatgataaatgcaaaatctgagcatgtttatttaaaggttataatcagaggcaagaaaggaagatagagaaaagcccattgtcatggtgtcaatgtggcttagtggtatctgtgactctgagattatgcattcatgtactcaaaattatttagtttgtatattgttctggaagaagaatgttggcatggtatttcgtgccttgactagatatgatggtccatcgactactaaataggaactttgcattaatattaacatcattcgtagctgaaaaaaaaaaaaaaaaaaaaaaaaaaaaaaaaaaaaaaaaaaaaaaaaaaaaaaaat

SEQ ID NO: 3313 - DNA, 1665 bp, Glycine max
gaacgccattgatgccaaaccgaagcttcgagacttacatcttcgcgctcttcaatgagaaccaaaagcccggcccaatagccgaacgcaactggggcctcttccaacctgatttcactcccgtctacgactccggaatcctccgcaacggacaggtttaatcttttttttttaacttttcaccttaacactaataatgataagtgcaggtaccacacccctattaaaaagagagtcattaaatattagtaagacctaaagaaatatgatttttgtgaaattagtgttttatttattagttttttacgtataaaataatggaaaaaaagagataattatgatctctttgtccttttactttttgctttttcagtttttctctccaagatggagtacaatacacaattcgagatgcaccggcctgtaaagccgtcgattattgtgaaccttttgtggttgataatttaaatagcacccccctcatctaacggttgagatagagaggtgccccttgttgctttttagaaggagaatttggtctagttcgtcacatggcctgtttactatctaacaattatcaaattctaacaaacggtcatatgggcacacttttcttagcttttagaaaatcttgattaattcataaaagaatttgattatagtaataagatattgtattttttttaattagaaatttttgagtaactttctcttgagtgattggaactttttctttttaccaatgaatgattggaacttggtagttagtagtgctaaattgggttaatggattacaaaatgtgtcttgttgtaaaggagaaatccatagtaatttggagcaatcagatcagaaattatgcttggtatcacttttaaggtattagttattataaacaccaccaacaaagggctacataattatcatccacgacaatttttaattggttgcacatgtgaaaatccttgagactgtttgtacgtatgtagtatttgcttaataatattacatttctactcagataaatttcgtgccagcttcgtagggccctccccagacatttttgaatgaataaatgcaggcagttacacctgcaagacctacacctacaagacctgcagctcctacaaaacctgcacctgcagtaggaggtcaaaaatggtgtgtgccaaaggcagatgctagcaaccaagctttgcaagcaaacataaactatgtgtgcagccaaggagttgattgtaggccaattcaaccaggaggagattgctttgcagccaacaacgttaaggctcttgccacttatgccatgaatgcctactaccaggccaatgggcgccatgatttcaactgtgacttctctcaaactggtgttattactactactaatccaagccatgataaatgcaaaatctgagcatgtttatttaaaggttataatcagaggcaagaaaggaagatagagaaaagcccattgtcatggtgtcaatgtggcttagtggtatctgtgactctgagattatgcattcatgtactcaaaattatttagtttgtatattgttctggaagatgaatgttggcatggtatttcgtgccttgactagatatgatggtccatcgactactaaataggaactttgcattaatattaacatcattcgtagctgagc

SEQ ID NO: 3314 - DNA, 755 bp, Glycine max
  misc_feature (575)..(575): n is a, c, g, or t
  misc_feature (587)..(587): n is a, c, g, or t
  misc_feature (614)..(614): n is a, c, g, or t
  misc_feature (623)..(623): n is a, c, g, or t
  misc_feature (635)..(635): n is a, c, g, or t
  misc_feature (638)..(638): n is a, c, g, or t
  misc_feature (650)..(650): n is a, c, g, or t
  misc_feature (675)..(675): n is a, c, g, or t
  misc_feature (679)..(681): n is a, c, g, or t
  misc_feature (705)..(706): n is a, c, g, or t
  misc_feature (708)..(708): n is a, c, g, or t
  misc_feature (710)..(710): n is a, c, g, or t
  misc_feature (714)..(714): n is a, c, g, or t
  misc_feature (719)..(719): n is a, c, g, or t
  misc_feature (733)..(733): n is a, c, g, or t
  misc_feature (745)..(745): n is a, c, g, or t
  misc_feature (755)..(755): n is a, c, g, or t
tcgagtcagctacgtaggcccccccccacactatttgaccacggtcctaaaaaatagttcacaatccctatccctcctctcttgttatatatagacacaaacgtaagaccttttgtttcttacttgtaataattcttataacacaacacaacccatggccaccacctccgcattcctcctccttcccctcctcctgctgctccacctcgccatcgccgctcacggcatcggcatcaactacggcacgctcggcgacaaccttccaccgcccgcggcggtggcgaacttcctgaagacgaagacgaccatcgaccgcgtgaagatctacgacgtgaacccggacatcctgcgggccttcgccggcagcggcatctccgtgacggtgaccgcccccaacggcgacatcgccgccttaaccaaaatcgactcggcgaggcagtgggtggcgacgcacatcaaaccctttcaccctcagaccaaaattaattacatcctcgtcggcagcgaggttctccactggggcgacaccaacatgatccgcggcctcgtccccgccatgagaacccttcactcanccctcctagccnagggcataccgacattaggtaccactngtcactctntggcgatatgcngcntgataccaccantatgggcaggttatgcccggttccnaagnnntttggccaatgctatgttctgagnnananaacnccctngagggaactttccnacttgggataanggtaaatgan

SEQ ID NO: 3315 - DNA, 747 bp, Glycine max
tcgagtcagctacgtagggcccccccccccattcccgttaatgatgtgatatcggctagctacgtaggccccccccccgttcaacacgttacaataatggcccatttttctctctcccctctctcctgtgcaccttctcctctaccaccacgccgccgaatctttctctctcctcctcgagccgccgcatcttccgccaccgacgtcgtttccacttccacttccacttcatcttctgcttcgaatttcgcgcccaaagtcgttgtcaccagagagcgcggcaagaacgccaagcttatcgctgctctggctaaacatgaaatcaattgtttggagcttccactcattgagcacatgcaaggacctgatttagataggcttccttctgtattaggtgacaatgcatttgattgggttgtgataacgtctcctgaggcaggctcagtctttctagaggcatggagagcttctgggatgcctcatgtcaaaataggtgttgttggggctggcactgcaagcattttcaaggaagctttgcagtcttccaaccgatcccttgatattgcctttgtgccatcaaaagcaacaggaaaggttttggctactgagcttcctaagattggaagtaaatgcacggttctctatcctgcttctgcaaaggctagtaatgagattgaggaaggactttcaaatcggggatttggggggtcctgggagagaaaccttttccgcgggggcccgtttaaa

SEQ ID NO: 3316 - DNA, 1248 bp, Glycine max
tccgctcgagacggctgcgagaagacgacagaagaacacgttccaataatgccccatttttctctctcccctctctcctgtgcaccttctcctctcccacctcgccgccgaatctttctcgctcctccccgaaccgccgcatcttccgccaccgacgccgcttcctcttctacttcctcttccgcttcgaatttcgctcccaaagtcgtcgtcaccagagagcgcggcaagaacgccaagcttatcgccgctctggctaaacatgaaatcaattgtttggagcttcctctcattgagcacattcaaggacctgatttaggcaggcttccttctgtattaggtgacaatgcatttgattgggttgtgataacgtctccagaggcaggttctgtctttctagaggcatggagatcttctgggatgcctcatgtcaaaataggtgttgttggggctggtactgcaagcattttcaaggaagctttgcagtcttcaaaccgatcaattgatattgcctttgtgccatcaaaagcaacaggaaaggttttggctactgagcttcctaagattggaaataaatgcaccgttctctatcctgcttctgcaaaggctagcaatgagattgaggaaggactttcaaaccgtggatttgaggttactaggatgaatacatatacaacggtgccagttcaacatgttgaccatacggttctaaagatagcacttgctgcccctgttgttacagtagcttcaccatcttctattcgtgcctggaagaatcttctttcagattctgagtggaacaattctgttgcatgcattggtgagacaactgctacaatggcaagaagtttaggtttcacaaatgtgtactatccagcacaaccaggcatcgaaggctgggtagaaagcattcttgaagcattaggttcctatgatgaattattgaggtaggtctcagctctttgtagcaacctggagatgttttcaactgtttctctcatgctgcaagattaatataatgatttggcatcgtggatggatatactctctgttcagtagtagtatttttaaagatacatttagcttcaataaagtaaggagagtgtagtgtatattaggaaataaagtgcacttatcgtcattgattaaaatataaatatttttgtaattaatttcaaagtttgttatacatgcacttgtttttaatcacaaattctaaccattattttttcaaaaaaaaaaaaaaaa

SEQ ID NO: 3317 - DNA, 1172 bp, Glycine max
ctggacccagacccagttcctttgttcaacacgttacaataatggcccatttttctctctcccctctctcctgtgcaccttctcctctaccaccacgccgccgaatctttctctctcctcctcgagccgccgcatcttccgccaccgacgtcgtttccacttccacttccacttcatcttctgcttcgaatttcgcgcccaaagtcgttgtcaccagagagcgcggcaagaacgccaagcttatcgctgctctggacaatgcatttgattgggttgtgataacgtctcctgaggcaggctcagtctttctagaggcatggagagcttctgggatgcctcatgtcaaaataggtgttgttggggctggcactgcaagcattttcaaggaagctttgcagtcttccaaccgatcccttgatattgcctttgtgccatcaaaagcaacaggaaaggttttggctactgagcttcctaagattggaagtaaatgcacggttctctatcctgcttctgcaaaggctagtaatgagattgaggaaggactttcaaatcgtggatttgaggttactaggatgaatacatatacaacggtgccagttcaacatgttgaccatacggttctaaagatagcacttgctgcccctgttgttacagtagcttcaccatcttctattcgggcctggaagaatcttctttcagattcagagtggaacaattctgttgcgtgcattggtgagacaactgctacaatggcaagaagtttaggtttcacaaatgtgtacttcccaacacaaccaggcatcgaaggctgggtcgagagcattcttgaagcattagggttcctatgatgaattattgaggtaggtctcaggctctcagccctctgtagcaacctggagatgttttcaactttttctcatgctgcaagattaatataatgatttggcaccgtggatgtatatactttctctgttctgtagtatttttaaggataaatttagcttcaataaagtaaggagagtgtagtgtatattaggaaataaagtgcacttatagtcattgattaaaatatcaatagttgagattgtaattaattcccaattttgttatacgggcacttgttttttaatcacaaactctaatcattaactttttaaaaaaaaaaaaaaaaa

SEQ ID NO: 3318 - DNA, 885 bp, Glycine max
gtgcagctatcggtattttcattcgagttgcagtttggcggttaaacgtcttcttctcttctcttctctgcatccatcagatccaaattttctcgcgatacgagggagcaatgtcagatgctaaggttgaggatttgaagaaggaagaggaggttggtgatgattctcctaggaacgaagttgacagtgaaaaatctgcggatgatctgaaagattcggataacgataaaagcgatggaaaccccatgccctcatcccagcaggaggaagcagctgttaagaaaaagtatggagggatgttaccaaagaagcctccactaatatcgaaggatcatgaacgtgcttactttgactctgctgattgggctttggggaagcaaggagcacaaaagcctaaaggaccacttgaagcactccgcccaaagttgcagccaacacaacagcacgctcgttcaaggcgctcagcttatgctccagcagatgataatgaagttgatggctgcaacagtgatgcatcagcagagcatcagagtgctactgaagaagttggtggtgataaaagtgatactgctcaggaccaaagctgccattagtagcaatggatttgacctataatttgcattttgacggtgactagagttgcttgtgctaaaaaaactagaagttggagttttgaagcagttgtaaccatgaattagataactcttcgcaagtatgggattatatgacgtgctaagattgcactatgagaccttgatctctcattcatttgcgaaggcacgattgtggcatttgtaacatttgacatctcaaaatataatcgtctacaataagattgggtgtgaaacttgacaataaaaaaaaaaaaaaaaaaaaaaaaaaaaa

SEQ ID NO: 3319 - DNA, 539 bp, Glycine max
  misc_feature (8)..(8): n is a, c, g, or t
  misc_feature (10)..(10): n is a, c, g, or t
  misc_feature (49)..(49): n is a, c, g, or t
  misc_feature (58)..(58): n is a, c, g, or t
atgaaggntnatgaggaggaagaagaagaagaaatgcctcagagtactncaagagaancaaatgatgtagaagaaggagaaatcaattgatgggttctatatatctcattattgttgcatcagtttaacaagataaattggtttttagaaacagtcaatagcctaagtttagcaacaatgcttttttccagcttttggtgcagagtattacccctggcttggcactcatgaaaaatgtgatagaagaagctagaatgaaagggcataaacattggttttggtttttaggaaaggaaatggtttgaaaatgttgaataacaagcatttaggtcccgtttattgaagggcttttctatctaggcggaggatagcttgtatcgattaggaaatattcgattttgtttgtaaattggaattcataaaattgcatagtgttctatgctctcatttgagtcagcttcactgaatgtaaaatatttgttagcctaggggaaagcaattctttttaaagaaagaaaaaaaaaaaaaaaaaaaaaaaa

SEQ ID NO: 3320 - DNA, 2039 bp, Glycine max
  misc_feature (7)..(7): n is a, c, g, or t
cttatcnctcaaatctaccaaaaaagaatccaggttccgaggccccccccccccccgcaaaaaaaaaaaaaccaacctttttctccctcaatcaacgcaagacgcttaaataacaatccaccctcgttctctctctctctctgacacgcactcctcctcctcctaggtggaattggaattggggatctactagatgggcctaatcagaagcatgagatcgcggtcacagcgtgtggtgcaggagcaagaagctgctgagtgtgtcggtgtcgtcgtcggcgacagcatgcgacagagttgttgggccaacatgccccaagagcttctccgagaggtcctcctccgaatcgaggcctccgaggacacgtggccgccgcggaagagcgtcgtctcctgcgccggcgtctgccgcagctggagacatatcaccaaagacattgtcaaaacgcccgaactctcctccaagatcaccttccccatttctgttaaacagcctggcccaagggagaatctcctacggtgctttataaagcgcaaccggtccacccaaacatactatttgtttctcagtttaaccagtacgctagctgaagatgggaagttccttcttgctgcacgcaaatgcagacgtccaacctgcacagattatatcatctctcttgacgcagatgatatgtcaaagggaagcaactcctatgttgggaaactaagatcaaactttcttggaacaaagttcacaatctatgatagccagctgcctcatacaggagcaaagattatgaaaagtcgctccacaaggctggtgaatctaaagcaagtttcacccaaggttcctacaggcaactatccagtggcccatatttcatatgaattgaatgtgctaggctcaaggggtcctaggagaatgcattgtgtcatggattccattcctgccactgcaattgaacctggaggtgtagcacctacacagactgagttttctcttaacaacatagacatgtttccttcattccccttttttcgatcaaaatcaaatcgtgcggaaaattccatgtctggaccattggttgatcaaaaggatgggatgctagtgttgaaaaacaaggcccctaggtggcatgagcagctgcaatgttggtgcctgaactttcatggacgggtgacaattgcctcagttaaaaactttcagctggtggcttctgcagaaaacggacctgctggaccagaacacgataagatcatcctccaatttggaaaagttgggaaggatttgtttacaatggattaccggtaccctatctcggcatttcaggcatttgcaatctgcctcagcagttttgataccaagattgcttgtgaatgacatgtttaaacagtttcaatccagattatatagctatatctcttgctgcttggagaagtatggcttgaatgtcacttgttgggaagcagaaagatgaaaaatgtttgtcaaggtaaagattggttggatgagcattgaactgaattcgaaaaaaccattcagtttctgggatcacaatttaccagctcttgggaagataacataaaattggaatgttacttgaaactcctccaccatatcccacaaaacaaaacacaaaaacgggaaaaatacatttattcagacccccgtgtacataaattctctatttctttcaacagtttggttgtttattgtaatgtagtagtggttgtttataacatgtccatgcaagacatgttttgttaatgtgactactagctttcaacttatcctttcatgagaacattttgtgttgggggggactcttgcaagaacacaagcagaagcaacttgctatgtgcaactcctttcgttccgtaatccactcttgacttggtctttccaaaacagtaacactgttctaatacagtgcatgtcacgagggataaatgccacttgctgtattattctcttgactaaggaataaaccctccttggctttgtataacagattatgttatatttacaaattataacccctgtctttatagaaaaa

SEQ ID NO: 3321 - DNA, 872 bp, Glycine max
  misc_feature (8)..(8): n is a, c, g, or t
aaatactnaaattactaaattataaatatttgatcaaactaattattgaaataattaaaaaatggccgctccgacccgtccggccggcgggcatcttttgttactaaacaactcgatctgttgtaatttatttagtacgtattgaaaaatgggttcaaagatggctatactgatcctaggcctgttggccatgctccttttgatctcctcagaagtggcagccaggaatttaaaagagggtgaggctgttcaagagacaaatgaagtggctgatgccaaattagttgctgcaggtgaggctgttcaagagacaaatgaagtggctgataccaaattagttggtgcaggtgaggctgttcaagagacaaatgaagtggctgataccaaattagttgctgcaggtgaggctgttcaagagacaaatgaagtggctgataccaaattagttggtgcaggtggggttgttaaacagagaaataaagtgggttatggcaaattagttggtgttggtgattatgattatgggaattggaatggtggccaacgctctccatatggaacgggagctatttgcatgagaggctgttgttttccatcctcgttgggaggttgcctaagttgctgcccgcatgaatggcagtaaccgccctacatggcatggctgctgcttatttcatgaataaaatctcttgttgtgagaggcttgtcttttctcaagtataaataatgtagaataatacgtacgtcactgtgcctgtgtgacaagtttaagagcaaattgaaataatcttcagtgcaaatattttgttttaaaatcgcgacttttgcttctatttttggtattttttttatttttaaacatgcagttcccg

SEQ ID NO: 3322 - DNA, 1828 bp, Glycine max
tttttctctctttctccccctctcggtttaaatggttggtggtcatgcatagaatttatgtgttgtttagctacaaaaactcacaagacagaattgatcattcatgtttcagagtagcatgggatctgcccttatctgtacatcttgactcacattttacagctagtgacatcgatggttttttctacaaacttccttggttaccaaaggactaccgaaaaaaaaaatcgccccaaaacatatgaatgagttcaccccatttccctgtggttcatggtggttattttacttaattcaacctgttgctcctctatttgactcacacttcgggagaagttgctgcttgcaaatgacatggtgtcttctttcatgaggcgtctttgcttaatcctcaatataccctgcgaaacctcaccaatggaggggcgtttcctaggtgatttgtgcaaacatttgtgtgcaattttagcaagctgtctcacttcttcaagattgcattttcccacaagttgcttgtcaagaattccatctacaccatcataatccattgcagcaaggtggatatattccatcaaattttgatgtgggtggatggcagtgatgagttcaaaaattattataccaaaactgtaaatgtcactcttcactgtgaacttgcttgaggaaatgtatgctgggtccatgtagccatatgtacctttaaggccagaattacgaccatcaaagacctcttcctttgagaacccaaaatcagaaaccttagctctcattgagtgatcaagtaatatattcgcggatttcaaatcacgatgaacaacgggtgggactgccccttcatgaaggtattctattccgtgtgaaatatcaccagcaatttgcagcctttcatcccaactcaattccttttcttcaccatataaaaggttttctaaacttccattactcatgaactcataaaccagcataaactgtcctttatctatgcagtatcctaacaaatttacaagattccgatgatgcagtcttcctagcagaagcacctctgtttgaaattctttctccccttgtttagaattgggtccaagcatcttcacagctaccacctctcctgtaggcatcattgctttataaactgtgccaaatgatccttctcccaatgtatttgtgaagttttgtgtggccttttgaatttctttgtatgagtacttcagaatgcctgataccgaagcaaacccatctttattctgatgactccacccaagttgaatgtgagcttttgtgaggattgtgaggatttggtgaccttgaagtggctatggaactggtgagagaagcactgaagtcaatgctagtttctaatccatttgttcgtatagggatagttgttaagctaggctcgttcgcagatcggctaagacgatgagctcgcttcttgtaccaccttatgccaaaatatatgaggcaagcaatcaaaactccaagggccaccccaacagagacacaaacgataactaaatcagcttgatcaaccatcacttgacctctcttgatattcaagcaactcaatcatcttgcataactctctcactagacaggttcacttgtgattcagaaaacagcccccacttttggtaattgtgcttattaagaatgaggtagccagatggagaagagagaaagaaagtgtaaagggaaatgaaaactgaaaaaaaaagtggaagaggtctgagttggaggcttattcatgctttgaagccgaaaacgaaataaaaaggaaaaaatgaggattaatttggtgggtctttcttcccccttctgtcgtcttctc

SEQ ID NO: 3323 - DNA, 910 bp, Glycine max
cggccgctcgaggcggcgggcggattcaaaggggaaaaaaaaaaaaataaaaaaagcgtgttgcacaaactccggctggccccagggccacgccgcgcccggtaaatagtactattttgtgtcaatctcctcatcgatctcattttgtctctgattagagcttcaaaatggataccggtgaaggtaagtcagcacaagcaccaaacatcaatgctccacccactggacaatggactactggtttatttgattgctttgacgacactggaatttgctgttctacctggctctgtccacattccatttttggtcccaatgcggaaattatagaccaaggaagaacatcttctagatctgcaacttacatattttgtggccttagcttggttgggtgggcattcttatattcattcaaattcagaagcaagctaagagccctctacaacttaccagaagaaccatgcggagatctttgcgttcactactgttgtttagtgtttgctattagccaagagcgacgagaacttaaaaaccgtggattggacacctcagtaggttggaagggaaacgaattcgcaatgagaaaagctaacctagtacctccaccagttgtgcccgccatgactcgctagaatttctcatgtcaacgatacaatttggagtagacttgctgttatatacaatctggtgctataagttaggagtttaactttcttagtttttaatatctagtatcagttgctttataatttcctgttgttgagtatgtagccactttgaattcaataaagaagcatcagtttgcaagttacatatatacttttcattctctacaaaatctgtttcttaattagccccctgtggcttcccacggacaacaatgattacctttatatgttgagtgttgcct

SEQ ID NO: 3324 - DNA, 2150 bp, Glycine max
aaaaagtgtatgagcgttaaaactggatacttgaggcaagaaactgttccgctctcagttgaaagtcaacgaagtctcacagcacactcagatctctcttctctttcttcaattccattgttgtttggttcccttcactctcacaatgcgaatcctcgtcctgctctctctcgccacccttctcctcttctcctccttctctcccaccttctgcgaccacctcgccgacgacgaggacctcagcttcctcgacgagccctccgccgcgccggagcacgaccaccactacggcgccgatgactccaatttcggcgactttgaggacttcgaggaggacgacgcggaggcgtacaagcagcccgaggtggacgagaaggacgtcgtcgttttgaaggagaagaacttcaccgacgccgtcaagaacaaccgcttcgtcatggtcgagttctacgcgccctggtgcggccactgccaggccctcgcgccggagtacgccgccgccgcgacggaactcaagggcgaagacgtaattttggcaaaggtggatgccaccgaggagaatgaattggcgcagcagtacgatgttcagggtttccccactgtccacttcttcgttgatggcattcacaagccttataatggccaaaggaccaaagatgctatagtgacgtggattaggaagaagatcggacctggcatatacaacttgactacagtggaggaggctcaacgcattttgaccaacgaaactaaagttgttttgggcttcctcaactctttagttggtcctgagagtgaggagcttgctgctgcttcaaggcttgaggatgatgtcaatttttatcaaactgtgaatcctgatgtggcaaagcttttccatattgaccaagatgttaagcgtccagcattgatcctcattaagaaagaggaggaaaaacttaaccactttgatggaaaattcgagaagtcagcaatagcggactttgtcttctccaacaagcttcctttggtaacaatttttacaagagaaagtgccccatcagtctttgaaaatccaatcaagaaacagttgttgctgtttgcaacttcaaatgattcagagactttggtcccagcatttaaagaagcagcaaagtctttcaagggaaagttgatctttgtatatgtggaaatggataacgaagatgttggaaagcctgtttcagaatactttggtatcagtgggaatgctccaaaagtacttggatacactgggaatgatgatggaaaaaaatttgtgcttgatggagaggtgactactgacaaaattaaggcatttggggaagatttcgttgaagacaagctaaaacctttttacaagtcagatccagttcctgaaagtaatgatggtgatgtgaaaatagtagttgggaataattttgatgaaattgtcttggatgagtcaaaggatgttctcctcgagatttatgctccctggtgtggccattgccaatcactggagccaatatacaacaagcttgcaaaacatcttcgcaatattgattctcttgtaatagccaagatggatggaacaacaaatgagcatcccagggctaagcctgatggattccccactcttctcttcttcccggcaggaaacaagagttttgaccctattactgttgatacagatcgtacagtggtagccttctacaagttcctcaagaaacatgcatcaatcccattcaagctccagaaaccaacctcaacttctgaatccgattccaaggggagctctgatgccaaagagagccagagtagtgatgtgaaggacgaattatgaggagttaagtgatatatttttatttatagaaactatgattcagacagatgatgacatagtgactgaggtaaaaaataccaagttacttctcacccctggtcaataaaaaacaaacggggagtggggggagagagacaaatgcgaggcacacatgtattactattaacttcaatttgtacaacagtgggtaatttagaattttgattttgggttgagacttcaataaattcccccttaaattccacatttttcctccgcacttgtgtaatactccataaacaaagttgcattgcatgtatcgtagatctacttgataagcattaaaaaa

SEQ ID NO: 3325 - DNA, 1414 bp, Glycine max
acgaggttaaacgccctgctttgatcttgctcaagaaagggcaccaccctccgttccattttgatggccaatttgtaaaagctgaaatagctgattttgtaacctccaacaagcttcctttggttacaacttttactagagaaagtgccccggtaatctttgaaagtcaaatcaagaaacaattgttgctgtttgtgacttcaaatgatacagagaagtttgttccagtatttaaagaagcagcaaaaattttcaaggggaagctgatctttgttcatgtggaatcggataatgaagatgtaggaaagcctgttgcagattattttggtatcgcagggaatggtcccaaagtacttgcattcacaggaaatgatgatggaagaaaatttttgcttgatggagaggtgactattgacacaattacggcgtttgggaatgatttccttgaagacaagctaaaacctttcctcaagtcagatccagttcctgaaagcaatgatggtgatgtgaaaatagttgttggtaataactttgatgaaattgtcttggatgagtcaaaggatgttctgcttgagatttatgctccctggtgtggccactgccaagctctggaaccaacatacaacaagcttgctaaacatcttcgcagcattgagtctattgttatagccaagatggacggaacaacaaatgagcatcccagggccaaatctgatggattccccactcttctcttcttcccagcaggaaacaagagttctgaccctattcctgttgatgtggaccgtacagtgaaagacttttataagttcctcaggaaacatgcatcaatcccattccagctccagaaactagcctcaactactaaaaccgccagtgagagttctgatgtcaaggagagccaaagcagcaccaccgaagtgaaggatgaattatgagagataaaggatatttctatttataaagatatatgattcagacagatgataaccgagtgaaaaggtgcttagcaaagaaagtgacacaacgattgggagagaaagccgtctatttttcctcacccttccaaaagacaactagccaagtagagggtagtgaaaaaatgaggtaacctgtgtattagtttcttcaacttttacatgtttgagtattagaattttggttgagactttaattttaaaaatggctcgaaattttattgtatctgcagtcaattttattttcggtgtcagattatttggttatttttgcccttagtaggttaagctagttgataaaaaaattgaactttcattaaagaatgggtttgacatgcaaggcaaattgcatggattgtgttgttatttgcttgtacaaaagttattttaaatatttcacaaactaccgacaaaaggcatttcataaaaaaaaaaaa

SEQ ID NO: 3326 - DNA, 1997 bp, Glycine max
tcttcggtggaagaaatgtgtattggctccgaagctggcatggtggtcaaacatggaatcctaacctaggctaggttgcacagattcactgagtgcatgtcgcatgctgccctgtctctacaaaataagtcagctacgttggcccccccgatctggcaatcgcagccctgatagccgtcagcacaggtctatggtatacacatgaaattcacgccttcctccaaattcttaggcttttcaaatcacttccactcccttctcgcaccctctttctctccgaccccaaagttctcatcttccttttccgccaccatgtccactctttccactcagaacgacaccgtcacccacaaaacgcagcaacctttgcagattgcaaagcgcttagagaaatttcagacaacaatcttcactcaaatgagcttgcttgccatcaaacatggggccataaaccttggtcaaggctttcccaactttgatggtccagaatttgtaaaggaagcagcgattcaggcaatcagggatgggaaaaatcagtatgcccggggttatggagttccagacctgaacattgccattgctgagagatttaagaaagatactggacttgtggtagaccctgaaaaggaaattactgtcacatctggatgcacagaagcaattgctgcaactatgataggattaataaatcctggtgatgaggttattatgtttgctcctttttatgattcttatgaggccactttgtccatggctggtgcaaaagtaaaaggcatcactttgcgccctccagattttgctgtccctcttgaagagttgaagtccaccatctcgaagaatacccgtgccattcttataaacactcctcacaaccctactggaaagatgttcactcgtgaggagctcaattgcattgcatctctttgcattgagaatgatgttctggttttcactgatgaagtttatgacaagttggcttttgatatggagcacatatcgatggcttctttgcctggaatgttcgaaaggacagtgacattgaactccttggggaagacattctccttaacaggatggaagattggttgggccatagcacccccacacttatcatggggagtgcgacaggcacacgctttcctcactttcgcaactgcccatccttttcagtgtgctgctgcagcggctctgagagcaccagactcttactatgtagagctgaagagggattatatggcaaagagagctattttgattgaaggattgaaggctgttggcttcaaggtattcccatccagtggaacctactttgtggttgtagatcacaccccttttggactggaaaatgatgttgcattttgtgaatatctagttaaggaagtgggagtggtggcaatccctaccagtgtgttttacttgaatccagaagagggaaagaatctagtcagatttactttctgcaaggatgaggaaactattaggtctgctgttgagaggatgaaagcaaagcttagaaaatgatctcgatgcattattaagtcattatatgtattggattgaagacatttacctttgtagaagctcaaatgtaggattctaataacttctggttcattgaattggatgccctacactctttagtcactacctactactactacttagctgccatgatatttgtacttccctggaatggatcatcttctgaagggtatatacaatgaccagaaatcatgtctaccagctagtaagtgatgccattcagatttgatttaacttttacatttatgggttgtatttcaatgaaccatgatcattatcttgctgtcttatccccttattgttaaacctcttcttcctttcgtttggatgcaaagaatcaatcatgaagcgggacatgacctctttcttaaaaaaaaaaaaaaaaaattggaatgttatgaatctctaggcgggtagacctcctatgcacccctatcatacgacagcaattgatg

SEQ ID NO: 3327 - DNA, 2622 bp, Glycine max
  misc_feature (2589)..(2589): n is a, c, g, or t
tcgaacccacgcgctccgcacaaccacatcatcgtcttcatcgctctccgacacttgaacctctcatgttgttcctctagaaacctcttccgctccaccgtggaattttcctgcttctgtagcacaaaacacacacacacacaaactctgctttaatattattcacgcctgtccttgtcgtggtgctggttacaagatagggtttgcactttttaatcagaaactagccatgaccaggtacagaaaactactgtgttagttaaaaaacattcatcgattattagcaactttttcagtagtagtgtagccttgtaggtgaactgtgtgttaggattttgaagtttgattaatagccgtgtgtagaaactagaaaggttagtgattgttgtagaatcaatggtaggtgttgatcagagtaatatgaatatgaatcgaaatagtggtgtatttggttcatcatctgggggtgctcttagacccccaaatcgattgaataatcaaatgggtgttgctgagaaccagaaccagaaaccctatggtatgccaccctcacaccctaataccaatatttcaccttcatcaccttatcctcaatttttgggctcccaatcccaatccaattcggtttcccagcgtttgagttctcccaatttgagtcctgcttcgtcccattccaggtctttgtctcagccctcttttttctctctggattccttgcccccattgagtccttccccttataaagaaccttccttttctgactcaatttcgactgatgtgtctgctgaggaaagcttggctaactctcatgcccccttgccgaatcgtggccacgctcttcagcttggccattctcttcctcctcgtaaaggacataggcgctctagcagtgattcccctttaggaattgctgattttattcagtctgcccctcagtttgttccctctaagacttggagcaatcgtgaaaattcggcatctaggggagggaactctggttttgagaagccgattcagttagtgttaaaggaaccgattaaggatatggaccgtgttgatggttttggtggagaacctatggttgggaggaaagaggatgatgcactggatgatttgtttagtgcatatatgaatttggacaatattgatggtctcaatttttctggtatggaagataaggatttggatagcagaactagtggttccaagacagttgagagcagtgataacgaagttgagagtcatgcaaatggcaaagtgactggttctcaaggggctagttcccgctgttctgaagagaggagggaaggagtgaagaggagttctaatggagacgttgcacctggttcccgacaccggagaagtttctcattggacagctccataggaaatttccatattggagatgaatcgcctaagcttcctccttcacaaaaccgatttggtcaacactctcctagcagttcaatagatggtaagacatctgaaacaagcatggagtttggaaatggtgaattcagctcagaggagctaaagaaaataaaggagaacgataaacttgctgaaattgccatggccgatcctaagcgtgctaaaaggattttggctaatcgtctatcagctgctcgctcaaaagagaggaagatgcggtacatttctgaattagagctcaaagtacaaacacttcagacagagacaaccacattgtctactcagtttaccaaattacagatggataattcagagctgaaaagtgagaataatgagtacaaattgaggattcaagccttggaacagcagtcccaactaaaagatgctctgaatgagaccttggatgctgaagtgcggcgtttaagacgcacagttgcagaacttggtggagagtctcttctctcaagtcgcatggctcaacagcttgctattagccaacaagtgttccagttacagcaccagcagcaccctaaccagcttagacatgttcaactggacaatagccattcccaggagcagacacagactcagtcacagtgccacaatggcaaagctactgcctactgattagcactctgataccatgtatgctcaatgtttgtgatatgaatctgaataggatattgcatgaccaaacaagctcaagtaaaaaaaaaaaagactcgattctaagagaggacccgttaacaaaaagaaaagttcaaaagatacaagaggcaaaaggagtctgtgaatgcaattcctatctaataaggttgtagttcgacttgtgcaagcccaaggatatgattatatgaagactcaaaatagtgtataattgttaactttattgcctaagatttgtagttattatttgtaaatctaatgatgatttgagatagatttcattagaatttatgattgattttattaagatttgttttaattgatttttttaaaatttgtttcgtctattaaaatgaagattctatcatttgtttggatagaggaaggaaaagaatgatttgttttctatttttcttcttctatcatttaaactcacaattggttaaatgaattaagagctttcatctggctcatgtaatttaagttagattntgaatgaaatatcaaatatgagtttctccaaaa

SEQ ID NO: 3328 - DNA, 1685 bp, Glycine max
cggtccggcagtcccgcgccacaactctcggaagcaaacgcagcattgggagatagaaagagagagagaaagagagagagagaaagacccttacccttctctatcgctcgctttcctttgacgcttctgacccttgctttgtctgcgtcttccttctttctttctttctttctctgtgtgtcgtaatggctctcccagactcttcttcccgtcgcaactccctgatcccctccttcatctactcctcttcctccaaaacgctccctctccaccacatgctcaacaccgcctccgctgccgccgccgccgctccctccccgccgccggccaatctcgacgccggatcgcgtggcctcatgattccctctcccagcgagtcacgcaagatcgagttgtactcccccgccttctacgccgcctgcaccgccggtggaatcctcagctgtggcctcactcacatgaccgtcactcctcttgacctagtcaagtgtaatatgcagattgaccctgctaagtacaagagcatctcgtctggttttggagttttgcttaaggagcagggattcaggggcttttttcgtggctgggtgcctaccttgcttggttatagtgctcagggtgcttgcaaatttggattttacgagttctttaagaagtactattctgatattgctggcccagagtatgcaagcaagtacaagaccttgatctaccttgctggttcagcatctgctgaggttattgctgatattgctctttgcccatttgaggctgtgaaggtccgtgtccaaactcagcctggttttgcaaggggtttgtctgatgggctcccaaaatttgtcagatctgaaggaaccttagggctgtacaaggggttagtgcctctctggggacgacaaattccatacacaatgatgaagtttgcttcttttgagaccattgttgagctgatctataagcatgccatcccaacaccaaagaatgagtgcaccaaaagcctgcaacttggtgtcagttttgctggtggatatgttgctggtgtactttgtgcaattgtgtctcatcctgctgataatcttgtctcttttctgaacaatgcaaaaggagcaacagttggtgatgcggtgaagaagcttggtttgtggggtctctttacgcgtggtctccccctccgaattgttatgattggaactcttactggagcccaatggggaatatatgatgcattcaaagtcttcgtcggattgccaaccactggtggtcctgctcctgcagctgctccagctcctggttctgagctagcaaaggcatagaatgtccaatgatgacaagcaacaatgttgtacgaaacttagaaagccagtgaatagggaccataaataaatagaggactgctgaatgaagttgcttgagtggaactcaagcttggttggataatattcttttaaagttcagacattgtttccatttttcttatatttaagtattttgaatttttgggaggatggttttgctctcatccttccacttgctgaaaactttgtaggtaggaatgatataattttgcatgttaggttctctacatgccaattgtcaaacgggaacacatttgttttcttgtctgtgcataagcaccgacacatatgcaatgcctagattgagatcatttatactcgctttatttg

SEQ ID NO: 3329 - DNA, 1683 bp, Glycine max
accacgcaacgtgcagccgatggggcacaaaagagagagacccttttccttctctctggctttcctttgacgcttctgacactgctccttttctttctctccgtgtcctaatggctctccccgactcttcttcctgccgcaactccctgatcccctccttcatctactcctcttcctccaaaacgctccctctacaccacatgctcaactccgcctccgccgccgccccctcccagccgccggaaaacctccacgccggatcgcgcggcctcatgattccctctcccagcgagtcacgcaagatcgagatgtactcccctgccttctacgccgcctgcaccgccggtggaatcctcagctgtggcctcactcacatggccgtcactcctcttgacctagtcaagtgtaatatgcagattgatcctgctaagtacaagagcatctcttctgggtttggagttttgcttaaggagcagggattcaggggctttttccgtggctgggtgcctaccttgcttggttacagtgcccagggtgcttgcaaatttggcttctatgagttctttaagaagtactattctgatattgctggcccagagtatgcaagcaagtacaagaccttgatctaccttgctggttcagcatctgctgaggttattgctgatattgctctttgcccatttgaggctgtgaaggtccgtgtccaaactcagccaggttttgcaaggggtttgtctgatgggctcccaaaatttgtcagatccgaaggaaccttagggctgtacaagggattagtgcctctatggggacgacagattccatacacaatgatgaagtttgcttcgtttgagaccattgtagagctgatctataagcacgccatcccaacaccaaagaatgagtgcaccaaaggcctgcaacttggtgtcagttttgctggtggatatattgctggtgtactttgtgcaattgtgtctcatcctgctgataatcttgtctcttttctgaacaatgcaaaaggagcaacagttggtgatgcggtgaagaagcttggcctgtggggtctctttacccgtggtcttcccctccgtattgttatgattggaactcttactggagcccaatggggaatatatgatgcattcaaagtgtctgtcggattgccaaccactggtggtcctgctcctgcagctgctctagcttctgatgctgagcttgcaaaggcatagaatgtccaatgatgacacattcaacagtttgtttacgaaacttagaaagccagtgaatagggacaccataaataaacaggaggattgcagaagttgcttgagtggaactcgagcttggttggataatatattcttttaaagttcagacatcgtgtttccatttttcttaaatttgagtattttgaatttttaggaggatggttttgctcgcatcctcctcttgctgaaaactttgtaggtaggaatgatataattttgcatgctaggttctctacatgccattgtcaaacgggaatactcatttgttttcttgtctgtgcataagcacagacgcatttgcaaatgtctagattgagataatttttactccctttatttgattatttcttttggaaaatgttccttttttgttgtattgcaatcatcagctctcttaaacgacaaaaaaaaaaaa

SEQ ID NO: 3330 - DNA, 968 bp, Glycine max
attcggaaactccaaatacctcactccacagttgaacaacaacaccaacaccaacttctggaatgaacattttcaaatccccactggaccatgatttgaactgtggtggaatattccacgactcagcagaagcatcttattcgtctgaaacaaggagcaccccctcagacgaagaagtgattctagcgtcagcgcggccaaagaagcgagcgggaagaagagtcttcaaggagacaaggcaccccgtctaccgaggagtgcgtcgcaggaacaagaacaagtgggtctgcgagatgcgagtccccaacaacaactcacggatttggctcgggacatacccaacgcccgaaatggccgcacgtgcgcacgacgttgcggcgctcgcgctcaggggaaagtccgcgtgcctcaacttcgcggactccaggtggcggctgacggtgccggcgaccaccaacgcggaggagatacggcgagcggcgggggaggctgctgaggcatttgcagttgcagatggggacgacgttaatattgaacaacagcagagtgtgatggccacgaatgatgatgaagttcaagagcctctccagcaggaggaggttcaagacttgcatgatttgcttttgagtattgcgaatgagcctttgatgtctcctccaccctgtgcaagagatggtagggactggaatgacgtggacatatttgatgatgatgaaatctcactatggaacttctcaatttgacgcgtacgtcattaagagtatgactgtatgcatgtttgatgataagcgaaaacacctttttgtgtatgtgattttctatatttttagggacctgttgtgtgtagataaattaagtagcactcgattgattaagttgagtggagttaaacatattgtagttgtatctatgatttgtttcgtgattaaattttaatgacaagtacagttggcaaattcaaaaaaaaa

SEQ ID NO: 3331 - DNA, 1503 bp, Glycine max
tcagctacgtaggcccccccccccagatcccggtcggcgtcgcgggtcccttgcttctcgacggaaaggagtacactgttcctatggctaccaccgaaggttgcttggtcgctagcaccaacagaggctgcaaggccattcacgtctccggcggagcttcctccatgctcctccgtgacgccatgaccagagcccccgtggttaggttcaactccgccaaacgtgcttctcagcttaagttctacctcgaagaccctctcaatttcgattcccttgccgtcgttttcaacaagtcaagcaggtttgcgagattgcaagatattaaggctgcaatagcagggaagaatttgtacattagattcagttgcactaccggggatgccatggggatgaacatggtctccaaaggagtccaaaacgtgcttacttttctccagagtgattttccagatatggatgttattgggatatctgggaatttctgttcggataagaaggctgcggcggtgaactggattgaggggagagggaaatcggtggtgtgcgaggctgtaattaaggaggaggtggttaagaaagtgttgaagaccagcgtggaggctttggttgagcttaacatgttgaaaaatcttactgggtctgctatggctggtgctcttggtggcttcaatgctcatgctagtaacattgtttctgctgtttacttggccactggacaggaccctgctcagaatgtggagagttctcactgcataaccatgatggaagctgtgaatgatggcaaggaccttcacatctctgttactatgccttcccttgaggtgggtacagttggagggggcacacaactggcgtctcaatcagcatgccttaatttactaggagtaaagggtgcgagcaaagagtccccaggtgcaaattctaggttactagcaaccatagtagcaggttcagtccttgcaggggagctctcactcatgtctgcaattgcagcaggccaacttgttaatagccacatgaaatacaacagatctagcaaggatatcaccaaaattggatcctaattaagctagctagctagcttggacaagaacttaaaattgtatcatcaatagtaaaagcaaagaatgcaatgcaattgtataattattagcttcagaaggacaattaattcgtgttggtgggagatgacctgcaattagagtacttcattaatgtctagtcactttatacgagtgttttatctgcttctgatgtgtacagaacatgaataagactttagtttaattttgctactcttctttttttagtttttggtcttttgatgaaaaacttgttttcaccatatgtatgtgttgtgtgtcggtcccatcatcatctaaagcaaatgtatcaaggatgtggtattttagtcttgtgttttttctttgtcattatttatgtattctccattattttgtcattttgggaagatgaaaaacatcgcccctcatgggtgatttc

SEQ ID NO: 3332 - DNA, 1390 bp, Glycine max
acctagaacatcctaatcgaaaaaaggaagtgaaaaggttgtgtggtgttgtagtcttttcttgtggtttgaagaagccaagccacaagcagaatctccaccgctcattcatttgaaaatcccacgtgctgaatattgttcatttttcttcttctaaaataatggtgtcacttccaaaccattcaggtgtgatctgaaccaacttcactgcacaacacaactacacaagagggtttcaactatctactcctcttcttcacactctctgtgtgggataaagcaatctcaatctcttcttcataatggaaataagtattgcaaggtctcatctcgaaacacagggaatattcttttcaaatatttcaagaacaataggatgggaaagcattaggaaacttccatgtaatgtggctgcccagggttcaagacgggattttcacagattggcctcttcctgtcaagcttttactgcagtgtatcctagaaggtcttttatctgtagagcaaattctatgccaattagtttacaggaatctgcatcatatggagataattctattgaggatgaggatccatatacagacttggaagaggaagctttggcaaaaccacctaccagtgaacagataatgacattgcttgctgacacacagagagcaaaactcactaagaagcttagtgaggccaaccagcaaaaccggttcctaaaaagacagttgaatgtaaaggaggatgcattggtaaaattcaaaagtgaacttgctgtcatggaacttgaaattcaggccttggccagattagcagaagaaatagctcaatgtggtattccagaaggttcaaggaagatcaatggaaagtacattcattctcaccttgttgctagattagaagctgtaaatgaacaactgaaggaacaaataaaggatgttgatgcggcacaatcaaaggaggtttctgtgttttgggttggcatggctgagagtgtgcaagttatgggcacctttgatggctggagccaaggagagcacctttcacctgagtatactggttcttacacaaggttttcaactacattgttgcttaggccaggaaggtatgaaatcaaattcttagtagatggtgaatggcatctgtcaccagagtttcccattattggtgaagggttaaccaaaaataatttgctagttgttgagtaatgaattaatgattcatattttcaatcctagtaactgatacataagcagaaacttgagtgttattttcttaaagttatttaaattttctttctttggtgtataggcacacacacttttttgagtgttttgtgttgctacactatttgatctgcaattatatttttaggttttcagccaaaaaaaaaaaaaaaaaa

SEQ ID NO: 3333 - DNA, 973 bp, Glycine max
  misc_feature (4)..(4): n is a, c, g, or t
cggnaattacccggcgtccaccccccccaagaatcaaaagcttttagttttctatatcactctcaactttactcctcttcaatcagttgcatattctttgctattccaatggccactgttgaggttgtgtcagccaaggttgccctcccagaggacacaaaagaggcatcattgaaggttgacgaggagaagaacacagaagaagttgttgagactccaacaccagaaactgtagtcactgagcaaaccaaggaggaaagtactgaggccccacgacctgcagcttcagaagacaagccctcggttgaagttcagactaaagaggtggcagaggaagttgtgtctgagaccgtcacacaagagccaacagttgagaaacaagaagctgctgagggaacaaaagaaaatgccgatcctgctgagattaagacaccagaagctgcagaagatgttaatgttaaggaagagaaagaagctgaggctgaagctaaggaggaagaggccccggcagagaaaagtgaggagaaggttgagacagaagggtcagctgaaaagaaagaggaggaagtgattgaagaagctgaggctgagaagaaggaggaggtcacagtcacggacacagaggctccaacagagtaaaagaacgtgaagaggggaaatgtgcagtttaagtgagtgtttgagagggtatttttttcttagttgcatcgtgtcttgttgctccatgcatgtcttttctttgtttagtggtctaataaaaagtctagctagggaagggatgagtgatgcgaatgccaaccactcagtacaagaaccacatggcatgtagtctttcaatctgatctatggggtgtgcatggctagctctccatccaatgaattatgttatggtcctttgtgtgattcgatctgcatgcacggtaactttctttgttcaaataaatatatatgtagattattagtatcttatatc

SEQ ID NO: 3334 - DNA, 1888 bp, Glycine max
ctaaagtaacgcgcaagataaggagtcgcagtcacacactacagactacagaggcttccttggcagatcagagggagagagagagtgtgaaagttggaatggcgaaaaaggcagtgttgatcggaataaactacccaggaacaaaggcggagctgagaggatgcataaacgacgtgtggagaatgcatcgctgcctgatcgagcgatacggtttctccgaagacgacatcaccgttttgatcgacacggacgagtcctacacggagcccaccgggaagaacatccggtcagcgctgaccaggctggtccgatcggcggagcccggggacgttctgtttgtgcactacagcggacacggcacgcgcctccccgcggaaaccggagaggacgatgacactggttatgatgaatgcattgttccttctgacatgaaccttatcaccgatgatgatttcagagaatttgttgatggggtccctagaggttgcaggatcacaattgtgtctgattcttgccacagtggtggcctacttgaagaagctaaggagcagataggagagagcacaaagggagaggaggaacaatctagctctggctttggattttcaagttttctacatcggactgtggaagatgccattgagtctcgcggattccatatcccttcagcgttgcgccacaacagaggcagggatgatgatggtgatgaagctcaaaatagggatattgaacttccggatgggggctatgtaaagaacaggtctttgcccctttcaaccctcattgatatactcaagcagaaaactgggaaagatgatatagatgttgggaaactgagacctacccttttcgatgtttttggggaagatgctagtcctaaagtgaaaaagttcatgaatgttatttttaacaaactccaacatggaagtgatgaaagtgggggtggaatattggggctggtgggtggtcttgcccaagagtttctcaagcaaaagcttgatgacaatgatgagggatatgcaaagcctgcactggagacaaaagtggaaagtaagcatgaggcatacgctggaccaaccaaacgcggccttccggatggtgggatattgatgagtggatgtcagactgaccaaacttctgcagatgcaagtcctgcaggcaacgctgccagtgcttatggtgcttttagcaatgcgatacaggctataattgaggagactgatggtgcaatcacaaaccaagaacttgttcaaagggcaagagagaagctgaagaactccggtttcacacaaaaacctggactctattgcagtgatcaccatgttgatgctccttttgtgtgttgatctcttctcatctgatgactgatgcagagaaagagagaataatgtgtgttgtttatagtatgcttgtgtattgctgtatatgtttggacaatcaaattgaagttagtgtgttttcatacagttttcctatgcatcactattatcaggtacggaccattccctccaacattttagcacttctaatgtctccgctgattacagcattatggtgtatttgctgctacttgaccattttgcggggagaccaaactatcagagcaagttctatgcaccaaaccacagacttcggctctgtaaatctgaataaaatggtgtatgtgaaattattataaaatatatggttaagttttgtatttcctttgcaacattcttgcaactttgtaaggattttaatttgttgaacttagttgtagtatacttataatgttatgtttgtttctctttgttgagtagtctagaaaataggagaaattgactgtatttggatgaagaatttcaaaattttaaagaatttgaaatgcttagaatttaattttcttccc

SEQ ID NO: 3335 - DNA, 1729 bp, Glycine max
tcagctacgtaggcccccccccccgttgctgctttcgtcaattctgaggtaaaagaaagtaaagagaaagagagagagagagagagagagagagtcataatcataagtcatacctgatttccattctctctgagagacagtgcgagattggcataatggcgaaaaaagccgttttgatcggaataaactacccgggaacaaaggcggagctgaaaggatgcataaacgacgtgtggaggatgcaccgctgcctcatcgatcgatacggtttctccgaagacgacatcaccgttttgatcgacacggacgaatcctacacggagcccacggggaaaaacattcggtcagcgctgaccagactcatacgatcggcgaggccgggggacgtgctgttcgtgcattacagcggacatggcacgcgcctccccgcggaaaccggagaggatgatgacactggctttgatgaatgcattgttccttctgatatgaacctcatcactgatgatgacttcagagaatttgtagatggggtccctagagaatgtaagctcacaatagtatcagattcttgccatagtggtggcctaattgatggagctaaggagcagataggaactagcacaaagggagaagggcaacaacattctggttctggttctggctttggattatccagttttcttcgtcgctccgttgaggacgccatcgaatctcgtggagttcatatcccttcagcattgcgccatcatagacacaagcatgaacatgaagctgatgatgatagggacattgagcttccacatgtggaccatggctatgtaaagaataggtcattgccactttctaccatcatagacatactcaagcagaaaactgggaaaaatgatatagatgttgggaaattgagactctcgctttatgacatatttggggaagatgctagccctaaagtgaagaagttcatgaaggttatcttgaataaactccaacaaggggatggtggaagtggaaaacaaggtggaatcttggggctagtgggtagtcttgcccaagagtttctcaagcaaaagattgattcaagtgatgatggtggttatgcaaaacctgccatggagacaaaggttgaaagcaaatatgaggcatatgctggaacaagttcagccaagccgcgcctttcagacggcggaattctgatgagtggttgtcaaacagaccaaacttctgctgatgcaagtccagcaggtaactctgccagtgcttatggagcttttagcaatgcaatacaggctgtgattgaggagagtgatggtgctgtcacaaatcaagagattgttttgaaggcaagggagaagctgaagaggggaggtttcaaacaacggccaggactttactgcagtgatgaccatgttgatggtccttttgtgtgctgatgagtgatgagttctgtcatctggtgcagaaaatcagagttatttgtgttgtgtatgatgatatatgcttgtgtattacttgttttggacaattaatgcttgctcaaaagcaatatttactttgactgtgatttcagttattattcattagtgacagaataataactaaaaatgagactgcacaattgtgttgccatagagaatgagtgagtccctcctctaaaaatgtttccgacagttgttgcttcatgcattgggaaacatgtttcatgcctccatatggaatgttttattctttc

SEQ ID NO: 3336 - DNA, 1175 bp, Glycine max
  misc_feature (1)..(1): n is a, c, g, or t
natgtacttgctttcagaccattttcaggcactgcatttatgtacttgctttcagaccattttcagtgcattacatttttgtagagaggtataatgaatgacatgcttccaatctggactcttgtgttgaatttttctattttatatgaataaattacaggacaaagtattatgggtgtcctgatgatgatgcatttcgattcatgtcaagtatctatagtcactctcattacaatatgtcttcaagcaaggaatttctcggtggaattacaaatggagccgcatggtaccctctatatgggggaatgcaagattggaactatatacatgctggctgttttgagttgaccctggaaatttgtgataataaatggcccagtgctgctgagcttcctattctttggagatacaacaaaatgagcatgcttaatcttgtggcaagcctggtgaagacaggagtgcatggaagaatatattcttcaggcgatggaaggccattaccaggctctataactgtcagtcggaataaattacacagttagagctggaaaaacttttggtgactatcatcgcatactcgccccaagagataaatatgaagtagtggcaaccatgccgggctacaaatcaaagaatacaactatttggttggacgaaggacctgtgacattggattttgttcttgaccccgaagtcagtgtcaaagggagtgtactacaaaatatctataaatgtgactgtaataatgaaagcaaacaagaatttgttcattttctttggggagctcacttggaagttttctttgttgtgattgttattttaggatttttacttttattatttcatagaagagcaaaagtcaaaatttccacaagcagacagtcagcgggggcaaaaagaactgttgaggtctaagtttattgatatgtaacccactaaggtcagtctatgggtagggagttacgatagatgcataaggatttaagtttgattttctttgttgtcattatacaccaaaaaaggttattgatatcttgtttgcattaaattttgttgtatattaaggtgggtagagaagtcaaacctttttccatgtaaagatttcttcagatggctaacgtgaattcatattattgaatgctgttgttaaaagaaattaaaactatttccatatg

SEQ ID NO: 3337 - DNA, 1246 bp, Glycine max
taataatacccctaagatggctttatagttggtctttcgaggccgctcagctactaggcccccccccccactaacataacaacccttttttctccttcacattctccattccacaacatcaaggttctgatcatgtcggggaagaggccccggccaatgatcggaaagttgtcggagttgttggtctcgagaggccgcacggtggcacttttggacaccactggaagcccaagaggcccattagacatgaagatgatgcaatcaccaagaggcttaaaaaattatgatcttggtggcgttggtcttggaattgtggtggctcttgataaatccaataacgaggttgctgcacgtgaagttttgcccaaacacaccgtttgcacctccaatttgaaccggtccggcccaattccggttcactacaccaaaaacccagatgaatttgatgtcgaggaatacacctatgtgacatgccgcgtacctaacaaaacgttcactaaggtatactatgatggtggtgaaggtgatattattcggagacaaaacaacaacaacaacaacaaaaacaacgttgtagttctcagaagaaccgaaccacaacctttgattgagcccgaatcatcgtaccccacatcgagttttctcagttcatgtcacttatgtggaaagaaactccacggcaaagacatatacatgtacagaggagagaaagcgttttgtagccctgagtgtcgttcgagtcaaataacgatggacgaaaggaaggaacggtgtagttcagaagcttcaaggtctgtggaaatgtcaagttcgccatatacaagggaacaaatattttcaactgggattcttgcgctttagcgtcactctctgggtgcggaaataaattaattaaccagagattgatgatgctactacgtacatacataataatatacggctatactattattcaagacagcttgatttgaaacaaaaacaaaagttttgatcggctaaaggggtagatattctgatgtattttttgttttatcaagaagccaaagagttatgaattttcagatctcagttgcacagattaaaaaaaaaaaatttccaaactagctctctctggttaaaatacagactaaagcttcaatttcctaattagaaattacatgaataattgtattaatccttccaatatttggaccaccaaattagatatccaaatgtttgaaactttaaatgatagtcataattcatc

SEQ ID NO: 3338 - DNA, 729 bp, Glycine max
  misc_feature (695)..(695): n is a, c, g, or t
  misc_feature (713)..(714): n is a, c, g, or t
  misc_feature (721)..(721): n is a, c, g, or t
  misc_feature (725)..(725): n is a, c, g, or t
gatatttggaagcttgacattgccagagttaaccataacagggaatgcagtagctgatgagaacttcaggtcatttcttgtcaaagttttgccaacactcaagtggctagatgatgaagaattatcttgacctatcctggcttttagggatacagttttatcttaccggtataatgtgaaaatatacttcctcatccagaagattgttcattcattgggtaaacttgtccttgacaaaggacatttttaacccatttatcatttggtcctaactggcataagatcctagattgctactatggattgtgctaataaaagtgggtaacatattttactgtctatacaaaataccaaatgacgtccttgatgagttatacaagctccttgttcaaatctcagtgcttcgccttagtcatgaagaaggtgcagtttattttacaagtcttaaacatgtacccgatctttgatattagccttgttaggcttgaatttctctcaaattatggtgcactgacacattaaggtgtagtccattctctcgtgaaggacaaaagtatcatttgtgtaatcaatctctctcatgtttccttgatcttaaccttgtattttttaacattgcatgcttgaaacagtgattgtaacttgttgccttgttaaaatagagaagacaactagacatgttttggaaaaaatanaaaaaaaacacaaagggnncggccgntctntaga

SEQ ID NO: 3339 - DNA, 981 bp, Glycine max
  misc_feature (9)..(10): n is a, c, g, or t
  misc_feature (12)..(12): n is a, c, g, or t
  misc_feature (962)..(962): n is a, c, g, or t
  misc_feature (966)..(966): n is a, c, g, or t
  misc_feature (969)..(969): n is a, c, g, or t
  misc_feature (974)..(974): n is a, c, g, or t
acaccgatnntntgcataaattacgagaagaacccaccagacacactattaaaagaaggaagtggtgaaacacggaaggaagatgggaagcgaagaagtgaagctgttgagcttttttgcgagtccatttggcaaaagggttgaatgggcattgaaactgaagggtgtggagtatgagtacatagaacaagatatcttcaacaagactagtctccttctccagttgaacccggttcacaagaaggttccggttcttgttcatgcccacaaacccatcgctgagtcattcgtcatcgttgaatacgttgatgaaacatggaagcagtatccactgttgcctcgagacccttatcaaagagcacttgctcgattttgggctaatttcgctgagcaaaagcttttagatgcagcatggattggtatgtatagcagcggggatgagcagcaaaacgctgtgaaagtagccagagaagcaatagagaagatagaagaagagattaaggggaagaaatattttggaggggagaatataggataccttgacattgcacttggatggatctcttactggcttcctatttgggaggaagttggatcgatacagataattgacccattgaaatttccagccatcactgcatggatcaccaattttcttagccatcctgtgatcaaggacaacttgcccccaagagacaagatgcttgtttacttccacagtcgcagaactgcgctttcttcaacttttcagggctgattcaagttttaatttggatctatatgtttcttatggtccatgtgatataataagaatatcagggaatcatactagctaagtctctgtgctattattttctgagattgtggattttatttagactttttcttattaggtagagaagtttgtttggttaagttttcaataataaattatgtcttttttattaaaaaaaaaaaaaaangaanaanaaaanaaaaaaa

SEQ ID NO: 3340 - DNA, 2549 bp, Glycine max
gacaaacataatttccagaggtagaggcgtggagttgagtgtaattattccaaaaccttgtttcacttactagctaagaagcaaaaggagagcaccgcctcgcactgcgcatgcagagaaaaacctaaagtggcggaagatgacggaggtggcgagatcagtggtgcacgacgttttggggcaaagagtggtcgacgtggaccagccaatcgtcgattatatcgtcaacgtcctcgccgacgatgacttcgatttcggcctcgacggcgaaggcgccttcgatgccctcggcgagctcctcgtcgccgccgactgcgtcgacgatttctcccactgccgctccgtatgcagcacgctgtgcgacaagttcgggaagcacggtttggtgaaggagaagcccgctgtgcgaagccttgcggcgccgtttcgaatgaacgagggaatggacgacgtccaagctcccaagaagaagcccgagcccgtcgacggccctcttctatccgaacgcgatcgcttaaagctcgagcggcgaaaacgcaaggatgaacgccagcgagaggcacaataccaaatacacttggcggagatggaggcagcacgagcggggatgccggtggtgtgtgtgaggcatgatagcagtgggggaccaaacgtgaaggacattcatatggagaatttcaacatctctgttggtggtcgtgatctcattgtggatggttgtgtgacactttcatttggaaggcattatggtttggtaggaaggaatgggacggggaaaaccactttccttaggcacatggctatgcatgccattgatggtgttccaaggaattgccagatactgcatgtggagcaagaggtgacaggtgatgctacgactgctttgcagtgtgtcctcaatgctgacattgagaggactcagcttctcgatgaagaaactcagttagttgcccaacagagggaattggaggacaaaaacgaaaaaggtgatttgaatggagtggtcggtagggatgacatttcaaaaaggcttgaggaaatatataagaggcttgaactcattgatgctgattctgccgaggcacgagcagcatcaatactagcgggtttgagtttcactcctgagatgcagaagaaggcaacaaaaacattttctggaggatggcggatgcgaatagctcttgctcgtgcattgtttatagagcctgatatattgcttcttgatgagcctacgaatcatcttgatcttcatgctgttagagaatttttaaacacggtggttactgatataattcacttacaaaaccaaaagctgactacttataaagggaattatgatgcttttgagaagactcgagaagaacaagttaaaaaccacttatggcttgaatcgtacttggttaaatggccaaaaacatttatcgttgtttctcatgcgcaaaaagcattagaggcaaacgaacgtgctagatctcatatgcagaccttcattgacaagttccgttataatgcgaagagggcatcacttgttcaatctagaatcaaggctttggatcgaatgggccatgtggatgaaattgttaatgatcctgactacaaatttgacttccccactccagatgatagacctggtgcaccaataataagtttcagtgatgcatcatttggttatcctgggggccccattctgtttaagaatttgaactttgggattgatctcgacagtcgtattgcaatggttggaccaaatggtattggcaaatcaactatacttaagttaattgctggggatcttcagcccagttctgggactgtcttccgttctgctaaggttcgtatagcagtgttcagtcagcaccatgttgatggactggacttatcctcaaaccctcttctgtatatgatgcgctgctatcctggagttccagaacagaagcttcgagctcacttaggttcttttggtgtaaccggaaatcttgcactgcagccaatgtatactttgtcaggtggtcagaaaagcagggttgcctttgcaaagataactttcaagaagccacacataatattgcttgatgaaccatccaatcatctggatttggatgctgttgaggcgcttattcaaggtcttgtgctgttccaaggaggcattctcatggtgagtcacgatgagcacctcatctctggaagcgtggaggaactatgggttgtatccgaaggaagagtggcaccattccatggcacattccaagattataagaagatactccaatcatcctagaaatgtcaaattttgtggatgtatactggaaagacccctggatcacattttttttgctgttcctctcagctgtcatacaattttgcaatttatccaaacctatgtatttcaaggcaattttatgattttatgaacacgaggttaaattaactattaaataattttgtaataaccttataattataagatgtataatttatactttcactactttaaaaaaaaaaagtccgccttttagcaatgtggttacccggtgaactctttcggaggc

SEQ ID NO: 3341 - DNA, 1016 bp, Glycine max
ggaagaaagggacggggaaaaccactttccttaggcacatggctatgcatgccattgatggtgttccgaggaattgtcagatactgcatgtggagcaagaggtgacaggtgatgctacgactgctttgcagtgtgtcctcaactctgacattgagaggactcagcttctagatgaagaagctcagttagttgcccaacagagggaattcgaggacaaaatcgaaaagggtgattcgaatggagtggtcggtagggatgacatttcaaaaaggcttgaggaaatatataagaggcttgaacacattgatgctgattcggccgaggcacgagcagcatcaatactagcaggtttgagtttcactcctgagatgcagaagaaggcaacaaaaacattttctggaggatggcggatgcgaatagctcttgctcgtgcattgtttatagagcctgatatattgcttcttgatgagcctacgaatcatcttgatcttcatgctgtcttatggcttgaatcgtacttggttaaatggccaaaaacatttatcgttgtttctcatgctagagaatttttaaacacggtggttactgatataattcacttacaaaaccaaaagctgactacttataaagggaattatgatacttttgagaagactcgagaagaacaagttaaaaaccagcaaaaagcattagaggcaaacgaacgtgctagatctcatatgcagaccttcattgacaagttccgttataatgcgaagagggcatcacttgttcaatctagaatcaaggctttggatcgaatgggccatgtggatgaaattgttaatgatcctgactacaaatttgacttccccactccagatgatagacctggtgcaccaataataagtttcagtgatgcatcatttggttatcctgggggccccattctgtttaagaatttgaactttgggattgatctcgacagtcgaattgcaatggttggaccaaagggtattggcaaatcaactatactt

SEQ ID NO: 3342 - DNA, 1644 bp, Glycine max
ttgggtaccgggccccccctcgagtcagctacctaggccccccccccccagcataaggcagggtgagtaggagtacaatttacaaacttgcttttctttcttttcccactcccaattcacaatagatgcgtgtcccatcaacaaaacttacattttcctcacacgtgtcgctttctcctctctcctttctgctccttttatcgtctcctcgcttctttttctcccccctggcctccactctctaccctcaactacgaccacaccaccgttatggacgaggacgagcaactcgaacgattcgactcggagttcgcctccacgagttccatttcctccaccctcagcaccgacgatttccgcaacctcaccagctccggcgacatttcctccatcagcagcggctccggcgagattcctcccgtcgcggtcctcgcgcctccgtttctctaccgcgaggggtccaatgacgtcgagacggcgccggcgcccagggagaagtgcgtgggaaggagtaacaagggagtgagctgggggcacacttctgtgattgggagaaggaaagagatggaggacgccatcgccgttattccgggattcatgtctcgcacgtgcgatcgcgtcgggggttgtacggctcccggttctagatcctccggcgagatcgctccgcttcatttcttcggcgtttacgacggccacggtggctctcaggtggctaagttttgtgcgaagcggatgcacgatgttatagcagaggaatcgctccgagaagacggccagagggggtggcgctcgatggcacagaagatgggaaactgtatttgctaacagttttgagaggactgacaatgaaatcctatcagacgcagttgcgcctgaaatggtaggatctactgcctctgtggtgattctatctggttgccaaattattacatccaactgcggcgactcaagggtagttctttaccgcaggacacaaactatccccttgacagtggatcagaagccggatagacaagatgaacttttgagaattgaaggaggaggaggaagagtcataaactggaatggagctagggtgtttggtgttcttgccatgtccagggccataggtgatcggtacttgagaccctggattattccggtgccagagataactttcacagcaagaaccgatgaggatgagtgcttagttttggctagtgatggactctgggatgtaatgaccaatgaagaggttggagaagtagcacgccacattcttagaaggcgccgcagatcattgtcaatggaggaagcatctcctgcacaagttgttgccgacagcttgactgaaattgcattaggtagaaatagtaaagataacatttcaatcatagttgttgatctgaaatcaaagagaaaacgtcagcaaaggcctcctttaatttcctaagaaactgattctcttcaatatttttcaatcttgagaagggcaaagagacggtaatgaaactgtagagtggatctataaagcaaaccctctttatttctttttgatgacccattggtgcttggtatcacttcagcttgtgtttctcctaaccttctgtacagagttgattggcaaaaagaatctgcttcatgaaaaaaaaaaaaaaaaaa

SEQ ID NO: 3343 - DNA, 2474 bp, Glycine max
gtctcacacttcttacaccacacacacaaacccttctcttcatttctcactctcgggaacattttttttttttaaagaaaaggggaaaaattgaaagaaaagaaaaagggacaaggagtgagaataacatgaacaaacaactcaggctgctctgtctctttatcctcttctccttatttctctgtgtaagcacagcttttcctcactgtcactgttccaagtctcgatttttccaattgttttattcctgccattgccagttctgaaatgggtgtgtgttcattcgatgcaggtgggtttcgccggcgccggagacacggcggagaaaaacccgttcaccccaaaagccttcgcgattcggtattgggacaaagagatccgcagcgggttaccgaagccaccgtttcttgtatcaaaggcgtcgccgctgagcgcggcggaggcggcggcgttcttaaagctcgtctccgggaactcgctctccacgcggctgccggaattctgcgccgccgcgaagctcctctgcttcccggaggtggggccccgcctcgagaaacacgacaaagacgcgaactttgctgtttacagagacaataacttcaccaactccgctccgggtcgacctggtggactcgactcgtttaaaaactactccgagggagagaatattccggtgaacgatttccggcgatatagccgcgactccgccgggcataaagatggttttctgagctacggcacgaacggcaacgtggtgcagcagagcttccatacctacgccgccggagccaccggcggcaccggcgagttcaagcactacgccgacgaaaccaacgtcccgaacctcggcttcacctcctattccgacaacgccaacggcagaacccaatctttctcttcctactccgaaaacggcaatgccggcgagcagacattcacctcgtacggcaaaaatggcaacggcccgaccaacgtgttcgcctcgtacggaacagagtccaacgttgtcgggtccgggttctccaactacgctgagaccgccaacgccgccaacgacaccttcaaaggctacggcatagacatgaacaaccccaccaacacgttctccaactacgctgccggcggcaacggcgccgtcgagagattctccagctaccgcgacaaggccaacgtcggcgccgactccttcacctcgtacgccaaagccgccaacgccgcagacatcggattctcgaactacggcaagtccttcaacgagggaaccgacacgttcaccacgtacgctaaatcctcggatggcgaaacaaaagtagggttcacttcctacggcgtaaacaacactttcaaggattacgagaaaaagggtaccactgtctcattcgccaggtacaccaacattagcacgaccctctcagtttcagcttcatcagtcagtggcagtttggtaaataagtgggtggagccgggtaagttttttcgtgagaagatgatgaaggaaggaaccgtgatgccgatgcctgacataaaagataaaatgccggaaaggtcgtttttgccccggagcattttatcgaaattaccgttttcggtttcgaagattgatgagttgaagcaagtcttcaaggcttctgataacggctccatggagaagatgatgaaggactcgttggaggagtgcgagcgtgcaccgagtagcggcgagacaaaacgctgcgttgggtcgctcgaggacatgatcgattttgcaacctctgttttgggtcgaaacgtcgccgttcggactacccagaacgtgaacgggtccaagaagagtgtggtggtggggcccgtcaggggaatcaacggtggtaaagtcacccaatcagtgtcgtgccaccagagcctgttcccttacctgctctactactgccacgcggttcctaaggttcgggtctacgaagcggatcttctcgacccgaaaacaaaagctaagattaaccgcggagttgccatctgccacttggatacatcggattggagccccacacacggagcgtttctctcgctcgggtcggtcccgggtcggatcgaggtgtgccactggatctttgagaacgacatggcgtggaccattgcggattgagaaaagagaccatcagaataaggaataagagtcacttctataggaaattaaagttaaattaaaacaaaaaaagaacttctgttctgctaagaaaatttagcagtctcgagaattatttgtttttaatttaaaaattaagtaatgtaattttattttttttggatagaaaagtttaagtcatgttttttttactacatttggaagaagaaggtatattattatttactcatgatcattgttgttattattagcttggcaagatgtatgtaaatgtctttcctaatgattggaggcaatgaatcaagatttgatgctcttataataaaatgttattaattgctttttatcgctc

SEQ ID NO: 3344 - DNA, 2306 bp, Glycine max
ggcccccggccctcaaatctctcatacttcttacgccacatacacccttctcttcatttctcactctccggaacatttttttttttaaaaaagaaaaggggaaaatagaaagaaaagaaaaagggagaaggagtgagaataacatgaacaaacaactcacgctgctctgtctctttatcctcttctcatttctcagtgtgggtttcgccggcgccggagacgcggcggagaaaaaccctttcaccccaaaagccttcgccattcgttattgggacaaagagatccgcagcgggttggcgaagccacagtttcttctgtctaaggcgtcgccgctaaacgcggcggaggcggcggcgtttgtgaagcttgcctccggcaacgcgctctccacgcggctgccggaattctgcgccgccgcgaagctcctctgcttcccggaggtggggtccagcctcgagaagcacgacaaagacgcaaactttgcagtgtacagagacaagaacttcaccaactatggaacgggtcgacccggtgggctcgactcgttcaaaaactactccgagggagagaatattccagtgaacgatttccggcgatacagccgtgactccgccggccacaaggacgggtttttaagctacggcacgagcggcaacgtcgtgcagcagagcttccacacctacgccgccggagcccccggcggtgccgggcgagttcaagcgctacgccgacgaaaccaacgttcccaaccttggtttcacctcctactccgacaacgccaacggcagaacccaatccttcacttcctactccgaaaacggcaatgccggcgagcagacattcacctcgtacggcaaaaacggcaacggcccgaccaacgtgttcacctcgtatggaacagagtccaacgttgtcgggtcagggttctccaactacgtcgagaccgccaacgccgccaacgacaccttcaagggatacggcgtcgacatgaacaaccccaccaacacgttctccaactacgccggcggcggcaacggcgccgtcgagagattctccagctaccgcgataaggccaacgtcggagccgactccttcacctcgtacgccaagtccgccaacgccgccgacatcggattctccaactacggcaagtccttcaacgagggaaccgacacgttcacctcgtacgccaaatcctcggacggcgaaacaaaagtaggtttcacttcctacggcgtaaacaacaccttcaaggattacgagaaaaagggtaccactgtttccttcgccagatacaccaacattagcacaactctctcagcttcagcttcagcttcatcactcagtggcagcttcgtaaataaatgggtggagccgggtaaattttttcgtgaaaagatgttgaaggaagggacggggatgcccatgcctgacataataagataaattgccagaaaggtcgtttttgccccggagtattctatcgaaattaccggtttcgggttcgaaaattgatgagttgaagcaagttttcaaggcttcggataacggttccatggagaagatgatgcgtgattccttggcggagtgcgagcgtgcaccgagccgcggcgagacaaaacgctgcgttgggtcgctcgaggacatgatcgactttgccacctctgttttgggccgaaacgtcgccgttcggactacccagaacgtgaacgggtccaagaagagtgtggtggtggggcccgttaggggaatcaacggtggtaaagtcacccaatccgtgtcgtgccaccagagcctgttcccttatctgctttactactgccacgcggttcctaaggttcgggtctacgaagcggatcttctcgacccgaaaacaaaggtcaagattaaccgtggtgttgccatctgtcacttggacacctccgattggagcccgacccatggagcattcatctcgttagggtcgggtccaggtcggattgaggtgtgccactggatcttcgagaatgacgtggcgtggaccattgtgaagtgagaaaagagaacatcagaataaggaaggaagaagagttacctctataggaaattaaagttaaatttttaaaaaaaagcacttctgttctgctaagaaaatttagcagtctcgagaattatttgtttttaatttgaaaattaagtaatgtatttttatttttttttgatagaaaagtttaagttatggttttttttactaaatttggaagaaggtatattaatttatatgaatatgatgatgattattattatttactcaaaaaaaaaaaaaa

SEQ ID NO: 3345 - DNA, 1346 bp, Glycine max
acgagggaagctggtccggtcggagcgccgtttccggcgacggaagccccaacgggtactcgcgtgtcccttcaccctcgacgacgccgtttgacgaaaacaacgacccctgggaagtgatttacgcagccgcccctcgcgtccccccgcgcgtccggaacaacaacaacaaccgagttccagcacagtatgattggcacaataatagaaggttactcactcatcattgccctaaccggagtttcaatcaggtcgcgagagcgaagcaacagtgtggttcggattggggaaggccaaccaagcctaataactatttggttcagcagcaacaggttaaggttcagagtagagcgcgtgagtttgggcacgagagtgtgaatgcgaaatgcactcgtccatctgcgtggccccctttgcaagttcagcagcaaaacaaccgggtacagtttggcggatccgggtctagggttggtggatcttctgtgaaaagggggtgtggtggaactggggtgttcttgcctcgccattatgaaaccccttctgagccacgtcgccagaaaactggttgtgcgcctgctttgttaccagcaaaggtggttcatgctttgaacttgaatattgatgacttgaatgggactacccaaccgcgtttctcgaatgcttttgctacggattatgaagcgattttagcgaggagaaacgcgcttctcatgcaggagcagcagcagaggttaataagtgttcggcgagaagaggcagccaactatgaaattcgccttcctcaagagtggacttactgacaaaagaaggcacaaatttctcctaaagaatttgaagaaatttggaatagtctattttggttgttttgacagaagatgaaattgaagaatgtgtttgggctagtgtttaggttcaaataaaacatctagtttttctagggagaaaaaaaggttgcattgcagcttttgggacctggttttagtggaaggaaatagtgagaggatagtagttttaggcaaggcttctttttcctttttttaccctttttatagtaatattataagttgttgtaagaagataggataagcgggtcgttttcatttgccttatggttatggtgatgacactgatggggctaaagcgcaaggtatggtatggttcaacgttggccaagtttcaagtccaagtgttgaaaattggtcgattacccatgtgtgcctttactgaaaatccctgctcattattatggtatatagtttgtaataagttatacttacaatgtaataaaattagctcttctatcaaaaaaaaaaaaaaaaaactcgagactagttctctcctggtgc

SEQ ID NO: 3346 - DNA, 961 bp, Glycine max
tcgagtcagctacgtaggccccccccccccaactactcatgtgggaaaccaactaaggaataccctttcaaaatggcttcttctgtgtcatccatggtttctaccaccctcctcctaattaccatctgcacactgtcctcacttctgtcagttgcatctgcagcaacagaggagggacgaacaaggccattcaaaagggtctatgcctttggagactctttcacagacactggcaacacccaaaatgcagaaggtccaagtggctttggccatgtttcaaactctccctatggaaccactttctttaaccactccaccaataggtactcagatggtaggcttgtgattgattttgtggctgaagcactttcactgccttacttgcccccctaccgtcatagcaaaggcaatgacacttttggtgttaactttgctgttgctggttccacagccataaaccatttgttctttgtcaagcacaacctctcccttgacatcactcctcagtccatccaaacccagatgatatggttcaacaggtacctggagagccaggactgccaagagtcaaagtgcaatgattttgatgacactctattttggtttggggagattggagtcaatgactatgcctacactcttggatctaccgtctcagatgaaaccataaggaagcttgcaatcagcagtgtctcaggagctttacagacattgcttgagaagggtgccaagtacctagtagtgcagggtttgcctctaactgggtgcttgacattgtccatgtacctggctccaccagatgatagggatgacattggatgtgtgaaaagtgtcaacaaccaaagctactaccacaaccttgtgctgaagacaaatacaagaatcaggaacagaccctcaactgcatacttatgctgatactatgagctaccgactgcatgaaaatcaaccaatcgatcaa

SEQ ID NO: 3347 - DNA, 1209 bp, Glycine max
ggctcgagagtttttgtaccaaaccttacctcttcttctctcatcatattaatttccactgattccatcttcactttctcccttcgttgggggttaaatccatagccacaacttcccttttgcttctttcattcatttctacggccaccaaactcaatcatagtttatggaagctgtagaggcaaaagcttcatctgggtatggcaagcctccatgggtatttagaggcagtgcctggtatcaactccatcttgtgaaggcagagaaagctcgagcttacattccaaaagaattcaaattggttgaagcttttggatacactcttggtggtttctttctagcaagttatgaggacagtccagttggtgtctttgatgagcttgttgtaattgcaggacttgtatggaaccgcccaacatcctgcgcatgggcaacgagggtgtacgtgaacaacgatgaggcctgttatcacggaagaaaggaggtgggacttccaagtcagatggctaggttttccaagacaattacagcaatctcaagacaacagagggagataaagagtggatttcttaatcggattggaattggtgccaagtactctactccaaaggatcccctgaatgttcaagtaaccaaaatcaaatgtcttgatgcagaagacacttgtaatattaatatcagtctcaccagtcctgtgtctgctttgggcattggccactggatgggcccaacaacgagaatgtcacttccaagttttagtggagctacagagtataatcctaacctcctcaaatactcttgccagattgaatgcagggtgcaagcattgaagcccttgaaggtttcaggagcattcccttcaacaaatgatgacactgaactgtcattagaagattatggaagcagcagccatgtagctaaagatcacgaaaatgatgcacagaatttcagcacttgtgtgatgttatcaaaacccatattagcgctcaagtttaatcaaatgttgatgcaggttgaagctccccttgtgctttcccaatgctcaaattctttagaaactacagttagttctgttccataggcaatatttgttaggggataagtgtgtatgctgaatacttaatccatcatgtaatcagttccagttctaataatgaagtatcagtagagttatattatcatattctattatcaagtaaaaaaaaaaaa

SEQ ID NO: 3348 - DNA, 702 bp, Glycine max
agcccaattagtttatgtgtcttcaggcgagagtgcagcgcctctacagctagcgtccggtggggtgcgattcgtgagctgcacctctctctctcgataatcagaggcaacttatttgctttggaattgatggaggccaaattttttcgctttctcaagattgtgggtgttggatacaaagccagagctgaagctgcagggcgtctattgtatctcaaattgggatacagtcatgaggtggaactagccgtccctcctgctgtccgagttttctgcttcaaaaacaatgtaatttgctgtactggaatagacaaacaaagggtgcaccagtttgctgctactgttcggacttgtaagccacctgaagtttacaaaggcaagggcataatgtatgttgatgaagtgatcaagaaaaaacaaggaaagaaatctaaataatcatataatctaagttgatttcatgaagtttaggactcagatgtacattggctacatcttgctgctcaatgattcactctaggtctctctctagccttcaaacagtttcagttttggaatccttgaacatagcattatggtaatcatgtatgctttgaaataacaataatttcttgcttctgtatgattgatatgtacctttcagcgtttatcttactttgcttgagatattttgtctaaggatataatattattttgaaagcc

SEQ ID NO: 3349 - DNA, 930 bp, Glycine max
tcagccccgttggcccccccccccccacgggtttgtgagaacaagaaaaagaggcgcaagatgagtggtagggtttctgggaaggtgaagtggttcaatgatcagaaggggtttggattcataagccctgacgatggcagcgacgatctcttcgttcaccaatctcagatcaaatctgacggtttccgaagcctcgccgaaggagagtccgttgagttcgccattgaatctgaatctgacggacgcgcgaaggctgttgatgtcactggccccgacggcgccagcgtccagggaaccagacgaggcggtgatggtggccgaagctatggcgggggacgaggaggtggtggaggtggctacggtggaggcggtggctacggtggtggtggtggctacggtggaggcggtggttacggtggtggtggaagaggcggtggaggcggtgcttgctacaactgtggtgaatcgggacatctggctagggattgcagtggaggcggtggtggggacaggtacggaggaggtggtggtggtggcagatatggaggcggcggtggcgggaggtacgttggtggtggaggcggcggcggcggcggaggaagctgctacagctgtggagagtctgggcattttgccagagattgcccatcaagtgctcgttgaatttactgttagggttgtttatgttttgcggattgttttaagtttttactttaatatgtcttagggattttaatggtttctgtccaaactatgggttcttatgagtagatgtgtgggatttttcttttttggttatttaaatgaagggtttctgtgttatcgttacaatctgcaaactaaaatctgtttgaacttacattttgctataatgaatcgtatgattgctatcaaataaaaaaaaaaaaaactttgaagattgaattgtat

SEQ ID NO: 3350 - DNA, 982 bp, Glycine max
  misc_feature (968)..(974): n is a, c, g, or t
  misc_feature (977)..(977): n is a, c, g, or t
gaacagagtgaaaagaagggtttgtaagagaaagaaaaaagaggcgcaagatgagtggtagggtttctgggaaggtgaagtggttcaacgatcagaaggggtttggattcataacccctgacgatggcagcgaggaactcttcgttcaccaatctcagatcaaatctgacggtttccgaagcctagctgaaggagagtccgttgagttcgctattgaatctgaatctgacggacgcgccaaggctgttgatgtcactggccccgacggcgccagcgtccagggaaccagacgcggcggtgatggtggccgaagctatggcgggggacgaggaggtggtggaggtggatatggcggtggcggcggctacggtggtggcggtggctatggtggaggcggtggctacggtggtggtgggcgaggcggtggtggcggggcttgctacaactgcggtgaatcgggacatctggctagggactgcagccaaggaggcggtggagacaggtacggcggaggcggtggtggtggtggcaggtatggaggcggcggtggcgggaggtacggtggtggtggaggaggtggtggcggcggaggaagctgctacagctgtggagagtctgggcatttcgccagagattgcccatcaagtgctcgttgaaattactgttatggtggtttatgttatgcggattgttttaagtttttactttaacatgttgtagggattttaatggtttctgtcaaagctgtggcttcttataagtagatgcgtgagatttttcttttttttggttatttaaatgaaagtttctgtgttatcgttacaatctgcaaacaaaatctgtttggacctacattttgctataatgaattggatgattgttatcaaaaaaaaaaaaaaaaaaaaaaaaaaaaaaaaaaaaaaaaaaaaaaaaaaaaaaaaaaaaaaaaaaaaaaaaaaaaaaaaaannnnnnnaanaaaaa

SEQ ID NO: 3351 - DNA, 1508 bp, Glycine max
tcgagtcagctacgtaggccccccccgcattatcaaaccgtgttgaacctcaggtccgaagtagagtgaaacaagatctatttcaagcaaagaaggaagctcctcttgttgtagctaaattcttgtaagttactcggattcgttctcacaatccagtttgtaccatcaaaatccgattttcaagtgcttatctataccaagataacatcgaaatggagtgtgcaataaaacaagatgttactgaactaattggaaacactccaatggtgtatctgaacaaagttgtggaaggttgtgtggcccgcattgctgccaagttggaatcaatggaaccctgctcaagtgtcaaagacaggttagcattaagtatgatcaaggatgctgaggacaagggactgattacaccaggaaagactgtgcttgttgagactactagtggaaacactggcattggattggcattcattgcagcacttaaaggttataggctaatcctagcaatgccggcttcaatgagtctcgagcggagagttgtgctccgtgctttgggagctgagctgcatctcactgatcctgctaagggcttcaaaggtagtcttcaaaaggctgaggagctactgagggagacacctgatgctttcatgcctcatcaatttgaaaatcctgcaaacccaaagattcactatgaaaccactggccctgagatatggacagattctggaggtaaagttgatgcccttgtagcaggtataggaactggtggtacaataacaggtgcagggaaattcctcaaggagagaaacccaaaaatcaaggtttatggagtggaaccagttgaaagtgcagtcttgagtggaggccagccaggagggcatctgattcagggaattggtgctggtattgttcctgctgtgctggatgtgaatctgcttgatgaaattcttcaggtatcaagtgaggaagctatagaaactgctaagctgttagccctgaaagaaggtttgctggtagggatttcatctggagcagcagcagcagcagcaattaaactgggaaagaggccagaaaatgctgacaaactcatcgttgtggtgttccctagttctggagagcgctacctctcttctccattgtttgagtccattagacaagaggcagaacagatgacatttgattagagaactgtcactagccctgtttctggttaagagattttgattcacttgtgagttttatttacgaaattcaagtaataaagaattgtgctgataactcattttgcatccgtactgtgtagaactgtaaagtagggactagctctgttcatatattggcacataggacatttcaaaatcatggctaagttggttgcatgaggtgatttcttattaatcaaaatatttgtagcattagctaagtttacaaagagatcatgattatgtaatggtcctggttaaagtccttttgcttaaacaaattatgttgtccaatagcaaaaaaaaaaaaaa

SEQ ID NO: 3352 - DNA, 2465 bp, Glycine max
  misc_feature (2004)..(2004): n is a, c, g, or t
ccacgcgtccgcgcataggaggctggcatggtacttggtagggggtaggcgcgtcatttcactaatattctgagcaattgagagcttgagttgaagaaagcaccataaataaatcttcttcttcttcttcttcttcttcgcttccatcaaatcaaatctcacactctctcacttacagccatgtccatggattctatggccacttccatcggagtctcggtccccgtgctccgcttcctcctctgcttcgccgccaccgtgcccctcagcttcctctgccgcttcctcccccgcggcctccccaagcacctctactcctccgtcgtcggcgtcgccctctcctacctctccttcggcttctcctccaacctccacttcctcgtccccatgttccttggctacgcctccatgctcctctatcgtcctcgatgcggcatcctcaccttcttcctcggatttggctacctcattggctgccacgtgtattacatgagcggtgatgcatggaaggaaggtggcatcgatgccactggggctttaatggttttgacgctcaaggttatctcctgtgcggttaattacaacgatggtttgctgaaagaggagggtttgcgtgaggctcagaagaagtaccgtttgatcaagttgccttccttgattgagtacattggttactgcctctgctgtggaagtcactttgctggtcctgtttatgaaatgaaggattatcttgattggactgaaggaaaagggatttggggcactgaagcaaaagggccatcgccatcaccttacggggcgacccttcgggctcttctccaagctggtttttgcatggccatgtatttaaacctcgtgcctcattttcctttgtccaaatttactgatcctacctaccatgaatggtgtttctggaaaaaattaagttaccagtatatgtctggctttactgcacgctggaagtattatttcatctggtcaatttcagaagcttctattatcatctctggcctggggttcagtggctggactgattcgtccccacctaagcctcgctgggaccgggccaaaaatgttgatataattggtgttgagtttgcaaagagtgcagttactattccagctgtgtggaatattcaagtcagcacctggcttcgtcattatgtttacgaaaggcttattcagactgggaagaaaccaggtttctttcagctacttgccactcagaccgttagtgccgtttggcatggcttgtaccctggatacataatattctttgttcagtcagcattaatgattgctggttccagagtgatttacagatggcagcaagccgtgcctccgacaatgtctctggttaagaatgtgttggtgtttacaaattttgcttatacacttttggttctaaattactcctgtgttggtttcatggtgttaagtctgcatgaaactcttgcatcatatggaagcgtgtattacattggaactattgttcctgttgttatgattcttcttggtaaagtaattaaacctggaaagcctgccagatctaaagctcggaaggaacagtgaggtgacaatgctgtttattcttgttggaatttttgaaatcagattaggataatgcggcagaagggtttctagttcccacaggttttctggccctggttttcaacattgttgtaacagctcctttggtcttgaaaatggttgggcgctttcatactcttggctttagcattgaattgtatttctgtgataagaaacttcttgttggcaggtttgataaaagctgttattgaagaaatgttagaaacatttgtatttctgtgatttctctctactttcagctctctctattcctaacaattactgcaagaggctctagttttcaaatcttaaccatagacaaatatgcagatactctgatgtatggtaacataactgtaccatctagttttcaactctccaagtcactttcttgtcattttgtacaaaaatggntacccgccttgttggccataaagtatgggcactgtccctaagaaaattttggatcggaactgcctatcataggtcttaagaatttcatttttattctgaaatgcacctatctgaaaatgtctgggacagtgcttacctaactgacctaaggatatctaaattgtgtaggtttagaatgtcctgaaaatgtcttttgccttaagactgagatatacgataaggtgaggtagtattctactgcatgtgtggcctctaattgcctatttcaagtatttctagaccatgccaataagaaaaaaaggaacagggagggagagcgagaagttcccataacgttaagtttgttgaaggtgaaataaaattattcaatccattaatcaaagtaccattctcgtcttaatgtattcctgacgtatcaactggtttctccggtattttcgttctttaaatgtcactgatgc

SEQ ID NO: 3353 - DNA, 1615 bp, Glycine max
gcacgattacgaaatagttccgtcttcctctgcacgttttcttccagcttcattcatgaccattgactgaagttattagtagctgttaacgggttgggtcgggtcgcgaagccggggatgttggttagatagaaagggttgacccgacagaagtggcgttgtgaagtgcactgcgtttgcctttgcgtttaattgaagatcagaaatgcaaatgtcaagattcacccaattccgagctctactccgcggcaccaccagccaccagcgctcccctctccgccaccccgccgtcgccgattcttcatttgcatcaaaaccctcagtctctaatgcctccgcgttccgcccctcttcgccggtgttccacccgcaacaacgcctcggcaatagcacctttcgattcttctcctccaatttcgacaaaggatttgcgcagaaggtgtttgataagcctgcggcagcagtgacttcggccttttcgcggtaccgcgaggcaattgggttgcaaatcgaggcgttcttcaagaggaatactctgtttctttggggcgccggtggagttgtgctctgcgccgttctatggaggatccttttcgggatcgccaacctcttcgttggactctccgaaggcatggctaagtatggcttccttgccctttcatctgctatcgttgcttttactggcttgtatattcgcacgaggctcacaatcaacccggataaagtttatagaatggccatgacaaaacttaacacgtcagctgggattcttgaagttatgggtgctcctctttctggaactgatttgagagcctatgtcatgtcagggggtgggctcactgtaaagaagttcaagccaagtgttaggggccgacggtgttttctcattttccccataagagggtctgagaaaaagggtctagtcagtgttgaagtcaagaaaaagaagggccagtatcatatgaagctgctggctgttgatgttcccatggcttctggtccagaccagcggttgtttctaattggggatgaagaagagtacagggtcggtggggggctaatatctgagcttagagaccctgtagtgagagcaatggcagcaaccaaggaatttgatgatcttgatgagattgaggaagaggaagatgctgaaagagaacggcaagaggctgaaagaaaggagcgtgaagagattgaaaagctggaaaagagtagtggcacctagtggataggctttcgtgatgtttctcttgtgatttattctcttgttgattacaggaggttgatgttgtttaaacacaatttgttttgtatcagtttcgagttttccctagatttagaaacccttgtaccacaaatggccaagtttatctgaaaataaagctgacagggatcaacgtgcattggaatggactcggcgtttgttggtttcgatgttgccttgtctcaagtggattatccttgtctacgatatagttactatctgccacggttgtatgtcatttcagggacctaaattttgacccacctgcccccttccccttccccttgaatggaaagttgtttctagtattcttcaaaaaaaaaaaaattttcaaaggattctcagtgtgcc

SEQ ID NO: 3354 - DNA, 1684 bp, Glycine max
ttcggctgcgagaagacgacagaaggggggagaggtgaattcgcagacgaacattccgctcccatcgcatctgtaacaatggaagcgcgccatgcaactcttggtcgacgaacgttggaggaaattcggcaaaagagggccgcggagagattgagtaaaacctcttcgggaccagatctcacgcaggttcccagcacctccgagattgcgggaatgagcaagtccgagagcgcaaataagctctctgagacagatcttagtgctctattgtctcaattgaaaggactgcaaaagaagaacacggagttggaggaagaaaacacaaaaattagtttaaagcttcaaacgatggaaattgataatgagacaatgcacaagcaattaaatgatgtggaacaaaatacagtgccatctctaaggaaagctctgagggatgtcgcaatggagaaagatgctgcagttgttgcacgggaggacctttcagcacagcttcgtaccctgaagaaacgtcttaaggaagcagaagatgagcaatatcgtgccgaggaagatgcagcagcgttgagagcagaattgaactcaattcagcaacaagcaatgactaatacagttagcacaatttcatcatttggtaatccacccgatcattttcaaattcaaagattacaaaaggagctagatgatttaaaactggaactgcagcgagaatcactttgagcaggaacaattagcaaaagagcaagcctgcattgcctcactgatatctgaaaagcaggagttggaagagaaactcatgtccatatctagagagcctgcagaagcctcagataaagctgctcacaaagcattttctttggaagacaagcagaaacttgataggcagttgtatgatatggctttagccattgagaggttggaaagcagtaggcagaaacttctaatggagattgactcacaatctacagaaatagagaggctttttgaggaaaattctagtctctcaaattcataccaagaggcaattggagcagcagcgagatgggaaaaccaggtgatggattgtcttaagcaaaatgaagagcttcgtgggattctagataatttgagaatggaacaggctaggggtttgccagactcttctaaaaatggggcacatgagattgcttccttggcatctatgaagggccaacttgtgacagaacagagcagagcagaggcgctatctgcagaagtcatgcagctttctgctcaacttgaacaagtcaaacaagcatatgatggtcttgcacgcttctataggccagtgctgcgcaacattgaaagcaatctcataaaaatgaagcaagacaactcgttggctgtacgatgatggtaatgagcagtttcatgatgatattccggttgtaattgtgaagcccttctttgaagacatttccaatgcccacagaattgtttttaaccatttgatgttattagtttggtaaaagtggaacgagatggctcagtaactggtggtaatggttcttcattcttgagctgttttgttttgtggtaatactctgcataagaagcccttgttatacccaaacgtgaatttgtaaaacttgtcattctttatactaatattaatttgtaaacaagcacaaccattttatggagtatgattttgatgatagttttgtac

SEQ ID NO: 3355 - DNA, 934 bp, Glycine max
tcgagcagctacgtaggccccccccccccccctttggcctggtgtttagcactttcaccttccttctctttctctgtgatttgctctccgctcttctccaacttccttcactgtcaaactcgtttttgtgttgttgttgttttccgaagagagaaaaaaccatgtggtacttgtgcgttttcttccacaggttattggattacagaaaacccgaagtggaatctctggcacaactcttcggagcaaccgaggacccccaaaacggcgacgtttcctcgcaattgcaatggaaactccctcatcactaccacgcagattcccctttccatttcgtcaacctcccttcggaacaactcgctcgaaacatcgctacccgaagcatacttgtgaaggggatgtatgagctgtggggtgaagggagtagctatgaggagttgaaggagtctgtgttgagttaccctgacgaaaggaagttgccgtacttggattctgatagcactttcaagattaccgtcgatagctttgggaaggtcattagcttggaggaccaaaaggagctcattcaagggctctcttatatccctttcaagggacgagtaaagttgaaaaacccagatcacaacttctggcttatagaagttgataattatggaggtaataatggtcttcctccaattgtacaaaagagagtcttctttggtcgcgaagttggtggggcagataggaagcttttacccacatatcagttgaaaagccgtacttatcttgggccaacagccatggatgctgaaattgcttttctaatggccaatcaagcactagctacttctgggaaactagtttatgaccccttttgtggaaactggagtattcttgttgcaacagctcattttggagcaataaccatgggtgctggcattgacattagggtagt

SEQ ID NO: 3356 - DNA, 1098 bp, Glycine max
cacaaagtagcagcttctactttcacaaatcaatgacaattgttttctttgtgggaatgacaaatgccactgccatgcagggatcaattctcgagaatgttcgttggaaagcacttggagttcttttcactgtctgggtccttatacttgcctccgagattgcaaaagttggtagatatgaaatcagcaattccaatccggaatttccattttgtttttcttcctacgtggagtagtgatataattatgcctttgttttcaaacagagtcacacaacaacttgttcagtggaatattgggtacttaatctcattgcaggtccctgtggcattaggagcgacttcatatcaagctgtgcttctgtacacagggaagagagtgatagcatccaaaggagatcaacgaactcaatggcgagcgcaccagttagttctgtattgttcttgtggcatatgcgctggtatagttggtggcttgcttggtcttggtggaggttttattttgggaccccttttcttggagctaggaatccctcctcaggtgtcaagtgctacagccacttttgccatgacattttcagcatctatgtcagtggtggaatattaccttctaaaacggtttcctattccttatactctttactttgtggctgtatccacttttgcggcctttgttggacaagttttagtgagaaagctggttgccatactagggagagcatctctgatcattttcatcctctccggcaccatttttgttagtgcaatatcactaggtggtgtgggcatatcaaacatgatccaaaaaattgcaaataaagagtacatggggtttgaaaacctttgtacctactcagcctagatattagaattcggattacagattcaatttcaaggactatataattggcatttttttcagttcgaattgtttttttatcaagtcagaattttaagcagtgttatgtcaataattttaagtgatgaaaattaattcagcgcttagtttttttttgtcaagcatgtctgtatcttggacagtttcttaaatatataatcaatgatatctctctttgcttccaaaaaaaaaaaaaaaaaa

SEQ ID NO: 3357 - DNA, 994 bp, Glycine max
aatcaatggttaagttagcacacgattcttagcttctccgagtgtgtctgtctgtctgtctgcggaatccaaaccctccaaggtttctttcctgtgctcctccgcgtgtggtgcaccctacgcacgaggtttttgtagctaccaccagttcaccaccgtgagcaattcacatcgcatgtttcgaacgctttgtgctgcaaccgaaatcgaaaatcacagaaagaggagaagagagggagcatggctgatctctttacgtggctcatctccttcttcatccttattgccttaattgtactcgtcatttaccagttaatgtgcctggcagacctagaatttgattatataaacccatatgattcctcatctcgaataaacaaagtggtattgcctgaatatattatagtaggtgtcctatgcggcttctaccttgtaacagggcattggataatgtcattgatctgtgctccttacctctactacaatgtgagattgtacagacaaggaaaccatctggttgatgtcacagagatattcaacttgctccctaaggaaaagaagcaaaggcttttcaaactcttctatcttgtttttatccttttcctatccttattttggatgatctacacatctttggatgaccatgatgattgatggcttgttttgtgcagcagtcgtgtgtggttgagggcagctaattacgtcccatattcgatgctattttggactaacgtgcaaaatttaggtttgggttgctagcttgtttccattgttggacatggacaataggatatgaggttctgttctgtatctgtacaatacatttcaaaacagttttttgcctgtttgattcatgcttgttgtagcaaatgcaaattgcaaaattcttaaccttgtaatttacacgtacgcttaaaatttaagttatttaaaaacacatgattattacaaaaatcagttattttcttaataaatcaggtaaattttatgtatt

SEQ ID NO: 3358 - DNA, 1685 bp, Glycine max
  misc_feature (1576)..(1576): n is a, c, g, or t
  misc_feature (1580)..(1580): n is a, c, g, or t
  misc_feature (1582)..(1582): n is a, c, g, or t
  misc_feature (1632)..(1632): n is a, c, g, or t
  misc_feature (1656)..(1656): n is a, c, g, or t
ctatatttccatgattttgttgccaagtgcctaacaaaagtcagctacgtaggcccccccccctctatggctgcgtagcacaaattctttgaaaagtggaaaagtggatctgctgcaatgttgccaaaactagaaaaggcgaggcaaatcagggcttcaatggctttgcaggcacaagctcttccagctgcatcagaagatcaggagttagattcaaaactaaatgatgaatatggaggtactgttccatccagacctcataacatcggtgttgagggggctgctgatctctcttcacatggcactacaaggaagctacataaagtggaagatgtagacacgagtgaaggcaactttggcactgttataatccatggagatgaattacataagaccacacaagatgcagattctgcagcttctgtatctgctctgaccagtggctcaggagacagattggctgactctgggattgagagtcagaaagttggtattatgaacactgcctcttttagaggatatagtgctactaccaatactgttcaatcgtctttaccttatgttagtaattcaactgagcagagcctcaaaactagaggtactcatcgagcacaagctggaattggtggtgatataagcaatagcatattcaagaatgaaacagtcagccgtaaagcatttgctttacaagataagctttggtccatttatgctgctggtaatacagtgcccatcccgttcttaagggcaacagatatatcaccaattgctctcctgtcagacaatgtacttggtggcatacaacaggatactggtggaactggaacagtggaagcattgcaagagctttttagtggtgacggacagtccaaaaagggccggagaggactaaatgagatgcctcttcctccaagcatttaccaaagattgacatcaagttctactctaatgaatttggcgcaggctttagcttaccataaaatgtgttacgaagatatgccgctgcaggagctgcaagcgacccaggagcagcggactattcaaaatctatctgacacccttcgaaccattcttcggttgtaggtaggtatcttattgtgactattttaaatcccctacctttaatggctgcaaagatcacaaaacccattttcttttctcgtgtcattggtttatatattcatacaggtcaatggcatggttgtgtaactagtacccaatgttttgctggttgctttaactatttttcctagttttgttaagtaaaccctagaagatttagagttttgtaagctgccacatatttgtatgtaaatagaatatgcatgactttcgactattgctgcatttgcgcacacgttgtagtcactagtggatttgttgttaaaaaagaagcctaaaactttaagaagtatagaaaacctggaaaccttattgatagacactaaagggtttcttctatgacgaagtctacagtgcgattttcctttcccaccgtgcgtaagtttgtgagaatgtagttagaatgttgtgggtcgtagattaactattaaaaaaaaaaggagaccgttcattnttgntntttttttcctattttttttcttctttccccatttgctctttattcttcgntcttctccataaacttaaaccgancagacggatagtgaatccagaaatgcaaa

SEQ ID NO: 3359 - DNA, 1733 bp, Glycine max
gtttgcatcagaaaaagacacgccccaccccttccctttcctccgcttgcgccatctttctctctctctctctgacgcttcaaatactcgtcagctacgtaggccccccccccattctcttctcttctctgagactctctccctatcgtcaccgtcactgccatggaggatgccaatcttcagaggctccattgctccgtcaaaaactacgattggggtctcccaggtcgcgtctccgaggttgccagactccacgcgctcaattccgcgtctgaattccacgcggaggacccttacgccgagctttggatgggtacccatgattcaggcccttcctttttagcttcctccaatggaaatgagaatggtgtctccctcaaggcttggatttccgagaaccctgatgtgctcggtcacaaggttcttcacaaatggggttctgatctccctttcttgttcaaggtgctgtctgtggggaaggccttgtcaattcaagctcacccggataaggagttggcaaggactctgcataagttgcaccctgatttgtataaagatggcaatcacaaacctgagatggcccttgcactcactaattttgaggctctctgtggattcatcactctcaaggagctcaagggtgtgcttcatactgttcctgaaattgtggaactggttggtgctacaaatacaaacctggtcttacaaactaatgatcaggatggtgaagagaaggtcaaacctgttctgcaggcagtgttcaccgacctcatgtcagctagtaaagatagagtaacggatgcagtaaacagattgaaaagccgtctgcttaaggagagtgaggtgaggcagttgacagataaagagcagctggtgctgcggttggaaaaacaatacccagctgatgttggtgtcatagcagccttctttcttaaccatgtaaaactcaatcctggtgaagctttgttcctcggggcaaatgaaccacatgcatatttatctggggagtgtgttgaatgcatggcaacttctgacaatgttgtgcgagctggcctaactcccaaacacagagatgtccagaccctttgctccatgctcacatacaaacagggttctcctgaaatcttgcgtggagtatctgttaatccatatgtaaataaatatactccaccatttgaggaatttgagattgatcgttgcattcttcctcaaggggaaacagtggtgttcccagcagttccaggtccttcgatctttttggtcacagttggtgaaggaacaatgaatacaggattacccaaaggacatgtggtcaccgaaggtgatgttctttttgccgcagctaacactgagattagtgttactagtgcatccgagttgaatttgtacagaacaggggtaaatagcaagttttttcaagcttcataagtttcaacaggggatcacccaaatttttattttttttggtcatatgctgttgggagtcaaataatgcaactatctgttgcgtgtaatagaagcagtttaatgtacatgcaagagtaaaaaaaatcacttagtatattgagtcttagagaaatgttcattatagagaggtgggttgtcaattgtcattcgtttgttgttcataataatgttcgttaaaagccttttcggatggtattcctattaatcattttatatcaataaatgaagggcctacaattattttttacaaaaaaaaaaaaaaaaaa

SEQ ID NO: 3360 - DNA, 1672 bp, Glycine max
gagagagagagagagagagagagagagagagagagagagagagagagagagagagagagagattcagctacgtagggccccccccccgcttgaaggaggctctagtgtggtctgcaactatgagcaaggattatctaatcatactttctctccttctttccacggtgcttgcaactgcaagttcttcttcttcttcttcctccctctatcttgggaagggcttctcccatcgcaaattgtctcccagttatcacattcacaaaaccattgacgaatcctatgcagttatcttcgatgctggtagcacgggaagccgtgtacatgtctatcgttttaaccaacaattagatctccttcgcattggccaagaccttgagttgtttgtcaagactatgccaggtttaagtgcttacgctgagaatccacaagatgctgcagaatctcttattccacttttggaggaagcagaagctgctgttcctcaggagtttcaccccaggacgccagttaaacttggagcaactgcaggtttaaggcaattggaaggggatgcttctgataggatattgcaggcggtcagtgacatgctcaagaacagaagcacactgaacgttggggccgatgcagtttcagtgttgagtggaaaccaagaaggagcttatcaatgggtaacaattaactatctactgggaaacttgggaaagcattattcagaaactgttgcagtagttgatcttggaggtggatctgttcaaatggcttatgcagtctcagagacagatgctgcgaaggctccacgagcaccggacggagtggaatcatacataacggagatgttccttaggggaaagaaatattacctctatgtacacagttacttgcgatacggtatgctagcagctcgtgcagaggctttaaaggttcgtgattctgaaaatccttgtattttggctggctttgatgggtattacgtatatggaggagtgcagtataaggccaaagctcccccttctggctcaagcttcagccaatgccaaaatgttgttgttgaagcactccatgttaatgcaacatgctcttacaaggattgcactttcggagggatatggaatggtggtgggggagctggagaaaacaacttttttattgcctcatttttctttgaagttgccgatgaggctggttttgttgatccaaacgcccccaatgccaaagttcgtcctgtggattttgagaatgcagcaaaggttgcctgtaacacagaattaaaggatctcaaatccattttccctcgtgttaaggatggagacgttccttatatatgcttagatcttgtatacgaatatacattgctcgttgatggatttggcatagatccgcagcaagagattacgttggtgaggcaagttgagtatcaagattctctcgtggaagcagcatggccactaggcagtgccatagaagccatatcatcattacctaaatttgagaaattaatgtatttcatttaagctttaaaacgaggagccatatgtatgtgtggaatgaactccatcactcttaaataaaaatcgttttgttcctttttttctaaaaaaaaaaaaaaaaaaaaaaaaaaaaaaaaaaaaaaaaaaaaaaaaaaaaaaaaaaaaaaaaaaaaaaaaaaaaaaaa

SEQ ID NO: 3361 - DNA, 755 bp, Glycine max
tcagctacgtaggcccccccccccccgcttccgccgagcttagtagaagagaaaaggaggagcaggaggcatcaccgttaccaaacatggtgaaagggcgacaaggagagcgtgttagactttacgtcaggggttcaatacttggatacaagaggtccaagtcaaatcaatacccaaacacctcattaatccagattgagaatgtaaacactaaggaagaagttgcgtggtactgtgggaagcgtatggcttacatttacaaagccaaggtaaagaaggacggaagccactatcgctgcatttggggtaaggtcaccaggcctcatggtaacagtggtatagttcgtgctaagttcaagtccaatctgccgcccagatcaatgggagcaagggttagagtcttcatgtatccaagcaatatatgaggttctcaggactcgtgagtcgtggagcttgttttgtcagggtatttgataggaatttatattatgtttttcttttttggtagctcccgagcagggtagtatccttgtttaggatgaagagaatgtatcgcatgttttttctttactctcactgccatggttattagggaggattatgagtctcaatttcattaacggattttttttccttactttaccgtccccgtaaaattgaaattgaagaactcgagctcgtagttctcaggaaaaattggatacaaaattgagcttttcatctccaccaaaaaaaaaaaaaaaaaaaaaaaaaaa

SEQ ID NO: 3362 - DNA, 762 bp, Glycine max
ttccccactgcttccgccgagcttaggagaatagaagaggagcaggaggcatcaccattgccacaatggttaaaggtcgccaaggagaacgtgtaagactctacgtcaggggttcaattcttggatacaagaggtccaagtcaaatcaatacccaagcacctccctaatccagattgagaatgtaaactctaaggaagaagttgcgtggtactgtgggaagcgcatggcttacatctacaaagcgaaggtaaagaagaacggaagccactatcgctgcatttggggtaaggtcaccaggcctcatggtaacagtggtatagttcgagctaagttcaagtccaatctgccacctaggtcaatgggtgcaagggttagagtattcatgtatccaagcaatatatgagattctcaggattcgtgtgtcgtggggctagtttgtcagagtatttgaaaggaatttgcattttgcgagttaaatttgtgtttttcttttttggtagctcttgagcagaatagtatctttgtttaggatgaagaatgaaccccgtgtttttctttattctcactgccatggttattaaggaggattgagtctcaattttataaacggatttttctcctcaaaaaaaaaaaaaaaaaatccccttaaaattcgaattgaagaattcgagctcgctgttctcgggataaaaaaattggaacttttcatctccatcttgaggaaatgtgtctattggattaattgttattgggatggagtt

SEQ ID NO: 3363 - DNA, 1919 bp, Glycine max
gactggagcatctgataatcttcgtgaatgggggaaggacaaagtccggtttgatcgaaatggtcctgctgccataaccaagtatcaagctgataacgctattccggggaagaatgatggatgcaatccgatcggtccaacaccacacaccttgcaagagctgcaagacacaaccttgggttctctcttgtcagcactcatgcagcactgtgatcctcctcagaggcgttatccattggagaagggcgttcctccaccatggtggcctaatggtaatgaagagtggtggccccaaataggtttgcctaaagatcaaggtcctccaccttacaagaaacctcatgacctgaagaaggcatggaaagttggtgttctgactgcagttatcaagcacatgtctcctgatatcgcaaaaattcgcaagctcgtgaggcaatccaaatgccttcaagataagatgacagccaaggaaagtgcaacctggcttgcaataatcaatcaagaggaggccttggcgcgtgagctttacccggattattgccctccattagcagcctcttctggaggtagtggatctatggtaatcaatgattgcaatgagtatgatgttgaagggggtgacgatgagccaaactttgacgtcgaagatcgcaaacctgagaatcttcatgcaccgaatcttgggatggacagaatgatgggaagactgccttctttcccaatcaagggagaggctgttacaaatttggatttcattcggaagaggaagatctctggtgacttcaacatgataatggatcagaaaatttacacatgcgaacaacctcagtgcccttacagtgaaattcaccatggttttgctgacagaaattctagggacaaccatcgattgagttgtccttatagaggcagtgcttcaacagattatggaggttcaaattttcatgttaatgaggcaaagccggtcatattcccccaacagtcctttgttcaaccaaaacctactactactccgtctgttgttaacttggttccatctgttattgatctaaccggactcggagttccagaagatggcaagaaaatgatcactgaccttatgtcaatctatgatacaaatgttcaaagcaacaaaaatctaagttccagtaaccatgtatctgcagaaaatccaaaccttcctcagccaggcattcagcagcaacatgacaacttctttcgcagtcaaggaatcagtatggaaggaaacttctttgaagaagccaacatgtccaacaacaatcatcacatgtttgcaagggaggaaggtcaatttgaccggttcaaagctttgaatgcaccaccctttgagaccaatcacaacaacaacaacttccatttgatgtttggttccccttgtgatttggcatcctttgatttcaaggaggatatgcaaggaggagtagtagggatggatgctcttcagaaacagcctgatatctctatttggtaccagtgaaaatgacagcttaaagcttgaaacctcctcatcatcttcatctatcatggactcttttattttccttctaaaagggttggcacccccctaatcatgtgaagttcctttggccgaaaaagggtttcactgcaattttcttcacatgtaatcctgtaggcccagtagaactaaataatattttaagcttggcaggtctagtatgtgttatatacataataataataatatataataaaaacttgcatgttacccattatatgtagctttgtgaattgtgattgtgtgtttctatatcagtgtagccatcttgttgttacttaaatattattactcttatgtaagactgtgacataaataagatttgatgaagttctcttctaaattttagttaagaggttaaaaaataaaattgttgttggat

SEQ ID NO: 3364 - DNA, 809 bp, Glycine max
tacggctgcgagaagaccacagcgggacactcacaaaacaatataacttaattgccttaaggaacgttcgagaccacagaggtttctctagtcttcttctgtggagagcttgttttctcttgttcattcatctcacttccaattaaggaacaagctttccaccaatttgaatcaccaatggctcgctctttctccaacctcaaggttctctctgctcttgtcgccgacggattctccaacactctcaccaggcgtgggtacgcagtagcgacacaaagcgcaacaagaggaggagcagcctccatcagcggcaagtcaggggaagacaaggtactaggaggaggtgctgaaaaggtttcgtgggtcccagaccctgtcactggttactacaaaccggagaacatcaaagagattgatgttgctgagctgagagccacggttttgggcaaaaaattcaaccactaggctctacttaatttcaataattaacctttttggtctcacgtgaatatgttatatgatatatgaagttcacagaaccttcggggattattcagcatggggtttttttcttgtatttctctcttgagaatttggactagcatatgaccaaattaatgtttactagtgtgattggatctcccgttgaaaactcaaagctatgcttctgttgaattcactttcgccgaataataggagtattttgaatctttctatgcaaaatatccaaatgtacacgctctattaagtatgaaccctccttttccgttttcaaaaaaaaaaaaaaaaaaaactcgcgactagttctc

SEQ ID NO: 3365 - DNA, 863 bp, Glycine max
aaacacaagtaacggtgtgccgcttgaccgaaccgacgcgcttctctcttttcctatcttgagactcttcttcttctatttctcattaccgttccgtttcgcgagtgattgaagctagttactagttacagaagaagatgttgcagctactctacactgcgattttcttcgaaatgattctcattctcacccttgtcttcaagaccccactgagaaaactcgtcatcgtttccctcgatcgtgtgaagcgcggtcgcggccccgtggtggtttccaccgtgggcgccacattggtggtggttctcgcgtcgagcctctacagcatggccaagatccagcaacgcaccctcgaggccggcatagtcaaccccaccgaccaagtcctcatgtccaagcacatgctcgaggcttctctcatggggtttgtactgttcctctctctgatgattgatagactgcaccattacataagagagcttcggtcactcaggaagaccatggaagccattaagaaacaaagccgaagttttgaagatggtaaaaatggcaatttagaggaacataaagcattgaatgaagaaattaccacattgaagtctaaaattaagaaactagaatctgaatgtgaggcaaaaggaaatcaagctaagactttggaaactgaagtagaggctcttaaaaagcaatccgaggggttccttatggaatatgatcgcctcttggaagacaatcagagtcttacgagtcagttgcagggccttgatcaaaaccctttgtacaaagagtatgggattgttgaaatatctaaaaaaacagctttttatccttttgatttaactctctttttgagtgttacatacttt

SEQ ID NO: 3366 - DNA, 1822 bp, Glycine max
gtcgtcagctacgtaggcccccgtaagcgtttctgcatacgagatgttctagtaccttcttcgttcacctcttctcttcaccgtcgcaacacaacgctgagctgcagcaattcaccaccgcagagttttccaagtccaatctcacttcacttatcgccagggtttaatctgaatatctttcgcgttgccactgaggttgttatctttcttccaaaatggcgacggtgatgcagaagatcaaagatatcgaagatgagatggcaaagacccaaaaaaacaaggctactgctcatcatctgggcttgctgaaggctaaattagcaaagttgcggagggaactccttacaccttcatcaaaaggagctggaggtgctggtgaaggttttgatgttactaaaagtggggattcaagagttggtcttgtgggcttcccttcagttggcaaatctactctactaaataagttgaccgggacattttctgaggttgcttcctatgagtttactaccttaacttgcatcccaggtgtgatcacatatcgtggagctaaaatccagttgttggatctccctggaattatcgagggtgctaaggatggaaagggtagaggaaggcaggttattagtactgcaagaacatgcaattgcattttgattgtccttgatgcaattaagccaataactcataagcgtcttatcgaaaaagagctagagggatttggtataaggttaaacaaagagccaccaaatctgacttttaggaagaaagacaaaggtggactcaatctcacctcaactgtcaccacaacacatctagatcttgagactgtgaaggctatatgtagtgagtacagaattcacaatgcagatattactctcaggtatgatgccactgctgatgaccttatagatgtcattgagggaagtagggtgtatataccttgtatctatgttgtgaacaagattgatcagatcacacttgaggaactggagatcttggataagctacctcattactgcccaatcagtgcacatctggagtggaaccttgatggtcttctggagaaaatttgggaatatctcaacttaactcgtatttatactaaacctaaagggatgaatcctgattatgaagaccctgtaatattatcctctaagaagaggacagttgaggacttctgcgatcgcattcacaaggacatgcttaaacagtttaagtatgctttggtctggggttcaagtgcaaaacacaagcctcaaagagttggcaaggagcatgaacttgaagatgaagacgttgttcagattatcaagaaagtataatttgttataatcagaagaatccaagatgacgttttctgcaaatcgatcagaatgccggcactctcattagattaatagaggatattctgagcagaatcaaagatcccttcgtgagactttcaccaggatctttagattacactccaattatttgtcttttttaagttgggggtgaggtagagtatattaaagtttgatgcgttgttaaaccattagttatttcaggggacgccgtttgtcgcggaagttttgaaaatgatgtatcttgtggtgggattatacaattaatgggtagaataatttggtgtctacttagtaaacattgataggctttgctggaaagatatatattattcaggtggatatgtcagactgtccatcctgctggacatttttcacaaaacgatggcatgagcttgatacagcatttacattgtttttaaaatttattgacagtggtaaagctttttacattgtctatgcttctggacatttttaac

SEQ ID NO: 3367 - DNA, 1192 bp, Glycine max
aacccatatgcattcatagatagaataatatataaatataatggcggaatttacatccaccaccactaacactaacagtaacagcggtctcaggttgaaagccaaagtagccatagtcaccggaggtgcaagtggcatcggcgaagcgacggcgcgtgtgttcgcggagcaaggcgcgcgtatggtggtgctcgcagacatccaagacgagcttgggaatcaggtggctgcgtccattggaacccagcggtgcacctacatccactgcgacgtggcagacgaagaacaagttcaaaacctcgtccaatcaacggtcgacgcttacggacaagtggacataatgttcagcaacgctgggatccttagtccctcccaacagacggtgcccgaactggacatgtcccaactagacaggctgttcgcggtcaacgtacggggaatggcggcgtgcgtgaaacacgcggcgcgtgcgatgttggaggggcgcgtgaggggaagcatagtgtgcacggcgagcgtgggtgggagccacggtgggccaaatgcgacggactacataatgtcgaagcacgcggtgttggggttgatgcgttcggcgagcgtgcagcttgcggaacacgggataagagtgaactgcgtctcacccaatgggttggcaacgccgttgacttgtaaacagcgagggatgagcgaggaggaggggcaagaggtttaccggaaatacgcgagattgcaaggagtggtgctcacgcccaaacacgtggcagacgccgtgttgtttctcgtctctgatgactccgcctttgtcactgcccttgatcttagggtcgacggtggctttactttgcctagtatatcaatttcaaattctatactattgtaagacattgaagctcttgccaatttatgagcaacaacattggcttatatattgagttttagcaataatgtgacatgagcctacaatttcaaatctgagttggttgtaacacctctttcacttctggcttgcaattaattaacttcattgatcatgttatggaaaaaaaaaaaaaaaatccatttaagtccctggagaagaccccatgcctcagtttctttttaatttggatttggagtgcctgtctaccattgccattgaggcttagcttgaaaaaaaaaaaaaaaaaaaaaaaaaaaaaaaaaaaaaaaa

SEQ ID NO: 3368 - DNA, 1547 bp, Glycine max
tcgagtcagctacgtagcgagcggtggccaacaccatcgtaacacctcacgtactggaccgttgggttgttcttcgagaccctctctgactcgccgggttgactcgctcgagtttgggggtttctgattcacccggggacggatctcaattttgtctcaggaaaagcaaagggcatcatattactatgaaggcactaattcttgttggagggtttggaacaaggttgaggccattgacactcagtgttcccaagcctcttgttgattttgctaacaagcccatgattctgcatcagatagaagctctcaaggccattggcgtcaatgaagtggtactagctatcaattaccaaccagaggtcatgttgaatttcttgaaggagtttgaggcaaaacttggtatcaaaatcacttgttctcaagaaactgaaccgctaggtactgcaggccccttggctcttgcgagggataagctaatagatgactctggagagccattttttgttctcaacagtgatgttatcagtgagtacccacttaaagaaatgattgaattccacaaaacccatggaggagaggctaccataatggtgacaaaggtcgatgagccatcaaaatatggtgtggttgtgatggaggagactaccgggcaggttgagagatttgtagagaaaccaaagttgtttgttggcaacaaaatcaatgctggaatctacctattgaacccctcagttttggatcgaattgaactgaggcccacttctatcgagaaagaggtgtttccaaagattgcagcagagaaaaagctatatgcaatggtcctgccaggattctggatggacattggacaaccaaaggactatatttctggcctgacactttacctggactcgctgaggaaaaagtctccttctaaactggccagtggtcctcactttgtggggaatgtcattgtgcatgaaactgccactattggcgagggatgtctcgttggacctgatgttgcaatcggtcctggctgtgttgttgagtcaggtgtcaggctttcacgctgcacagttatgcgaggagttcggattaaaaagcatacttgcatatctaacagtatcattgggtggcattccactgttgggcaatgggcccgtgtggagaatatgactatccttggagaagatgtccatgtttgtgatgaagtttatagcaatggtggtgtagttttgccccacaaggagatcaagtcaaacattctaaagccagagattgtcatgtgaggttactgtcttaaattcatagcatgtgattaggaagctctaagtttgtgtctgaaatgtgtttgtttgtttcatttgtttttccttttttttccgcatcccaatccgtttctctttgttacgtattgtacaagtcaatttcgtttagtttagaatgagtgatgccataatttacaatgttgaaaggtctgtgtctttgtaaagggtataaagttggtttactgttcctaagttgtgtaatatattcagtgttgtttatctctctttttttttttg

SEQ ID NO: 3369 - DNA, 1617 bp, Glycine max
tacggctgcgagaagacgacagaaggggggtgcgtgcgggttattatatataggggaagatcaacgagacgtaggtggcaggtgtgggttcttcaattcattctagttctggattccgactagccgcgttgactcggttccgtttttcattctcgcggatctaatattaaggaatagcttaagggcacattacaatgaaggcattgattctggttgggggatttggaacaaggctgaggccactgacactcagtttccctaagcctcttgttgattttgctaacaagcctatgattttgcatcagatagaagcccttaaggccattggagtgactgaggtagtgctagccatcaattaccaaccagaggttatgttgaatttcttgaaggattttgaatcaaagctcggcatcaagatcacatgttctcaggaaactgaaccactgggaacagcaggtcccctggctcttgctagggataagctgatagatgattctggagaacccttttttgttctcaacagtgatgttatcagtgagtatccacttaaagaaatgattgaattccataaaagccatggaggagaggcttccataatggtaacaaaggttgatgagccatcaaagtacggcgtggttgtgatggaagagagcacagggcaggttgataaatttgttgaaaaaccgaagttgtttgttggtaacaaaatcaatgctggaatttacctgctgaacccctctgttttggatcgaattgaactgaggcccacttctattgagaaagaggtgtttccaaagattgctgcagagaaaaagctatttgcaatggtcctgccaggattttggatggacattggacaaccgagggactatatttctggcctgaggctttacctggactcattgaagaagaagtcatcatctaagttggccagtggctctcaatttgtagggaatgtcattgtggatgagacagccaaaattggtgagggatgtctcattggacctgatgttgctattggtcctggctgcattattgagcaaggtgttagactcaaaagctgcacaataatgcgtggagtccgggttaagaagcatgcttgtgtatccagcagtattgttgggtggcattccactgttgggcaatgggctcgagtggataatatgaccatccttggagaagatgtccatgtatgtgatgaaatttacagcaatggtggtgttgttttgccacacaaggagatcaagtcaaatattctgaagccggagattgtcatgtgagtgaggtcaatgatgttcaaaatggtagcatgtggtgaggaggtagaaaaattattgagtctgaaatgtttgtccgtttcattttgtttttctttttacttcatggcgtttcttttctttttataggtcagttttttggattagaatgagtgatgccattgcattgatgaaaaggtcagcatctttgtaaatggcgttaagtttggtctgtgcaaaagttgtgtattttgagtgtgtatagaaataaattattggttagtggtttctctcccaaaatcatttgctagaaatttattccaacttatcttatctttttttcttgtttatttttctattt

SEQ ID NO: 3370 - DNA, 921 bp, Glycine max
ttctattcctatcaccctcagctacgcaggcccccccccccccccccgagcacagaacgaagctgctatcgataacatatttcacttgagacagttatctttatctacgcaagagaagaatagaaaatggatatcaggttgatggatttggactctccattgttcaacactctgcaccgaatcatggatctgacagaggacgcagagaagaacttgaacgctccgacgcggacatacgtgcgcgacgcgaaggcaatggctgcgactcctgcggacgtgaaggagtaccctaactactacgtgttcgtgatcgacatgccaggcctgaaatccggggacattaaggtgcaggtggaggatgataacgtgcttctgataagcggcgagaggaagagggaggaggataaagagaaagaaggggctaagtatttgaggatggagagaagggttggcaagttcatgaggaagttcacgcttcccgagaatgccaacaccgatgctatctctgccgtctgccaagacggtgtgctcactgtcactgtcaacaagctgcctcctcctcagcccaaaaagcccaagaccatagaggttaagatcgcctgaattaatttcttcgtttgcactgagacctgctatcatttcctcttttccttttgtgtgtgccaatgcttttctatctttccgtctctgcttatggtcatgatatgacactgtagtttgatcatggatgatataatgcatgcttttctatgaatttttaatttcctaaaaaaaaaaaaaaaaaaaaaaaaaaaactcctcgtgtcttgttctcgctctcaagggtttgaacagtttggttttccacataaatttatggaattgatgataaccaatagccaggcataatacacatttttcatataacaaatatttttagtc

SEQ ID NO: 3371 - DNA, 815 bp, Glycine max
attttaaataccgaaaatgcacccggctaccggcacacgataacaagagaaaagagaaggcaatggctatcaggttgatggatttggactctccattcttcaacactctgcacagaatcatggatctgacggaggacgccgagaagaacttgaacgctccgactcggacatacgtgcgcgacgccaaggcgatggctgcgactcctgctgacgtgaaggagtaccctaactcgtacgttttcgtgatcgacatgcctggcctgaaatctggggacattaaagtgcaggtggaggacgacaacgtgcttctgataagcggcgagaggaagagggaggaggaaaaagagaaagaagggggaaagtatttgaggatggagagaaggcttggcaagttgatgaggaagtttactctccctgagaatgccaacaccgatgctatctctgctgtctgccaagacggtgtgctcactgtcactgtcaataagctgcctcctcctcagcccaagaagcccaagactatagaggtcaacatagcctgaattccaacttccaacgctatctatccctgtttttgttttctgtgtgccaatgcttttctatctttccgtctctgcttcatgcttatcacactgtaatttgatcatggatgataaaatgcatgcttttgtatgagttttaatttccttaaatcattcctattttttttatatgcttgaaaaaaattccctaatttacaagggaagaaacataaaattcgttttaaaaaaagtgacagggactatatatataactaaatgattttgctgcataagttg

SEQ ID NO: 3372 - DNA, 1341 bp, Glycine max
cttttcctgacccccatcgctgtcttgtccttctccttccctcagctcctcttcactccctttcattttccctcacactcatcattctcaaaaaacacgcccaaattctaatcaaattagggttagggttttcaactcccctcgaattatccctgtaatgcagtgcgattcccgggtcctaccatggagccatcagcaatgtacggaccctcccagcccctgaacatcccctcgcggatcggcgctggcgaaagagacgacggctccggcaacgagcccgccgtcgacggccaccaccaccacattcagtacgaaacgcacgcgctcgatgacggtgccgccggtggcgccgtggttgtcgaggatgttacgtcggacgcggtctatgtctccggcggtggaggccccgaggagtccagccagcttacgctgtcgtttcgtggccaagtttacgtcttcgatgccgttacgcctgataaggttcaagcggtgttgttacttttgggtggatgtgaactatcttcgggtggttcgccatgtgtggatcctggggctcaacagaatcaaaggggttcaatggaatttcctaaatgtagtctaccacaacgagctgcctcattagataggttcaggcagaagaggaaagagcgatgctttgataaaaaagtgagatatagcgtacggcaagaagttgcgctcaggatgcatcgtaacaagggtcagtttacttcatctaagaaacaagatggagctaatagttatggtactgaccaagattcaggacaggatgatagtcaatctgaaacctcatgtaaacattgtggcactagttcaaaatccaccccaatgatgcggcgagggccatctggtccaaggtcactttgcaatgcttgtgggcttttttgggcaaataggggtgctttgagagacctttctaagagaaatcaggaacactctcttccaccagttgaacaggttgatggaggtaatgacccagactgtcggactgccgctgccgaccctgcacaaaacaatcttgctgctttctcagagcctgttaatccagctttggtagctgatcgtaaggttttccaatctcagaaaatgttggagtagttgactctggcataagtaggtctatagttattccattcagattgaccaataggaatgtacagatataacaatactcccatcaatgcaagaactttgtttttatatggttggatcagtggcattaaccattgatctctggatgtatcacctgaaacttaaatgatgacttggtgatggtctcacccaataccttgaatttaattttacacgtagattttttgttca

SEQ ID NO: 3373 - DNA, 1849 bp, Glycine max
ttgttataccaggcccagcagctccattatgatagtgcaaccatgatcatgagattcaaagccacgcgtccgccgccgcgggggcggacgcgtgcggttagtgaaaagagttcaaaatatggacaaatagctgctgaagaagtcccaaaaagcctctattgtctaggtgtccgattgactacagaatggttcaaaaacttcaatttgcaaaagaaattgaaggacaaaaggcacgtggagatgaagcttaaggatagcaatcttcaccacttttgcattttctcggataacattattgcaacttctgttgtggtcaattcaactgcaatgaattgtaaaaatcccaatatgattgttttccaccttgtcactgatgaaataaactatgctgcaatgaaggcatggtttgccatgaatgatttccgtggggtgactgtggaagttcagaagtttgaagactttacttggttaaatgcttcatatgttccagtgctcaagcaacttcaagactcagaaatacagagctactacttttctggcaacagtgatgagggcaggacacctatcaagttccgtaatcctaaatatttatccatgcttaatcacttgaggttctacatccctgaagtttttcctgcactgaagaaggtggtgttcctggatgatgatgttgtggttcagaaggatctttctggtcttttttccattgatttgaatgggaatgtaaatggagctgttgaaacatgcatggagacatttcacagataccataaatatttgaactactcccatcctcttatacgtgcacattttgaccctgatgcttgtggatgggcatttgggatgaatgtatttgatttggttgaatggaggaaaaagaatgtaactggcatctaccactactggcaggaaaagaacatagaccgaacattgtggaaactcggtaccttgccacctggactgctgacattttatggattaactgagcccttggatccatcatggcatgttttgggttttggctacactaatgttgatcctcagttgatagagagaggagctgtactacacttcaatggaaactccaaaccatggttgaagattgggattgagaagtacaagcccctatgggaaaaatatgttgaatactctcatcctttgttgcaaaaatgtaacttccattgattttgaattgcatttaaattgatacttcaaaccttggtggaagattaagattcacagttagcctctgttggtggggtcggcaaatatatcattgtttgtttggggaactggcaggcttggtgatccttaccagaccagcgaattgaggtcttgatttgtagtcagaaaatgctggtacaattttaaaaggccaagcatgtgtggtggctttaacttggtgccttattgaatccggctcttctattgtagcatatataattatacacgttcatttgtcatgtattagactatatcagttcatagtttttaagtgtagtcaaggatgagatgtgctgcaaacttcttaatgttcattactgttccttgcaagacctgagtttctttcctgtgacattcatttgctgtaactttagcatgcgtcaaaatactatagtttagttgttcccctaccatagattccagctgcatttgttgttgtgtggagaatgtttctctcattgtcagcatgatagttaaatgcttccttctagccctttaggacactggttcaactttgcatgaagtctctgaggtattttaataatcgttactgttgtttctttttatttttttggttgacatggaactaatttatgatcatatttgaactttctacatttttatt

SEQ ID NO: 3374 - DNA, 1774 bp, Glycine max
  misc_feature (1737)..(1737): n is a, c, g, or t
gcgtccattcgtacgttttcgcgtccggttagtttctctctcattttacagtgtctgagaagagaaggcaaaattgagaaccgaccattcctgattggactctaatgaatggctcatcgaaatcttaatcacaagttgacatggcaccatcagaaccgtttgtcaatgtccctgaaaatgaaattccaaaaacagatgagtgtgccatgaaaaaaccacttccacttgcttctcttctctctctctgttcttttcttcattcatttgttctcactgtagtgctcacgaagcacttcaccagcgcatgcccaccaaagcaaaaccaattttttctccaaagtctgaatcttttcaccctttattaccaaatccggaaaccccagatctcgggtatagccggtgatctgaattttttttttcctctgcttttctttgaacattacattcccggaaaacggttttccggggaaagaagtgaaggaagggcggaattggggtttgaaaaatgcggcgaagagcgacggattttcgaaggccagtgcgtaagagggttccagaggccgttggggtgggcattgtgctgtgcagtgattcttctctttgtttatattctgagcaaagggaacaaaattgagtccagacccgctttgtccaagaaaacttacaggcatgataagattatggaaggccttaatattactgaagagatgttaaactctaactcagttacgagacaactcttcggcccgagatccctggcaaaagcttttgttgtaattgcaaaagaaagtaataatctccaatttgcttgggaattaagtgcccagatccacaattcgcagatgctcctctcgaatgcagccactaggcgtcttcctttaacaaccagggaaacagaaagggctatccatgatatggcattattgttataccaggcccagcagctccattatgatagtgcaaccatgatcatgagattcaaagcaaaaattcaagctcttgaggaacagatgaattctgttagtgaaaagagttcaaaatatggacaaatagctgctgaagaagtcccaaaaagcctctattgtctaggtgtccggttgactacagaatggttcaaaaacttcaatttgcaaaagaaatttaaggacaaaaggcacgtggtgatgaagcttaaggataacagtcttcatcacttttgcattttctctgataacattattgcaacttctgttgtggtcaattcaactgcaatgaattgtaaaaatcccaatatgattgttttccaccttgtcactgacgaaataaactatgctgcaatgaaggcatggtttgccatgaatgatttccgtggggtgactgtgggaagttcagaagtttgaagactttacttggttaaatgcttcatacgttccagtgctcaagcaacttcaagactcagaaatacagagctactacttttctggcaacagtgatgagggcaggacacctatcaagttccgtaaccctaaatatttatccatgcttaatcacctgaggttttacatccctgaagtttttcctgcacttaagaaggtggagttcctggatgatgatgttgtggatcagaaggatctttctggtcttttttccattgatttgaatgagaattgtaatggagctgttgaaacatgcatggagacatttcacagataccataaatatttgaactactcccatcctcttatacgtgcacatttngacctcgatgcttgtggattggcatttgggatgaatg

SEQ ID NO: 3375 - DNA, 2096 bp, Glycine max
tcgtgtcagcaattgggctccccgcaatttagaacaggaatcccacgccacttgcaattccatctcggtgtttgattctctgcttcgtcctttcattcctcttccgaatcgttaatcgttcgatcgatccatctcccgcttccaatgacaacccctaccgacaacaataacaaccctgcacaggaaaaccctaacaaaaccctagaccccaccgaaccagatccaatccctgccaccgaggacgacgccgccgccgacactaaggactccgacgccaaaaattccccgccgcccgattctggaaacgacgctccgctctccgatattcagaagaaaatgcgccgcgccgagcgattcggcatttccgtccagttgtccgagaaagagaagcgcaattcccgagccgaaagattcggcactggttccgcttcgcagggatcagagccatcgaaatcggaggagctgaagaggaaggctagggcagaaaggtttggaatgcctagtcctactacaacttctgacgaagaggcaaagaagaaagctcgacttgctaggtttgcacctgcttccaaagttgatcctcaagaagaagataagaggaaagcaagggctcttaggtttgcgaatccatcatcaacttctatagctaatgttaatggtgagggaaagattgagccggctgctattgcaggcaatgctggaggagggacctgaatgacagtttgcgtctttaatttgtaggattttttctttttttagtttttagcagttcaagatttgaagagcaacctccacacagtttctacttttcagcatattaatctcagatgtgcctatctttcatttgttcactgatgccctcctctatgagatggaagagattcaagtggtctgaagaagcttgttttttgttttgttgtagcgttggctttatagatgacagcttaaaaatcttcatagggttacttgtcttaaaaatcttcaaaaaattgaattttggaatctacagcctaaaagaatttaatagatgaagatatgcagaaacaaaactttttcttgattagtttcatccttatcgcggtctttaatctactgcttttgaaatgttccttatcattatcattatcattgtgctaaaaggtagtacaaggtaggtttttttttatccaacatcatgctgatccagaatgaggtaatgttaggataggttttgttgcttgatatgtcttggaggagtgatgattaaatgagaaaataggccctcaaatagaatatagcttgtttgtaggatgaacttgtttctggttaatgctatacatcttttgggcattgaggggaagaggggttagagttaagagttaacatttcatcatccataatcttgaatcacttttttttcttttggttttacaatggtgttttgggggtagtgttctttaggttgtctgtcaaattggctgatggcttgtgtttgaaattgcttttcctcaatcctagtctcctttaggttgtttgttagtgttttttgcttcattgtttttcgatcttatttgaaagtagcttttaaagcacatcacgttgattagaagcatgtttcttgaaaaggggataaatatactatgtttgggtaccttgtggaaatgttatcatgtttggtatagagctattgcactactttactttggatcggcagaaatgttgaggctcaagttcctggtactatcttctggcactcaagaaaagagttagctgaatgttttggtggggctgaattctgtatgttttcaagtcggttttaaaactcggtttattttcaaggctgtagcttccaatttttattatctttactgtcaccttaagataagttaaaccctttgaagtttgaagatgtttcgttgtttacttggttgccaaaattcggaattgtacatttgtagggctggatgtggagggaactctttactttttgttgtattattaccctgtaatttattttaagctttgtttgttctaatgtttggatgttatatattttgctagcctagtataaatggaaggaccgttacttcatgtgattaatatttagcaaaaaaaaa

SEQ ID NO: 3376 - DNA, 1971 bp, Glycine max
gatctatctgtcctgcataattttactacctcacttcgaccattgcttcttatcatacatcacatctattgtatggccactgaaatattatagactgcgtactcattcataacatatcagctgtacgtgtttctgatatatatttgcctcttagtgggtcgatattaattgaagatcatggctgagggaaaaacagcaactcaaaaatctcttcaggattttgatcctcaaaagacacccagaaggaacaagtatgctttcgcctgtgccattttggcttccatgacttccatattacttggctatgatgttggggtgatgagtggagcgattatatatataaagagagacttgaaattgacggacgtgcaaatcgagatcctggtaggcatcatcaacctttactctctgataggttcatgcctcgccggcagaacctccgactggatcggtcggcgttacacgatcgtccttgccggaagcatcttcttcgccggagccatcctgatgggaatatccccgaactatccctttcttatgttcgcgcgcttcatcgccggcgtcggcatcggttatgccctcatgatcgcccccgtctacaccaccgaagtctcccctccttcctgtcgtggcttcctcacctccttcccagaggtattcataaatggagggatattgctaggatacatatcaaactacggattttcaaagctgtcacttgagctgggatggaggatgatgctgggagttggggcggttccttcagtgatcctagcgctgggagtgttagccatgccagagtcgccacgctggctggtgatgcgaggtaggctcggcgaagccaccaaagtcctcaacaaaacctccgactccaaagaagaggctcagcagaggctagccgacatcaaagctgctgccggcatccccgagagttgcaccgacgacgtcgttcaagtaaccaaccgaaaccacggcggcggtgtatggaaagagttcttcctttaccctacaccggcggtgcgccacatcctcatagccgctctcgggattcatttctttcagcaggcttccggaatagacgccgtggttttgtacagccccgagattttcaagaaggctgggctggaatccgatggggaacagcttctggcaaccgtggccgttggattcgccaaaaccgtattcatcttagtggctacgtttttgttggatcgggtggggcgtcggccgctgttgttgacaagtgttggcggaatggtgttttctcttctgacgctggggttgagtctcaccgtcattgaccactcacgcgccgtcctcaagtgggccattgggttgagcataggcatggttttgtcctacgtgtccactttctccgtcggagcgggtcccatcacgtgggtttatagctccgagatcttccccttaaggcttcgcgcgcagggtgcggctatgggagttgtcgtgaatagggtcactagtggggtcatctcaatgactttcctgtccctctctaataagatcactattggtggggcattcttcctctttgggggaatcgcaatgtgtggatggatcttcttctataccatgctccccgaaacacagggcaagacccttgaggaaatggaaggctcctttggtaaattcgcctcatggtccaagggtaaggacggtgataacggagagatccaattagccaattagccacccataatcgtgcttaatacttttgagccaatataatataataatataatggtgtgtaacagattagattagctttctaagtagtaacaagtctagtatgcgacgcaaaattatagtactacttcttttcatgaatgaggagagagagagagagagacgggtaataagtgtggtaagctattcgaaaactacattgttaatgtaacctttcctttttccgtggatattatttgatcatttgatgcaaaaaaaaaaaaaaaa

SEQ ID NO: 3377 - DNA, 998 bp, Glycine max
aatatataccgttcccaccgtaatgcatcactccctgtaacatcaaactctgtttctttgtttctttatcgaagtttcaacttggtttccttctaatgggaacctctcttctccgctcccacgattgtcttcaaggccaccacgatgccttgtccccaactccatcttccatcagatcacaaagaaaccctaaccctagccccaacccttaccagactcgccggcggaggctccacgacggcgaccgctccggcatggtggtgaaaggccccagcgcgaacctcgtcatgggccatgtcaagatcctcaagagaggcgagacgctcagcgccgagacccgcggcggcgacgacgaaggtttcgatttggttttgggatccacgaaccggttgggtcccgatccgagttccgttccggtccctgggttcctcgctatgaggcggtgatcatggattcattggttgattttattgttggatttcggcgtttatctcacgcaagtgagagtcacgggaggaggagcggctgttgagagctttcttgatcgtttgatttgattgcacagtctcgacgagcgaatgatttgatttgtttgggtgcgagcgaatgaagaaaattttggaggcgaaagggaaaagctcgtgtggatcagggttcaacttttggtcccgtgaaagaggatttaggtcgctgtttgaagacaagaatatgatatcctactgtgtattcctgcagtgttcttttgtctgcgagtttgtgtgggtgctgtgttgggtctcctttcttgaatgtgttttattattttaatatactggtgtagttctgaaacttaatgcattaaaatttatagttttttgatcgacaaacaagatgttagtttttgttagttagtgagaaattggaacttgtgacctattttttcttttttttttctttctcaccaagtcaatctgcataataaaatttaaattacattagtccgaaaaaaaaaaaaaaaa

SEQ ID NO: 3378 - DNA, 1310 bp, Glycine max
ccaaaatggtcgatgatcgtgagggggtcccaatttgcaattcaacgtcatcgcggtgcctgtgactattagaaacaacagcggtgtgagaatagcaaagaccgataacccatatatgagagtttggagaaaagacaagaggaagaagaagaaggttggttgattggtcccattgattccgaagagaaaagaaaagatgtttgagccacaacagctatacactcgcgcgaagaccgaggaattcgacctcgaatcaggagaaaccctctacccagggctgagcgtcggcgagaaccagctccgatggggtttcatccgcaaggtctacggcatcctctccgcgcagatcgtcctcaccaccctcgtctccgtcaccaccgttttctatactccaatcaatgacctcctcaagggcaattccaccctcctcctcatcctcctcttccttcccttcatctttttgattcccctgttgaagtaccagcagaagcatcctcataattacatcttgcttgcactcttcaccgtgtcgatcagttccaccatcggagtcacctgtgccaacaccgacgggaaaattgtgcttgaggctttgattttgacctccgctgtggtttcatctcttactggctatgccttttgggcgtccaagaagggcaaggattttagcttccttggcccaatattgttcacctccctcattactctcatcctcactggcatgatgcagatgttcttccctcttggacctactgcccatgctatctatggtgcaattggtgctatgatattctctggctacattgtgtatgacactgacaacctgatcaagcgtttcacttatgatgagtacattggagcctctgttactctttatcttgacatactcaacctcttcctttccatcttaaggatcctcagggaggcaaataattagtcatatcgaggttgagtaataccaaacaaattcaaaaagactatgttgcttctttatttttattttttgtgactatgttgcttctttatagtataccgtaggaagtattgtgaaacataataacaccgtgcttctcttgtactcccttacagcttatgatacttttgatgacatgaaatttaaagctttacaattgtatgtatgcgtgatataagaatctcccttgcgaaatattttctctttgctttgtttgaagtgagttgtctatcaatttaatgctatgtatacagtagtatatggcatatcgtagcaccaccgagcattgtgtcaacaaaattgtttaggtacaatgtgtatgataactctgtaatgt

SEQ ID NO: 3379 - DNA, 2223 bp, Glycine max
ggccaccaaactcaacatgctcctcaagctcctgcctttgttggtgttccttctgatcccagtttcatctcagccaaaccagctcttctatgctggattcaagggtctgggaagcaacaacatgacccttgatggggttgcagaaatagagccaaatggggtactgaaactcacaaatgattcaagtaaagtgatgggtcatgctttttatccaaccccttttcggttcaagaactctagtggtggtaaagctttctccttttcttcctcttttgctttggctattgttcctgagtttccaaagctaggagggcatggccttgcttttacaattgctccttctaaggatctgaaggctcatccaagccaatatcttggtattcttgactcaagtaacatagggaacttctccaaccacctctttgctgttgagtttgacacagcaaaggattttgagtttggggacattgatgacaaccatgttggaattgacatcaatagcttggcctccaatgcctctgcatctgcaggttactacactggggatgatgattcaagcaaacagaatctcaccctccaaagtagggtacctattctagcttgggttgattatgatgctgctaaaagtgtggtccatgtcacgatttctgcatcttctaccaaacccaaaaggccactcttgtcctatcatgtggatctttcaccaatccttaaggaatccatgtatgttgggctcgccgcctcgccggggttgctttggctagctcccattacatcttgggatggagcttcaaaatcaatgggccagctccaccccttgatctctcttctctcccacagcttccagggccaaagaagaaacacacatctctgataactggggtttcaatttctggttttcttgcattgtgtggtttcttatttggcatctacatgtacaggaggtacaagaatgctgatgtcatagaagcttgggagcttgagattgggccacataggtactcctatcaagagctcaagaaagcaacaaaagggttcaaggacaaagagctgcttggacaaggtgggtttggtagtgtttacaaaggaacattgccaaattccaatacccaagttgctgttaagagaatttcacatgactccaatcaaggccttagggaatttgtgtcagaaatagccagcataggctggcttcgccaccggaatttggttccgttgctggggtggtgtcgccgccgtggtgacctcctccttgtgtatgatttcatggaaaatgggagcttagataagtacttgtttgatgggccaaaaacaatcttaagttgggagcaaaggtttaaggtcatcaaggatgttgcttcagcccttttgtatcttcatgagggctatgagcaggtggtgatacatagagatgtgaaggctagcaatgtgcttctagatggtgaactcaatggaagattaggagattttggattagcaaggttgtatgaacatgggactaacccaagtaccacaagggtggtggggaccttgggctatttggcacctgaggtgcctaggacagggaaggccactcctagctcagatgtttttgcatttggtgcacttttactagaggtggcatgtgggctaagaccacttgagccaaaggcaatgccagaagatatggttttggttgattgtgtgtggaacaaattcaaacaagggagaatactcaatatggtggaccctaaactaaatggtgtttttaatgaaagagagatgctcatggtgttgaaattggggcttctgtgttcaaatggttcacccactgctaggcctagcatgagacaggtggtgaggtttttggaaggagaagttggtgtgccagatgagttgagaaagccgggagagggaggttaccaggagggttttgatgaattcttgcactcacttgaatcttcttcgtttgatcagatgaacacaggttcctatggtagaaacagagacatggattctagttttccatctttaactggtacatctctttttagtccccatggtaaaggacaaacaatgtgatcatctacattttacttagagttgtactctatgtacttaagatatttgtttatcatatcaccccatgatgtctcataatagtacacagaaagtttttgtgatggtgaattaaatcccaatacaagaagttcgtattctaattcatccccccattggcatcaa

SEQ ID NO: 3380 - DNA, 1731 bp, Glycine max
cggacgcgtgggcggacgcgtgggcggacgcgtgggttggcggctgactacgagtcattgctgaagaaagccgatgggtctcaggatgcttttgaagagaagtatggttccagtgtatccgcggaagctaatgatgaagatggatttagagatttagtgcgacatacaatgttcgaaaagggtcagagtaaacgcatatggggtgagctttacaaagtgatagattcttcagacgtggttgtccaggttttagatgcaagggatccacaaggcccacgcggccgttcatttagagaagcatttgaaggaaaattgtaagcacaaacacatggtgcttttattgaacaagtgtgatctagttcctgcttgggcaacaaaaggatggcttagagttttgtcaaaagaatttccaactctagcattccatgcaaacattaacaagtctttcggaaaaggttcacttctatcagttctaagacaatttgctcgattgaaacgtgataagcaagcaatatctgttggatttgttggatacccaaatgttgggaagtcatcagtaatcaacacattgcgtactaagaatgtctgcaaggttgctccaattccaggggaaacgaaagtctggcagtatataaccctaacaaagaggatctttctgattgattgtccaggtgttgtctaccacaacaatgatactgaaacagatgttgtgttgaagggtgtggtgcgtgtaactaatttgaaagatgctgcagatcatataggtgaggttttgaaacgtgtgaagaaagagcatttggagagagcgtataaaataaaagagtgggatgatgaaaatgacttcttactgcagctttgcaaatcatctggcaaacttctgaagggtggtgagcctgacctgatgactgcggcaaagatgatacttcatgactggcagaggggccgaattcccttttttgtttcccctcctagggttgaggacttgtccgaggaaccctatgttaatggtgttgacttagatgattcagttgatggcaatgaggcttctgctgctatgaaggctatcgcagatgttctttcatcgcagcagcaaacaagtgtacctgttcaaaatgatttatatagtgagaatgagttgaagggggaagctgctgaccaatatccaaacactaatgcaaacgaagatattctggcccctgatagtaacacatctgaagaggatccaaccaacgtgtcataacttttggttgctgttatcagtcgggaaattgtatatttcaagttggttttgtttccatcctctaaaaagctttgaagagaacaagctcattttccctcaacccatttatgcacgagtttcatgctggaacttcatctgtctcaaaaatatgctcttctcaaatgcatcatttttgctcttgggaatgttgtttttggtcacctaaatgaagtttcggggaaggtcataactgttctttggattcatgagatgggggaaatatactgctatggagatcataaaaacatgcaggagcttttggtttgttgaacattaggttttttttttaatttaagtaaagcataagtttgagcgatatagcttaatggtggaaattttgttttatttgccaatataccattctatgattcctagttgtgaacgttgatacctgcgatattttcttatttaatgtcattatttttatcgttcatgttaatgagagtttggag

SEQ ID NO: 3381 - DNA, 1372 bp, Glycine max
  misc_feature (1233)..(1233): n is a, c, g, or t
gctcggaattcggcacgaggctcgagctgtaacaaaccaactcgaacctctcactctctctgtttctgcaatggcgaagaagaaggagaagaaggtgaacgtctccggaaaacctaagcactctctcgacgtaaaccgcagcaatgacgcgaagaaggagtcgcgctccgccgccactgtgcgccgcctcaagatgtataacaccagacccgtccgcgatcgcaagggaaaagtcttatcccacgagcttcagtccaaggagcttcccagcacaagaatccaacccgaccgtcgatggttcgggaacacgcgtgttgtgaatcagaaggagcttgagtttttccgagaagagttgcagagccgcatgtcgagtaattacaatgtgattctgaaggagaagaaactgccgctgtcgctgctcaacgatcaccagaagcaagctagggttcacctgcttgatagagagccttttcaagatgcgtttggaccgaagactaagaggaagcgccccagcctcatggcggctgactatgagtccttgctgaagaaagctgatggttctcaagatgcttttgaacagaagtatggttccagtgtatctgcagaagctaatgatgaagatggatttagagatttagtgcgacataccatgtttgaaaagggtgcagagtaaacgcctatgggggtgagctttacaaagtgatagattcttcagacgtggttgttcaggtagtgtctccttttattttcctgggatttttcacatgtgtatgtttttgaagtagtatgcatgtgtgtgtttctatagatatgattttgtgcaagaaattgaaaaaaaaagagcattatgatgggcatttctgctgctatgttgctctgttttgaattttagaagaaatttgtcttggttaatgtgttcctccttttaagcaattttgtttttatggtaggtcagatttattttgacacgactccttggagttttcactaatatccttctcttcctcaaagtttgaatactttatgtatcctaatgcaggttttagatgcaagggatccacaaggtacaagatggtatcatttagagaagcatttgaaggaaaattgtaagcacaaacacatggtgcttttattgaacaaggttagtaacatcattatttgttcttgccattgctctaaaatgttgctaaatgccctaaattgctattatgtgagacaaaacaatcttaattntatttttctcctttcagtgtgatctagttcctgctagggcaacaaaaggatggctcagagttttgtcaaaagaatttccaactctagcattccatgctaacattaaacaagtctttcggaaaagaatttctgatacatt

SEQ ID NO: 3382 - DNA, 751 bp, Glycine max
  misc_feature (740)..(740): n is a, c, g, or t
  misc_feature (745)..(745): n is a, c, g, or t
attattttaggaattaaaataagaagagaagagaagagaagaggccggggaggagacttgaaggtcaaccatcgaccactctttttctttaattcttcccacaaacatgtcacgcgccgccgcgtcgttcggaatcctcctttgtctgctgctcctcgtcgccgccgtcaactgctccgatcagggaaactgcagcaccacatgcattgtggagcaatgcgacacgatcggaatcaaatacggcaagtattgcggggtagggtattggggttgtgctggcgagaaaccatgtgatgatcttgatgcttgctgcatggcccatgacaactgcgttgacaaattcggaatgactcatgtgaaatgccataagagattaaagaattgcctaaccagggaactgaaatctggtaaggttggattttccaaggagtgtccctacagcagagctgcacctacgatgataagaggcatggacttggccatcttgctcagccaattgggtgacttctccgttcctcactaacaaactgaaactaaccctcttatgtaatccttacttactccttccccatttacaaacttctcttcattcatttgggaaacctgatcttatatatgatcctgttggacatggttaaactgttgttattgattttctatgttcttaacttatcatttaatttatgatatcacaaaagaactcaatagtttcttttggaaaaaaaaaaaaaaaacccttnttttntttaag

SEQ ID NO: 3383 - DNA, 2369 bp, Glycine max
  misc_feature (1162)..(1162): n is a, c, g, or t
atccttatgctccttagagaagaggcaaagtgaacaggaagaagcatcttgtttagaacttttggagtgtgtttctaaatcaaagagacatttagatcgtgatcttgataatcctaaaccatgcaagtctagaaagtcaattagttctagttcattattgtcttgcaagtacagcaagatctcattttgtggcactgaagaccatctatcagatggcttttatgatgcaggacgagatcggctgtttatgcctcttgagtgttatgagcaaaatcattgtcttgcttctcgtgaagtcatccttttggacagaaaaatcgatgaagagttggatgctgttatgctagctgctcaggcattggtttataatttgaagaagttaaatggtttaagcagatatgggaaccaggatggggttgataacttgcagatggcatcactgcttgcactctttgtatctgatcattttggtggcagtgatagaagtggtattgtagaaaggacacggaaatctgtgtccggttcaaactataataagccttttgtctgtacatgctcagctggaagcagcaccagtataagttctcccactgaaccagttgcaaacaccatagaagatatcactctttcgaagatgtcggaaaaatctctcgactctataaaaaaaaggcgaaattcgatcataattccaattggctctgtgcagtatggtgtatgtagacatagagctctgctttttaagtatttatgtgatcacatggagccaccagttccttgtgagcttgtcaggggttacctagatttttcaccacatgcctggaatatcattctgattaagaggggtgctacatgggttcgaatgttgattgatgcttgtcaacctcttgatataagagaagagaaagatcctgaatatttttgcaggtacatacctcttaatcgaaccacaattcctctatcaactataggatgtccaggtcctgattattcttttccatctctcactacatgtgatgaacttgagacaaaggcttcgactagtttagttaaatgcaaattcggatcagttgaggctgcagcaaaggtgcgtactttggaagagcaggggagttcggcagacaaaattaaaaacttcgaatataattgtttgggagaaattagnaattcttggtgctttaaaacacccttgcatagtggaaatgtacggacaccaaatttcatgtcaatggtctgtctcagctgatggtaatcctgaacaccgtgtattaagatctgcaatttttatggagttcgtggcagcggcctccgcccccacctatctggagaagctgtcagaagctggtgaaaagcatgttcctgtggagttggctttgcttattgccaaagatgtctcttgtgcattgtcagagctgcactctaggcacataattcatcgtgacataaaaagtgaaaacatactgtttgatttggataggaagagagatgatggaactcccactgtgaagctctgtgattttgatagtgcagtgccactaagatcaactttacatgcgtgctgtattgctcatgcgggaacacctcctccctgtgtatgtgttggaacacctcggtggatggctccagaggtcatgcggactatgtataaaaaaaactcctatggattggaagctgacatttggtcgtttggatgcttgcttttggagatgctgactctgcaaattccatattctggactttcagattcacacttccttgatagtctgcagatgggtaaacgaccacaattgactgatgagctgaaagtattgagttcaatgaatgaacccaccatgattgcatctggtgaagaactggaaaaatcagatgctgaggtagacatgttgaaattccttgttgatttgttttataagtgcgtggaagaaaatccaagcaaacgtcctacagctgaagaaatccataaaatgctgcttgcacacacaggtcacttacaagtttaagattttaggacgatttagttaggttattggagtggcccggtcctagcgaaatatatcattataagaaagtatattcattcttttttctccataatgtgtgttagggctaatccaagaataattgtttgtactaggtccaagtcttcagtgagttgtatcgtttgtatattattttcaaagggttagatccatgcggctctaatataagtctgattgagatctttatagtgtagctagatctctttcggattgtaaacgttgagacgaacatgagttcaaccattctgcaagtgtatctgattaatttattgatgccattgaattgaatcgaatcctctgattaaattattgatgcctttgagttgtatcccg

SEQ ID NO: 3384 - DNA, 1776 bp, Glycine max
  misc_feature (1595)..(1599): n is a, c, g, or t
  misc_feature (1629)..(1635): n is a, c, g, or t
tcaccacatgcctggaatatcattctgattaagaggggtgctacatgggttcgaatgttgattgatgcttgtcaacctcttgatataagagaagagaaagatcctgaatatttttgcaggtacatacctcttaatcgaaccacaattcctctatcaactataggaagtccaggtcctgattattcttttccatctctcactacatgtgatgaacttgagacaaaggcttcaactactttagttaaatgcaaatttggatcagttgaggctgcagcaaaggtgcgtactttggaagagcaggggagttcggcagacaaaattaaaaacttcgaatataattgtttgggagaaattagaattcttggtgctttaaaacacccttgcatagtggaaatgtacggacaccaaatttcatgtcaatggtctgtctcagctgatggtaatcctgaacaccgtgtattaagatctgcaatttttatggagtatgtggaagggggctccttaaaaaattatctggagaagctgtcagaagctggtgaaaagcatgttcctgtggagttggctttgcatatcgccaaagatgtctcatgtgctttgtcagagctgcactcaaagcacataattcatcgtgacataaaaagtgaaaacatactgtttaatttggataggaagagagatgatggaactcccactgtgaagctctgtgattttgatagtgcagtgccactaagatcaactttacatgtgtgttgtattgctcatgcgggaacacctcctccctgtatatgtgttggaacacctcggtggatggctccagaggttatgcggactatgtataaaaaaaactcctatggattggaagctgacatttggtcgtttggatgcttgcttttggagatgctgactctgcaaattccatattctggactttcagattcacacttccttgatagtctgcagatgggtaaacgaccacaattgactgatgagctgagagtattgagttcaatgaatggacccacaatgattccatctggtgaagagctggaaaaatcagatgctggggtagacatgctgaaattccttgttgatttgtttcataagtgcgtggaagaaaatccaagcaaacgtcctacagctgaagaaatccataaaatggtgcttgcacacacagatcgcttacaaatctaagattttaggaagatttagttaggttattgggtcgcccggtcctactgtcctagcgaaatatattcattctttttcttcatgaagtgtgttagggctaatccaagaataattgtttgtacttggtccaagtcttcagtgagttgtattattttcaaggggttagatccatgcggctctaatatataagtctgattgagatctttatagtgtagctagatctctttcgattgttaacgtttagacgaacatgagttcaaccattctgcaagtgtatctcattaatttattgatgccattgaattgaatcctcttattaatttattgatgcctttgaattgaatcctcttaagaaaaaaaaaaaaaatttgaattgaatcccctcccgttttattggaacgtattannnnngcccggttttggtactatcaatgtggggannnnnnnccccttaatataatttcgataaatacgttatattggctgttttcaaggaactgggaactctattttccttagatcaagatccgtacagttgtaaattgccgacaatacgatgaaaataaagtttgcaagccattttgaaat

SEQ ID NO: 3385 - DNA, 1762 bp, Glycine max
  misc_feature (1711)..(1711): n is a, c, g, or t
  misc_feature (1731)..(1731): n is a, c, g, or t
  misc_feature (1735)..(1735): n is a, c, g, or t
  misc_feature (1738)..(1739): n is a, c, g, or t
  misc_feature (1759)..(1759): n is a, c, g, or t
aggaaaacacaagagtccttttcccaatcgcacgcgcctcctctcaagtctcgaataatagatagactctaagcaatgatgttaacacttcaccccttttgggctgtttagtaacatcattccatacatttctctctaggccctacctttgtgtccgctactctctctaccccttccttttttctcacccttttgaaatttgagcagtagcactgttgctacacaacaacatcatgaacatgaacatgaacatgaacatgaacactaagagcaggttgatcaccctttgggttgtgctctatttttgttccatcacaaactcactagctgcttcaaagcagtgccatttccctgccatcttcaactttggtgactccaattcagacactggaggtctctctgctgcctttggacaagctggtcctcctcatggagagtcctacttccatcaccctgctggccgttactgtgatggccgtctcattgttgatttcttagccaagaagctggggctgccttatttgagtgcatttcttgattcagttgggtcaaattatagccatggagccaactttgcaactgctggatccaccattagaccccagaacacaacccttcatcagactggtggtttcagccctttctctttggatgttcaattcaatcaattcagtgatttccagcgcaggacacaattttttcacaacaaaggtggagtatataaaacattgttaccgaaagcagaagatttttctcaagcattatacacgtttgatattggtcaaaatgacttggcatccggttacttccacaacatgtccacggatcaagttaaagcttatgttccagatgttttggctcaattcaagaatgtaatcaagtatgtatataatcatggaggaaggtcattttgggttcacaacacgggtcccgttggttgtttaccatacatcatggatcttcacccagtaaaaccatcattagtggacaaagcaggatgtgcaaccccttataatgaagtggccaagttcttcaatagtaaattgaaagaagttgtggttcaactcagaaaagaacttcctttggctgccatcacttatgttgatgtttactcggtgaagtactctctcattagtcaaccaaagaagcatggttttgaggagccattaagagcatgttgtgggcatggtgggaagtacaactacaatttacacattggatgtggtgctaagattaaggctcatggcaaggagattctggttggaaagccatgcaaggatccgtctgtttgggttaattgggatggtgtgcattacactcaggctgctaacaaatgggtgtttgatcagatttttgatggttcattttctgatccacctattcctttgaacatggcttgtcataagcatctttaaaagaaagggtgctaaaacctttgtcctcttctctctgtatcttccctcctaattttgtgtttcctagaaaatattctttaggaaaaaagaaacaaaaatgttcacacatcttctctattaattttgagaaaaatctctaagttgatagggtcttattggaggaataaaattgagaacagaggatttgagtcatgcatggtgatgaggagtgagttcacacttgtaatcttcactgattgcggaggtttcctttcttttttactgaataatagagcttgaattgtttgcttccctcncctttaaaaatccccccccngttnttnnagggcggccgccgacttatngct

SEQ ID NO: 3386 - DNA, 2004 bp, Glycine max
ctcgagccgaagaaaggcaagtggcgagtgaggaatgcagagaaatgagaattcgtcattggctgagtccttctgaggcaggtggccctgccaaacgcagaagctccggcagaaattgccaccgcaaacacgtcgaagacgggtagtaatagcactcggtttcattctcccacattcccaattctgagcgttaagatgagtgagaaagagaaaggcaataatagtgagggacagtcgacgttgctgcacggcaagtacgagcttggtcgtgtgctggggcacggaacgttcgccaaggtgtaccacgcgcggaacctgaatacagggcagcacgtggccatgaaggtggtgggaaaagaaaaggtgataaaggtcggaatgatggagcaggtgaagagggagatctcggtgatgaagatggtgaagcaccaaaacatcgtcgaactccacgaagtcatggccagcaagtccaagatctatattgccatggaactcgtccgcggcggagagctcttcaacaaggtctctaaaggccgcttaaaggaggacgtggcaagactctacttccagcagttaatctccgccgtcgacttctgccacagccgcggcgtctaccaccgcgacctcaagccggaaaacctcctcctggacgaacacggcaacctcaaagtctccgacttcggactcaccgctttctccgaacacctcaaggaggacgggctgttacacaccacgtgcggcacgcctgcgtacgtgtcgcctgaagtgatagcgaaaaaaggctatgacggtgccaaggctgatatatggtcatgtggtgtaatcctctacgttctcctcgcaggctttttaccctttcaggatgataatttggttgccatgtataaaaaaatttacagaggggacttcaagtgtccaccctggttctctcttgatgccaggaagcttgtcaccaagcttctcgaccccaatcccaatacaaggattagtatttccaaagtgatggagtcttcttggtttaagaaaccggtgccgaggaagcttgctgccgaaaaggtggatttggaggaggagaagattgagagccagctggagaccatcaatgctttccacataatttccttgtcggaggggttcaatttgtcgcccttgttcgaggacaagaggagggaggagatgaggttcgccaccgcggggacgcccagcaccgtcatttcgcggctggaggaggtggccaaggccgggaagttcgacgtcaggagtagcgagaccaaggtgaggcttcagggtcaggagcgtgggaggaaggggaagctggcgattgccgcggatatctacgccgtgacgccgtcgtttatggtggtggaggtcaagaaggacaatggggataccttggagtataaccagttctgcagcaaacagcttcgccctgcgcttaaggatatcttctggaattcctcccagaattccgcacctgctagtgcttgaatgatgtctgattctcgtttttgttcaggaactttgagttgttgataagatctttctctctgtcgcccagaattgtgattgaggatataaaaagagaatcaacaacggatgattcgatatgcatgaaggttaattgattctctcatgtttgtgtttcaatttgttgaaagttactttcacctttttcttttctttcattgctgcctttgctctttattttgttccttctgtagattattatgtccttgagccttcacgagtcacgcctgtgcctaatacaaagaataggaattcgacttttttgtggcgtttcgttcttgttgagaaactcgtgtatgtgattgaggaattgcttctttggttgcatcactatcccaccccttgaagaattgctcgcgcgaaaaaaccttcaaaataaactttaaaggataaatcatcttttaatccttcataatataaacagctatcaaaataagaaaatacaaaataagtcctcttgctatctgcttcagaaaa

SEQ ID NO: 3387 - DNA, 1886 bp, Glycine max
caatagttgcagggcgtgtagttccaaatgcctcagccattggaggcttcgccaagggcacagccttaggaggagcccctttggcccgtctcgccatatacaaagcatgttggccaataaagggaaagtcaaaacacgaagggaacatatgcacaaacattgacatgcttaaagcaatagatgatgccattggtgatggagttgatgttctaagcatttccatagggtgcagtgcaccaatttcatatgaagaggatgtgattgctaggggtgcgttgcatgctgtgaggaagaacattgtggttgtgtgtagtgctggcaactctggccctttgcctcagactttgtcaaaccctgctccatggatcatcactgttgctgctagcactgtggaccgttcttttcatgctccaattaagctcagcaatggaacaattattgagggtcgatctattactccactccacatgggaaacagcttctacccattggttctagctagagatgttgaacatccaggcttgcctagtaacaattctgggttttgcctagacaatacccttcaacccaacaaggcaagggggaagatagttctctgcatgagagggcaaggagaaagactgaaaaaaggcttagaagttcaaagggcaggtggggttggttttatccttggcaacaataaactaaatgggaaagatgtaccctctgatcctcattttattccagccactggggtgtcctatgagaattccttaaaacttattcaacaggttcattctactccaaatccaatggcacaaattctaccaggaacaacagtgttagaaaccaaaccagcaccctccatggcctccttctctagcaggggtccaaatatagttgaccccaatattctgaagcctgacattacagccccaggagtagacatattggcagcatggaccgctgaagatggccccacaagaatgacatttaacgacaaacgagtggttaaatacaacatcttctctggaacttcaatgtcatgccctcatgttgctgctgcagctgttcttctcaaagccatacaccctacatggagcactgctgctataagatctgccctgatgactacagccatgacaacagacaacacaggtcatccattgactgatgaaactggaaatccggcgacgcctttcgcaatggggtctggccacttcaaccccaaaagagcagcagatcctggactggtttatgatgcctcctacatgggctaccttctttacacttgtaaccttggagtaactcaaaactttaacattacatataactgtccaaagtcatttcttgaaccctttgagctcaactatccatccatacaaatccatagactctattacactaagactataaagaggacagtcaccaatgttggtaggggcaggagtgtttacaagtttagtgccgtgtcaccaaaggaatactccatcacagccactccaaacattctgaaatttaatcatgttgggcagaaaattaacttcgccatcacagtgacagcaaattggagtcagataccaaccaagcatggcccagataagtactattttggatggtatgcatggactcaccaacatcacattgtaagaagcccggtggcagtgtcttttccataaaataacattaagtcttcttattttcattaatttattgaagtgctttttccttctgacattttcttatgctttccaaaggccaaaggccaaataattggagaatcttgaagagacaggatacagattatgagtggttgagctaggaccatatgcttaaaaatgtgaaagtaatgttatttgaggattaaatacaagatcaacactaatgacatcattgtttttctgccc

SEQ ID NO: 3388 - DNA, 1237 bp, Glycine max
tcagctacgtaggcccccccccccgttctttctagagagtgtcatttgtatcgtaaatcttgtatagacagtacaaacgcagaaaccgcgaaattcggctgcgagaagacgacagaagggggtgcctaaaatcgatgacttcgcaaaatggtgacgagagccaccacccaccaccgcaagcgcaagctgaaaaggttactgaagttggatggtacgttcttggcgaggatcaacaacagattggcccttacgccttctctgagttgtgccagcatttcttgaatggatacctctccgaaaatacgtttgtgtggtctgaaggaagtagtgagtggcagcccttgtcctcggtttctgacctgtgggctcaaattaaccggcagggacctgattcttcaactactgtgtctgctcctgatgttgatgagtttgaaagatggcaaaaggagattcaggaggtggaggcacaggtggaaggttcggaatttggatccttatctggcaatgttggtggtactggggcaggagaagattctgagagaccttcgacgccacctgagggtgaagaaggatttactgatgatgatggaactgtatataagtgggataggagtcttagagcttgggttccccaggattatccaactggcagcactaagccttatggggttgaagagatgaccttcttggaagaagaggaagtttttccaacaatacctaattctgatgcctctgaaaagtttgaagatagtccaaaattgagtgtttctgtgcctcccttaaaggaagaagaaaataataccaatgtgatatcaggtggaaaaaggatgctttcagatcaacaaacagacaagaaggaagctaataaaccccctgatagttggtttgaattaaagattaatacgcatgtttatgtcactgggttgcctgaggatgttaccactgatgaaattgtggaggtattttccaaatgtggaattataaaggaggaccccgaaaccaaaagacctcgtgtgaagctctatgttgataaagagacaggaaggaaaaagggagatgctctggttacatatcttaaggaaccttctgtggctttggcaattcaaattttggatggagcacctcttcgccctggtggcaagattcctatgtctgtcagccaggctaaatttgagcagaaaggagacaagtttgtatccaagcaagtagacggcaaaaaaaaaaaaaaaaaaaaaaa

SEQ ID NO: 3389 - DNA, 1299 bp, Glycine max
taagatgcaataaaagtggcatgcaagatcattattgaaagcagacaatatccaggcacttttcgtgtaataaaaatgcgtacacttcatagtacagaaaattttgctcattgcaaaagaaaaagaaatactgctaaacttataggtagtccaaagtgaagtttcatattggtggcagatacgttataacaattggacttcttaccttgtgcacaccatccttccacaccagacctccaaattcaggttctgtttggcgagattgtgttgttaaggtaattttgtaagatagtttctggtattttcttgtaaaactcaaggtgtctggctcaactttaacagaagcacctttaaaaggtgaaaccacaacatggtacttggaaactggaagaccaacattggtggcagttctgtgaacagtcaaaactgaagtggaatttttcagtggaaaaactacagatatggctggatagttcaagtcccctggacttgaaagagagtgcttgcaagttctgtttgaatacttggcaaaaactccaagctcagatgtagtaagcttctgtgtgcacaggaattcaaagtagtcctgtggctgaatatcatagaccaaacctgggtcaagagctcttctagggttgatgtgtccggcaccatgatcataaggagttgaggcttcagcatttgaggcatctctgagaggcttgatggtattgtcatgaacataagctgtggtcatcaaagcagattttatggcagcgggactccaatctggatgcctagccttgagcaaagcagcaatgccactcacatgagggcatgacattgaagttcctgagagtatgttgaacttcacccttctgtgatctgttggcaaacttgatggaccaatggcctcactccaagcagcaagaatgttcaccccaggagccaccacatcaggcttcagaatttcaagggtgagaaaatttggccctcttgatgaaaatgctgccactacaggagatggtctaacccccaaccttgtagcctgaaaacctagagttgcagtggcctggtgcccgggtctcacgtttcgtttgagctcttttccttccttttctccaattgcaactgctggaaggaggtgacaatcagcaaccagctcctctccattggctgcagtgtttgtgagaatcattcccgcccctcctgcatttttcaccacttgacccttctgcactcttggactaatgcctctgtcacaaataacaatcttgcctgaaaccattaaacgatccaaagtaccttacaagcacacga

SEQ ID NO: 3390 - DNA, 2460 bp, Glycine max
caccatcaataccgggccccaggctcgggtttacaaattaaaaaaggatgttatagaaagattacttgagtgaagaagaactcaatcactctgagttgttgttcataaagaagactgcgtttgtgatattttctcctaccatgtctggctttctttgaactttcactcgcagcttcttattcttgtgatctaagttcctctactctcattccaagcgtgggtgtatatcaaggatccggattccttgtggtcggaggaagcacgcatgcacgcagttagacgattagaactgtcataaagattcaacagttgatgaattattttagtaaattcaacttaaaaaacacatttaaaatactaactgtctgatcaaattagacagtccacattcacgattgtgtgaatgcgtgagtgcaggtggagtgatataaaatggaggagagaccagaaacagaactgatatctataccggcgacaccaagggtgtcaaccccggagatactgacaccggggcagaggtcaccaagagcagcatcaaaggaaggaaaatcatggaccccaacttcttttatatcaccaaggtttctgagtccaatagggacgccaatgaagagagtgcttgtaaacatgaagggttacttggaggaagtgggacaccttaccaaactcaaccctcaagatgcttggcttcccatcaccgagtctcgcaatggaaatgctcactatgctgcatttcacaacctcaatgctggtgttggctttcaggccctcgttttgcccgttgcttttgcttatcttggctggagttggggaattctttccttaaccatagcatattgttggcaactttacacgttatggattctggttcagcttcacgaagcagttccaggtaaaagatacaacagatatgtggagctagcacaagcagcatttggggaaagattaggagtctggcttgctctcttcccaactgtttatttgtcagcaggaactgcaacagctttgattcttataggaggggagaccatgaaactgttcttccaaatagtttgtggtcccacttgtacttcaaatcctttaaccacagtggaatggtacttggttttcacttctctatccattgtcctgtctcagcttccaaacctcaattcaattgcaggactctcactcatcggggcagtgacagccataacttactccaccatggtttgggtactctctgtaagccaacaaaggccaccctccatctcctatgaacccctatctttggcacaaccttctgcttctgtatttcttgccatgaatgcacttggaattatagccttttctttcagaggccacaatttggccctagaaattcagtccacaatgccttcaacttttaagcacccggctcgtgtgccaatgtggaaaggagccaaggttgcttatttcttcattgcaatgtgcctcttccctattgctattggtggcttttgggcgtatggcaaccaaatgcctcctggagggattctcactgctttgtatgcatttcacagtcatgacatctcaagaggaatactagccttagctttccttcttgttgtgttcaactgtttgagcagtttccagatatactcaatgcctgcttttgacagttttgaagctggttacaccagtaggacaaaccgtccctgctccatatgggtgagatcaggttttagagtcttctatggatttgtctccttcttcataggagtggcacttcccttcctctcaagtcttgctggtttgttgggaggactcactcttccagtcacttttgcatacccttgcttcatgtgggttctcattaagcagccaccaaaatatagcttcaattggtacttcaattggattctgggttggctgggggttgcttttagcttggccttttccattggaggtatttggagcattgtcaatgatgggcttaaacttaaattcttcaagcccaattgaatttttaataataggccatgcaaatgcacatgcactatatggtaatgctactctttaggcgtttcccaatggtctaataatatagttagtgcatgtcttcttccgccctaagctatctttggtggaagatttggttgtattgtgagaagtggtggtaaaaggaaagccaataattaatgaagagaatgatccttgtatgtctaagtggagacagagttagaccttgcaagttactaaagtttaaagagtatctctccatgccttcaccgttcctcttgttgtggttctcttttcactgggtgatatagcttgttatgtttagaacatttaatggtttgctcttattcatttttgtagagacctccagaacaaccccccctcccccaacaaaaatcgtcaaactctttcaaattaattgtacgttgtaacccgtgtggtttcaaaagttaatttctcagcgaatcctcctttcaattt

SEQ ID NO: 3391 - DNA, 1346 bp, Glycine max
cccacgcgtccggctccgtaggcccccccccccccccgtgatcctacactgcaccctctccgctcctgttcgaaccttgccgccgtcatcgacgagaaggaacaaatttgaatttgaagaaagatgggagagaggaaggtgttgaacaagtattacccaccggactttgatccgtcgaagcttcccagagcaagaaggccaaagaaccagcagatcaaggtccgcatgatgcttccaatgagcattcgatgcaacacttgtggtaattacatctacaaaggaaccaagttcaattccagaaaggaagatgttattggcgagacatatctgggaattcaaatattcaggttctactttaaatgcactaagtgctcagctgaggttaccatgaagactgatccgcagaattcggattacatcgttgaatctggtgcgaccagaaattttgaaccttggcgtgcagaagatgaagaagctgataaaacgaaggagaagagggatgctgaagagatgggagatgctatgaaatcgttggagaatagaaccctggattctaaaagggagatggacatccttgctgcattggatgagatgaagtcaatgaagtctaggcatgcaactgtcactgttgatgaaatgctggaggctctgcagcgcacagcagctgacaaggagaaaaggctggaacaagaagatgaagctctgataaaatcagttgtctttcataattcagacggttttgtcagaagaattcgtgatgaagatattgaaacagaggagcaattggatcagttttcaaatggacatggcgaaacatccagttctaatactaagaggcaaaagatttcagaagattgtccaagcaaaccaactgacactctgacaaaagccagtttggatgattctggcaaacaagaaaattcacgcagtggtggaaagcttaattctttagtgaggatttctgtcattaagaaaccagtgacctctgacgttaaaagtcctgcagaaccagaacaaaagaaacaagagaaagataatgaaacaaatactgctagtggactattatctttgtgtcaaaattacggaagtgatgatgaggactagtagtcataaatattgaatgactttttgtttaactgttgctcattagattgtaattgtaagttgtacttgcaatggaatgtgtgtcatatgcatatttcttgtatgactagaatagaaatacacagttttcgagctcttacagaaatctgcagaaatgctggttatgttgtttaaggagaatggaagaaaaaaaagcataaattagactgatttattttatttgcaaaaaaaaaaaaaaaaaa

SEQ ID NO: 3392 - DNA, 1486 bp, Glycine max
ataacatacatcactgacccataacataataaacctttttttttccgtctcgctcccgaggccccccccccccccgaccaagatcttcttcagctccttcatagtttcagattgaattggtttttgggcaccaaatagcaatggccacggtggagaggatcctgttggccctgcaaaatgagggtgcaggaggagaatccttgttggggtcaatcaaaattgctgtgatgcccatagttaaagtgttcaccatgtgctccttgggactccttatggcttccaagtatgttaacatcttgcctgcttctggaagaaagcttttgaatgggctggtgtttactctcttgctaccttgcttgattttctcccaattgggacaagctgttaccttggagaagatgcttgcttggtggtttattcctatgaatgttgttctgagttccatagcaggctcactcattggttttgttgttgccacgattgtccgtcctccataccctttctttaagtttacaattgtacagattggaatcgggaatattgggaatgttccacttgtcctgatttctgctttgtgtcgagaccaatccaatccctttggagacatggaaaaatgcagcacagatggaactgcctatatatcatttggccagtgggttggtgctatcatcctatatacatatgtatttcaaatgttggcacctcctccagaaggctcatttgagattgataatgaaagtgttcccttaaagagcactccaatgagtgatgctacacctgaacaagctccattgctcgctaaggaggagggggtcacttcaacagctcaaaataagaagtgggagattaaagacgtcttggcattcctgtatgagaaattgaagcttaagcaaattcttcaaccccctatcattgcatcaatccttgccatgacactaggggcaatcccatttctcaagaaactgatctttacacctgatggcccactgttcttcttcacagacagctgcatgatccttggggaggccatgattccttgcattctgttggcactaggaggcaaccttattgatggacctggaagttcaaagcttggttttcggacaactgctgctattatttttgcacggttacttttagtgcctccggttggacttgggattgtcacgttggctgacaagcttggttttcttccccctgatgacaagatgtttcgatttgtcctcctccttcagcattcaatgccaacatctgtccttgcaggtgctgttgctaatttaagaggttgtggaagggatgcagctgctgtactgttttgggttcatatttttgctatattctcaatggcaggatggattattctatatctaaacatactcttctgagactgtatatagcaatttgatccaattcattttgatgctagattagtggagaaacaccaatattttatacaaagagcctttatatgatgatcacgatcaaa

SEQ ID NO: 3393 - DNA, 1269 bp, Glycine max
aatttctcatggaagatggctacagttttgaaggtttttgggaaaaaccacattttggtcaggctacttggatcttctttggaatttcaagtgagcaaatttgacattcgggtgagacagtcttggcaagatgacaagtggattatagttggaaagggttcttccagccatgaaaacagaaaacgttctagcgcccaacttcagaagatgtatacaaagacaaaactgtcaggttccgcttactatcgtcctgaaaagaaaaaactgagtattctggaatccaaactcgtttcttttaaaacattgaaacgaggaagcaattcacaagttgacgcatatgctaagcctcccccaaagtttagagcacgtgaaaatgaaggcagatgtcacagagcaagacttagaaatccacccacaccactcaaacaggtacagggtgtcagttttccaagagaagtgatcgctgaagaatgcatacctgcttctgtaaacaacagaaaaactgggatttctaatatggttgacatggagaggaggaaacagacaggagaaaacttagaatcaaatcatgcttatagtgttacatgctctgttggtagttgtagtatcactagcaggaattcctataaatcgcaatttcctgtatatgcaggtcctggcgcggatgtagacagttcatttagtgatgctgagtctgtctgccagaggagtgatgaggaaggggattgttcccctcctacacaagaggaattggcggcagaaattcataggttagagttgcatgcctatcgttgtacaattgaggcattgcatgcatcaggccccttaagttgggaacaggaagcattaatgacaaacctccgtctttcgctccacatatcaaacgatgaacacttaatggagctaagaaatttgatttcttctgaaaacagcattcctttcagatgacaggaatttttttcctcttcaatttaatactttttccctaggatagagtttcggaatagtttgatctcagcctcattcaactgtaagaagaaagatgaaatatttcggtccttcatttatgttttatgacttagtgatatagtttgatgtgaatgtacatgctaaacttcgtaaataagtgatcatttctgaactcttgttaatcaaagaaaaaaaaataacctcaaatttccataggcttgtctggagacattctataccggatcttttgaacctttgtacatttagatttgcagacactgtagactgactgatactgga

SEQ ID NO: 3394 - DNA, 1706 bp, Glycine max
gtcaggcggccccagtcgtagcagcaccttagtaccttgaatcattatcattcgggtaatggacacatcactagtgtttactgtgaggaggagtgaggcagagctgatagctccggcgaagcccacccctcgtgaagtgaagctactctcagacatagatgaccaagatgggttacgtttccaaattccggtgatacagttctatcgccacgacccatcaatggcagggaaagaccctgtcgatgtgataagaaaggctgtggccaaaacgcttgtgttttactatccttttgcaggtaggcttagggaaggacttggtcggaaactgatggtggattgtactggggaaggtgttttgttcattgaggctgatgcagatgtcactcttaagcaatttggtgatgctcttcaacctcctttcccgtgctgggaggaactcctttatgatgtacctggttctcaaggagtgcttaacactccccttctgcttattcaggtaacgcggctcaagtgcgggggtttcatattagctgtccggctgaaccacacgatgagcgacgcagccggtctggttcagttcatgagcgcgctgggagaaatagctcgtgggaggcaggagccgtcgatcccaccggtgtggcgcagagagctcctgaacgcgcgggacccacctcgagtcacatgcacccaccgcgaatacgaacatgtccctgacaccaaaggcaccatcatccccttagaccacatggcccatcgctctttcttcttcggccccagtgaagtcgccgccatccgctccctcatcccccaaactgatcaacgctgctccaacttcgaggtcctcaccgcatgcctctggcgctgccgcaccattgcgctgcagcccgacaaagacgaggaggttcgcatcctctgcatagtcaacgctcgctccaagtttgaccctcctctgcctagcggttactacggcaacgcttttgccttccccgttgctgtcaccactgcggggaagctgtgcgataaccctttgggatacgctctcgagttggtgaggaaagccaaagcggatgtgactgaggaatacatgcactcggtggctgatttaatggtcaccaagggccggcctcacttcactgttgtgagatcgtatctcgtgtcggatgtgactcgtgctgggtttggaaacattgagtttgggtgggggaaggctgtttatggaggacccgccaagggaggggttggagccatacctggtgttgctagcttttacataccctttaagaatgctaaaggagaggaagggttggttataccggtttgtttgccttctgaagccatggagaggtttcagaaggagttggactgtgtgcttaaccaccacatcgtccaacctagtgccattgctccaaactctaggttcattgtttcttccttgtagatccagtacttttcgactttacttcgtgccaattaaggaatcaataattgagcatttgatgtcatcgagtacgtatgtataatcaacaagccagtggcagcaagagaagaatcacaattactattacctactcctccttgatcagtctataaatgtcgtgaattgtgaaaattttattggctttaaaagctatgtattcacatttgacagcgttttgtcaagataataattatccaactagtattattaattaaaaaaaaaaaaaaaa

SEQ ID NO: 3395 - DNA, 1022 bp, Glycine max
  misc_feature (1014)..(1017): n is a, c, g, or t
gcatgacggaagagctctctctctctcttgttcttatccatcgcattgaaaagcagcaccatcaccacccccacctcttaccccttctttcataaatatgcgtctctgcaacaacatgttcaccaccacctccttgttcttcacatcatcctcatcatcttcttcaatcagttgactcttcgttcctccctctattctttcggatggagcccatggacatcgttgggaaggccaaggaagacgcttctcttcctaaagcgacaatgacgaaaattattaaagagatgttgcccccggacgtgcgtgtcgccagagatgcacaggatttattgatcgagtgttgtgtcgagtttataaaccttgtctcgtcagagtccaatgaagtctgtaacaaagaagaaagaaggacgattgcaccggagcacgtgttaaaggctttaggggttcttggatttggcgagtacattgaggaagtttatgcagcatatgaacaacacaagttggaaacaatgcaagattctttaaaaggtgcaaagtggagcaacagagctgagatgactgaggaagaagcattggctgaacagcaaaggatgtttgcagaggcacgtgcaagaatgaatggaggagccattcaatccaaggagccagaggctgaccaaagtttagagagctaactttataggacacttttattttcttttgaagcataggcaagcagcatctcttactcttccctatgcgttgttaatttagctcgattttgcacatacccccattcactagtttgctggcctacgtgaatgtactcgccatttgtgttcttttagtaatccatatttgtaagttaatgtaattattggagttcatctaaaccctcgtctatttagaattttacatgtagattatttcatttacctgttgtatctcccacaccaacaacagctattgccttgattttgacaatagttgctatattagaatgtaacaatctattctattctgttatatagaaannnngtgta

SEQ ID NO: 3396 - DNA, 1511 bp, Glycine max
tcagctacgtaggcccccccccccaagagccactcacatcatcacatgtacaatgacagccaaataacagtcacatgatgactcattacaccctaaccaacgaacgacctccctcaacaataattcttctgatccgtttcgttcaaatcaaaataaaaaatcgcctctttggaacgctgcctccttctgacaaaaaaacattgtaccatccgaaatgtcggccatggtggaacatacggatcaaagagctgaagctattccccaatccacagctgcaccaaattggactattcatgtgtcagacataaaaacagttaaggttagcaacatatcattggttactttcaagaaggacattgaagaattcttttcattctcaggtgatattcgatatattgagatgcaaagggaaagtggtcacactcaggttgcttatgttacattcaaggatacacagggagcagacacggcagttctcttaacgggttccaagataggtgatctatatgtcaccatcacacctgtggagaagtatcagctgccccctgaagcacttccctcaagtccaacaaaccaaagccctgatgcagttaagaaggctgaagatgtaatgagcaccatgcttgctaagggtttcattttaggaaaggatgctatcaacaaggcaaaagcctttgatgaacatcatcaattaacctcaaatgcttcgtccacagttgcttccattgatcgtaaaataggtttaagtgataaactaagttttggaacagctgttttcaatggaaaggtgagagagatggatgaaaggtatcagctttctgaaatgacaaagtctgctatggctgctgcagagcaaaaggcaagtagtgctggatctgccatcatgagcaatccttacgtaaaaagtggagcttcatggttttctagtgcctttactgctatagcaaaggcagccgaggatgtcagcacgatgaccaaggaaaaggttgaacaggctgtggtggaaaggaacgagatcatttatggtgaaaggaaagggactgttgatgaatttgcaaagacgcacttagaggaggcttcagacattggccctgcagtagttcctgttaattcagatgatgacagaaagctggcaacaattttataactcaagttaattcagaatcccttattcccacgtacacagttggatttatttagttaacatagttattgtcagatttcagttcctgcaagtttgctgtacattgataagtcttcttgattgttatagtgatgtaaaggtttgtctgacagatgtggtgcctaaatatggtcaacattcatttcaaaaaattatttgttatttgttaaaaaaaaaaaaaaaaaatcattcagttctccctttaggtcatatgttttcagagagattttaatacaaacaggacgatcagtataatttaatattgcagaacattatgtcatcgagagcatgccagataaaaaaaaaaaaaaaaaaaaaaaaaaaccac

SEQ ID NO: 3397 - DNA, 1043 bp, Glycine max
ccacgcgtccggatttctgttggtgccactcggcacgaggcttcaacacctgctataaaaaacccagtgaatggtatgcagaaatcactcccttcgaagaatcatccatccattccaaaacagattgtagaacaaagaatttcgaagcacagtgttgaacaaagaattccaaagcagagtgttgaacaaagatttccaaagcagagtgttgaacaaagaattcaaaagcagagtgttgaacaaagaattcaaaagcagagtgtggaacaaagaaaagacatacgagaactatatagacctaaaatggcaccaaaacaaccagtggcatcatcaaaaccacagataaataggccacttaaacaaaattcagtgcatactgcttcgcaagatcgtcgtcccaagcctaaggctgctaaacgaccctttgatgatgaggaggacgaagtggatgtcaggaacatgatcagaaatatgtttaattacaaccctaataaatttgttgatgatgatgacgtcgacgatatggaggcaggctttgatgaaatcttgagggaagaaaagaggagtgaaatgattgctaaaaaggaggacgaggagcaacttaggttaatcgaggaggaagaggaaagagagaggagaagaaaaatggcaaagttaaagaaacggaagcttggttattagtagttagtagtaacatgtcaatgattttagtataatgaaaattctctttttccaagggcagtttaatcgtgggattaaattattctattcaccaatgaagattgaaaaatattcgccctcacattgagcttgtttcagtttgaatttacatagaaaagatataccgttatgtaaacgcagtttcgtttatagttaacgtaagggcagtggtggggtttttgcattgtgtatgattttgagcgtttggcacatttattggccgtcattatacgcagtggatggattgaaagtgagatatattgttcacccttttgcttcatctattcttctgagcagtgtatgctatgttagtgttgggagcg

SEQ ID NO: 3398 - DNA, 1383 bp, Glycine max
  misc_feature (1351)..(1353): n is a, c, g, or t
  misc_feature (1373)..(1381): n is a, c, g, or t
atccatttcttatgaaagttttatcctttatttcttccatctcctaaaaaggttagcttgacagtttaatgagatgataaattgcaatattggtctttttttgctacaatttcatagctaactgaaaatgcgtaatcagtgattgtttcatgctttctaaataatctgtaaagtttttattttgatggatttatttggatcttttttccctttttaattttgaaggattataggcaaaaacatccagaggtatctgtccttgatcctccggatgcaatccaacatttacacaatcgccaatccatgctgcaagatgtggtggatctgaacttatctgattgtcatggcaaggttggtgttccacgtcagctagttatcccaaaagagaaagacccctctagtatcccttacgaaatcactaaggctgggatgaagttgccattagttgcaaaaccactagttgtggatggcactgcaaagtcacatgaactatttcttgcttatgatgaattctctctttcagagcttgaacctccactggttctaccagagtttgtcaatcatggtggtcttctctttaagatttacattgttggggaaaccataaaggttgtgaagcgtttctctcttcctaacatcagtaagcatgagctatcaaaagttgctggtgtattccgttttccaagagtttcatgtgcagccgcttctgcagatgatgctgatttagatcctaatatcgctgaacatccgccaagacctttattggagaggcttgcgagggagctccgccatcgattgggactgtgcttgttcaacatagatatgattcgagaatatggaaccaaggatgtgttttacgtcattgacatcaactactttcccggatatggaaaaatgccagactatgagcacgtatttacagattttctacttagcctagtgcagagcaattgtaagaagaaacttgctacctaaactagagcaagttttagtagatcagatccattgagcagggctgttcttgctggtggctttcttaataatttatgcaaactactctggaatttcaatgaagccaccaaaatgttgaaaaaaaaggttgaaataggggctgtctgtctaatttccccctctctcaataatgagcgaaaaatgcctttattgtaagctatatatgcttatatccaaatcaatgcaaattttggtggtgctaaataactgctaagatttaaatttcattcgtaaaagttccgaatggttgatttatgaccttttcagaattgtttatttttattccaccgggtaaaaagatataaatgttcctaaatttggacgagataatcctccgccnnngcaagatcatgcaagcatgnnnnnnnnnaa

SEQ ID NO: 3399 - DNA, 1521 bp, Glycine max
tcagctacgtaggccccccccccacaattacacccaaacccaatcctcttcctcttccctcaaatcataacacattttctctctttcccttctctgttccgttccttctcgcgcgatttgcatattccgaaattgagaaccccacccgcgcgaaaattgaaggcagagaagggcaaaagatttgatctttcaaacgaggagtttctggggtgtcccaggatgaggctaaacggtgaaatctcaagcggagaagaagaagaagaggagaaacaaacgggaacgacgacgttttcgtcgcagaaagtggtcgttggctacgctttaacgtccaagaaaaaaaagagctttctgcagccaagtttcaccggtctcgcacggaacagggggataaactttgttgctattgatctaaacaagccactaccagaacaaggtccttttgatattatcttgcataagttgtccggggaggtttggcgtgagattattgaggattatagggaaaaacatccagaggtaactgtccttgatcctccggatgcaatccaacatttacacaatcgccaatccatgctgcaagatgtgttggatctgaacttatctgattgtcatggcaaggttggtgttccacgtcagctagttatcacaaaagagaaagacccctctagtatcccttatgaagtcactaaggctgggatgaagttgccattagttgcaaaaccgctagttgttgatggcactgcaaagtcacatgaactatttcttgcttatgatgaattctctctttcagcggttgaacctccactggttctacaggagtttgtcaatcatggtggtcttctctttaagatttacattgttggggaaaccataaaggttgtgaggcgtttctctcttcctaacatcagtaagcgtgaactatcaaaagttgctggtgtattccgttttccaagagtttcatgtgcagccgcttctgcagatgatgctgatctagatcctaatatcgctgaacatccaccaagacctttattggagaggcttgcaagggagctccgtcatagattgggactccacttgttcaacatagatatgattcgagaatatggaaccaaggatgtgttttacgtcatcgacatcaactactttcctggatatggaaaaatgccaggctatgagcacgtatttacagattttctacttagcctagtggagagtaaatgtagtaataagaaacttgctgcctaaactagagcaggttagtagatccattgaacagggctgttcttgctggtggctttcttaaaaatttatgcaaattagtatggaatttcaatgaagccaccaaaatgttgaaaaaggtcgaaatagggtctgtctaatttctccctctcaataatgagcgaaaatgcctttattgtaagttataatatatgcttatatccaaatcaatgaaagttttggtggtgctaaataaaaaaaaaaaaaaaaaattcattagtaaaagttccgaatagtttattt

SEQ ID NO: 3400 - DNA, 996 bp, Glycine max
ccaggggttctggaatctcctctgcgtcaaaagcgtgcaggttttttgtgttcttatttgttagtccttcctgagagctgaatttcccggcaaacaaaaacaggtttttgtggtgttgaagatgttcaagaacacattccaatctggatttctttccattttatacagccttgggagtaaacctttgcagatatgggacaaagaagttgttgatggccacattaaacgactacaggatgaagacatacagtccaatgtactagaaataattggatcaaatattcagtccacatacattacttgcccagctgacccagcgacaacgcttggtataaagcttccattcttggttattattgtcaagaatctaaagaagtatttcacatttgagattcaagttttggatgataagaatgtcagacgacgatttcgagcttcaaattttcaagctgtcactcgagtaaagccctacatttgcactatgccactgagaatggatgagggatggaatcaaatccagtttaacctggttgatttcaccaagagagcttatggtactaattatgtggagacactgcgagtacaggtccatgcaaactgtcgcctgagaaggatatacttctctgatcgcctgtactctgaggaggaactcccaccggagtttaaattgtaccttccgatgcagaaatcatgaaaatgttgtgggaggaaggaattgggttcacgagagttggatgtttttatttatatatgtactacgtacaattctgcctgttggcttctttatctatgttatgcctgaactaataagaacatttgcaactgttcattctagtcacattcagctggatgatgttctgatgcttgtctctgtaatattggatgtcaattttgataatggtttttgtgcttttacatgatagtgtcttaccgaagatagaggatgataatgttttaagtgcactgcattcttaataaaaaaaaaaaaagggcggc

SEQ ID NO: 3401 - DNA, 1039 bp, Glycine max
  misc_feature (913)..(913): n is a, c, g, or t
tcagctacgtaggccgccccccctttgaaagattgggctcgcggttccttgatgttgcaagagaggctgaatgcactctctgctgcagtcaatgcactgcatcttgttcatcctgcatatgcctggattgattcattagctgagggaagttctattgtgaatgaacattatccaagtaagaaagctaaaaagaaccccagatgaacattcagcagctgataatgatgctgagcctcaaggttggcagtcctctattgatattgaaaaacttgagaatgagtttgtgctaacttcagcagagtatatgctgtcactggtaaatatcaagtggacattttctggaaaacatggagctctatcagacttggctgatcttcttgtccaaaacaatttatatgatatggcttttacaatccttctcagatttttcaagggttcaggactgaagagggaactggaaagagtgttgtctgctatctcattgaaatgctgtcttgacaaagtggaatcctcttgggttgaggaacacagtcatttattgacctcatcaaagcatgagatggttgcccatggttcacctgctacagtttccacaactccacaaactgacagaaacagttgttgggcaacactcaagctttaccttgttcgtatcttctgctaccattagatgattttacatttttatgcttcatctattcataactggttttttaatgtcattcaatgaataataaagggcattccccctcatcctatgagttaccttttgggattgagttagactcaaaaacccacattctaagatgctttcagcctattctagatccattcaaaggatcacccaccatgttatccacgcaccaagcccaaaaggattgggcatgaggagggtgtattgggaaaaacctangttctacattggctagtggtagtgccaagatagagtatataagtgggggggacacccctcaccctatgagctagcttttgggattgagttaggcccaaaaaccctcattctaaggccacctaaaca

SEQ ID NO: 3402 - DNA, 922 bp, Glycine max
agaccattagctgtttggttcccatacacaactattgagcggctactataccaacttgaggaattaatcagaatgggccacatggtagatcactgtgacaagctcaaaaaaatgttacatggttctttacagaatcatctgaagatgttgaaggtggactctgatgatgctgtttctgtatcttcttgattgctgcttacactgaccaccggaggttgtagatactagagtgttcacgttgctcttaattactcgctgtattaactgcataatatccggtaaaaaaaaaccttggcaagttggcacggaatgctgaaattttggaatgaaaaagctatggcataggaggatatttccccttctcttacaaaaggaaaaggataaaatataacccaatgatggccacggcctaatcagtcaggaattgaagatgtagtccgtataaatccatgtccacaaaaccatataaaatttgtatatgatttatccacaggaaatttcgggcaaggttgactgactttgcttgatatgggtgctatggctagattggcacaatagcagttcgactgattgcagggagattcagtatatagaatgaatgactagtggatgaacatgttactcgttttttctccactgaagcttgacgaagtgttctggcccaaatccaattagaggacatgatttaatttgatgcccataatttgtaatctacaaagtttgaaaatagtttaatgagcaactcagccagggatataaaaccctacttggttactaaattgccatttgaaaatatctccctcaaaccctacgtatgtgttgtaatgattatagcccttgaacattattgattgacattttactgagccttaattacaagcacagcaatttcttgaacttacctaaaaaaaaaaaaaaaaaa

SEQ ID NO: 3403 - DNA, 1954 bp, Glycine max
agattctttgcagcgataaacttccccttattggtttagtggagaaagtggagcaagagcttgtgtggaaggtatgccctaactgaacaaattgagtgctgttaattttgaagttttcttctatgtgcataatttctacgttcgtaatatgtaggctgatcgatcagatatttctgtgaagccaaacttgtataagttgctttatgcatttcaattgcaccggcataattggcgacaagcagcaagctacatgtacatgtattccgctcgtttgagaactgaagcagctttgaaagattgtgtaggcagttccttgatgttgcaagagaggctgaatgcactctctgctgcaggcaatgcactgcatcttgttcatcctgcatatgcctggattgattcattagctgagggaagttctattgtgaatgaacattatccaagtaagaaagctaaaagaaccccagatgaacattcagcagctgataatgatgctgagcctcaaggttggcagtcctctattgatattgaaaaacttgagaatgagtttgtgctaacttcagcagagtatatgctgtcactggtaaatatcaagtggacattttctggaaaacacggagctctatcagacttggctgatcttcttgtccaaaacagtttatatgatatggcttttacaatccttttcagatttttcaagggttctggtcagctacgtaggcccccccccctgttgtctgctatctcattgaaatgctgtcttgacaaagtggaatcaacttgggttgaggaacacagtcatttattgaactcatcaaagcatgagatggtcgtccatggttcacctgttacagtttcctcgactccacaaactgacagaaacagtcgttgggcaacactcaagctttaccttgaaaagtataaggaacttcatggtagattaccgattattgttgccgaaactcttctacgctcagatcctaagattgaattacctctttggcttgtacaattgttcaaggagggtcaaaaagaaaggtcgtgggggatgactggcagggaatcaaatcctgcatctttatttcagctttatgttagctatgatcgatatgcagaagctacttatcttttgctcgagtgcatagactcatttgcttcaatgagaccagcagatataattagaaggaaaagaccattagctgtttggttcccgtacacaactattgagcggttactataccaactcgatgaattaatcagaatgggtcgcatggtagatcactgtgacaagctcaaaaaaatgttacatgattctttacagaatcatctgaagatgttgaaggtggactcagatgatgctgtttctgtatcttcttgattgctacttaaactgaccactggaggttgtagatagtagcatgttcacagtgctcttaattactcactgtgttaactgcatactatccggtaaaaaggccttgacaagttggtacggaatgttgaaattttagaacaaaagccatggcataggaggatatttccccttctcttacaacaggaactggacaaaataacctaatgatagatctgtcaagaattggagatgcagtccttataatccatgtccatgaataaccatataaaatttgtatatgatttatccacaggaaatttcgggcaacggttgactgactctgtttgatatgggtgctatggctagattggcacacaatagcagttcaattgattgcagggagatatagaatgactaggggatgaatatgttacactcgttttttctctactgaaggttgacgaacagtattctggcataaatccagttagagaacatgatctcatttgatgcccatagtttgtaatctatagtttgaaaattgtttaatgtgcaacttaaccagggatacaaaaccctacttgcttactaaactgccagttc

SEQ ID NO: 3404 - DNA, 1926 bp, Glycine max
attggaacgttaggtttcacttcacaactctctcaacaacaacaaagtagtaagtagtacttgtagcttcgcttcactcacagtcacagcaatgcccactggcttcactctcatctccgcggcttcacttttccttttgcttcttgattgttgctctgggagttttgttggggtctgctatggaagaagtgctgatgacctccctacaccggacaaggtggcacagttggttcaacttcataaaatcaaatatgtcaggatttatgattctaatttacaggttctgaaggcctttgcaaacactggaattgagcttatgattggggttccaaattcagatttgctgtcattgtctcagttccaatctaatgcagactcttggctgaaaaacagcgtccttccttactatccggctacaaagatcacatacataactgtcggcgccgaagtcactgagagtcctaataatgcatcttcatttgtagtgcctgccatgaccaatgtgcttacagcactcaagaaacttgggctgcacaaaaagattaaagtttccagcacccattcccttggggttttgtcccgatccttcccgccttctgctggggctttcaatagcagccatgcacatttcctgaagccaatgctagaatttcttgctgaaaatcagtcaccttttatgattgatatatatccttattatgcctaccgtgattcccggagtaaagtgtctttagactatgccctgtttgatgcatcctctgaagtaattgatccaaacacaggcttgctgtacacaaacatgtttgatgcccagattgatgctatttactttgcactgatggccttgaacttcagaacaattaaggtcatggtcactgagacaggttggccttccaaagggtctcctaaggagactgctgcaactcctgataatgcacaaacatataatactaatctgataaggcatgttatcaacaacactggtactcctgcaaagcctggagaggagctagatgtttatattttctcgttgttcaatgaaaataggaagcctggtttggaatctgagaggaactggggattattttatcccgaccagacaagtgtttatagcctagatttcactggacggggtgcagttgatatgaccactgaggcaaatataaccaagtcaaatggaaccacatggtgcattgcttcgagtaaggcctcacaaattgacttgcagaatgccatagattgggcctgtggtcctggcaacgtggactgtacagctatccagcctagccagccttgttttgagccagataacctagcttcacatgcatcttttgcgtttaatagctattaccagcaaaatggggcttctgatgttgcgtgcagttttggaggaacaggtgtaaaagttgataaggatccaagctatgacaagtgcatctacatgagagctggaagtaataaaactgtgacaagcaatacaacagcaatgtccacttcatcctcttcactgaatggaaattcttcgtcaatttttacttttcttcttgtaacttgtctctttgctctaatgcatattcaacgatactgacaagattgattgttgaaattgcagcatgattttgctttgttgacaagtatgctgcgtttgaaatgcatggggaaggtaatgatttagtggagagctttcatatgctctatgctatgcatcagaaaagtgtaaactccgttgctgttatataagaattgttttttccactgcattagagcaatgataggccaaaactctgtggtactagttttgtgtgtcaagtgataaaagaaaacagcatgcaaagataattggacttgtcatcgataatttatttaactatgcatgtgttgctgcaccttattgtaactttgtaatataaaactgcttcgttcttg

SEQ ID NO: 3405 - DNA, 1211 bp, Glycine max
tcagctacgtaggccccccccccccccgtgccgccattctaccacacgacgagcctgcgcatcgttctgtctctcacgcgccgcttggctctcagccccggcctgcagggttttgcataatctagctcttttttctccgtccaaaatgggtaaagctaaaaagggaccaaagtttgctgttatgaagaagattgttacttccaaagcaatcaaaagctacaaagaagaggttttgaacccagaaaagaagaatcttatgaaggaaaagttacccagaaatgttccaactcattcttcagcacttttctttcaatacaatactgcactgggacccccttatcgtgttttggtggacaccaacttcatcaatttctcaatccagaataaattggatctggagaaagggatgatggactgcttatatgctaaatgcaccccttgtattacggactgtgtgatggcagaactcgagaaattagggcaaaaatatcgtgtagctctaaggattgccaaggatcctcgatttgagagaatactatgtactcataaagggacctatgctgatgactgccttgttgagagagttactcagcacaagtgctacattgttgcaacatgtgatcgggacttgaagaggagaattcggaagattcccggtgttccaataatgtacatcaccaaacgcaagtactcaattgagcgattgcctgaagcaacaattggtggagcaccaagaatttgatgcagtaaaactaaaacaggtagagctggctataccaataatattgatactaatttcttggtcgaaaagtatgaaatcctgctacagtaacttgcatgtttggtttttggctggctgggctgaattctaacggaagcttgggactgaacaaaagcaagacttaaatggtttatacctgaaattttcttagtgtaagttggtagatttaggttctgtcaaattttgttttcctcatattgcctatctaatgtatcatggtaaaccccggagagtgtctaaaactatgacattttcatagttctggcaatgcaaatctcttgaaacaatactttttttgttgcaagagaaaaaccttattttccttgaatctaaattgtattaacttcaaccttcacatgtcagaagaccgagttggaaattagaaatttcaaaatcacggtttttctttttcaaaaaaaaaaaaaaaaaa

SEQ ID NO: 3406 - DNA, 1679 bp, Glycine max
tcagctacgtaggcccccccccccccactttcctctttctttcccttttcctcgtttccacaaccctcccgaattcttgagacgcttcccgaatcctttcacacacacgttgctgaatctatatatctaaatcccttcacttcccattcctaaatcctcttacaaaaactatacaacgttgcttttgttttgttttgttttgtctctctctaatcattccaatggccaaagaaggacccaactgggacgggttgctcaaatggagcattgctcattccgatgggactcgccccactcgcaatttaagtgaggaggatcggagatggtttatggaagcgatgcagtcacagaccattgatgttgtaaaacgtatgaaagagatcacacttgtgatgcaaactccagaacaagtcttgaaagaccaaggagttacccctgcagacattgaagatatgttggatgagttgcaagagcatgttgagtcaattgacatggccaatgatctccattcaattggtggcttggttcctcttcttggttacctaaagagttctcatgccaatattcgagcaaaggctgctgatgttgtgaccacaatagtccagaataatcctcgaagtcagcaacttgttatggaagcaaatggctttgaacctcttatttctaattttagttcggatcctgacgtgactgttagaactaaagcactgggtgcaatatcttcactaattcggcacaacaaaccaggcattactgcatttcgtttggcaaatgggtatgcagctttgaaagatgctctagcctctgaaaatgtgagatttcaaaggaaagctctcaacttgatccattacctgttgcatgagaataattcagactgcaacatcgtgaacgagcttgggtttcctcgaatgttgatgcaccttgcctcaagtgaagattcagatgtgagagaagctgcccttcgtggccttctccagcttgctcacaatgcgaaagatggcaaggatggcaatgagaaagacagtgcgaaaataaagcaacttcttcaagaacgaataaacaacatcagtttaatgtcagctgaggaccttggtgtagtcagggaggagaggcaacttgtggactccctgtggagcacttgcttcaacgagccgtcttctcttcgagagaaaggtcttctagtgcttccgggggaggacgtgccccctccagatgttgctagcaaatattttgagcctcctcttagatcttcgactgcaaatccatcttcaaagaaagacccagaaaagaatgagatccctttgcttttagggtcaggaccttctcctacatacactaacaaccaaggttcaaataaaggagatgctagttcatagacagatgctaatatatcgaaagtttaaatgctttatgttctgttttttataccatgctttctttctatcttatcatacaatagtaatttctttctttcacttataggctatgtttttaaccctttcttctggcctcagattggttttccctagtatttctaggatgatgatctcatggtatgttacactgtgacactataactagccctccattgtagtttgttaatgtatgattgcagcggtgaatgccttcatgaaaaaaaaaaaaaaaaacaagcttaaagcaaaaatagcccttaattg

SEQ ID NO: 3407 - DNA, 1841 bp, Glycine max
tcgagtcagctacgtaggcccccccccgagcaaggccatcatcacatcacaacttcccaacccaaccacccagaaaaaaacacacaaaagccaaattttgacgtttcctttcctctttctttcccttttcctcgtttccacgaccctctcgaattcttgagacgtttcccgaatcttcactacgcacgtttctgaaactatataatatctaaaatcccttcacttcccattcctaaaacctcttacaaaaaccgtacaacaaggttgtttttgttttgttttgtgttttctctctaatcattcgaatggccaaagaaggacctaactgggacgggttgctgaaatggagcattgctcactccgatgggactagccctactcgcaatttaagtgaggaggatcgaaaatggtttatggaagcgatgcaagcacagaccattgatgttgtaaaacgtatgaaagagatcacacttgtgatgcaaactccagaacaagtattgaaagaccaaggagttacccctgcagacattgaagatatgttggaagagttgcaagagcatgttgagtcgattgacatggccaatgatctccactcaattggtggtttggttcctcttcttggttacctaaagaattctcatgccaatattcgagcaatggctgctgatgttgtgaccacaatagtccagaataatcctcgaagtcagcaacttgttatggaagcaaatggctttgaacctcttatttctaatttcagttcggatcctgacgtgactgttagatctattccactgggtgccctccccccactaatccggcacaacaaacaaggcattactgtatttcgtttggcaaatgggtatgctgctttgaaagatgcactagcctctgaaaatgtgagatttcaaaggaaagctctcaacttgacccattacctgttgcatgagaataattcagactgcaacatcgtgaatgagcttgggtttcctcgactgttgatgcaccttgcctcaagtgaagattcagatgtcagagaagctgcccttcggggccttcttgagcttgcttgcaatactcaagatggcaaggatggcaatgaggaagacagtgagaagatgaagcaacttcttcaagaacgaataaacaatatcagtttaatgtcagctgaggaccttggtgtagtcagggaggagaggcaacttgtggactccctgtggagcacttgcttcaacgagccatcttctcttcgagagaaaggtcttcttgtgcttccaggtgaagatgcaccccctccagatgttgctagcaaattttttgagcctcctcttagatcttcgactgcgaatccatcttccaagaaagactcaaacaatgaaaagaaagagatccctttgcttttagggtcagggccttctcttgcagacactaacaaccaaggttcaaatagagaaaatgctaatagctgaaagcttggatgctttctgctctgttttttttttgccgtgctttctttctatcttatcatacaagtaatttcatataggctctttttttcccctttcttttctcaccttagattggtcttccattgtatttcaagaatgatctcatggtatgtgacactataactagccttccattgcagcggtgaatgccttcaattttttgcacttgatatttttaaatacttgtttagatgttacagtcccactcttacatgtataaaaggatctacttgtccacattatccttcaattttgggtttgggcagtgtgtttctagtgaataaaaagagagaatgatagttatgatagttatgatagaaaaaaaaaaaaaaaaaa

SEQ ID NO: 3408 - DNA, 838 bp, Glycine max
ggctcgagcaaactttctctctctctcacacacacgctccttttgattcgcaccaacttaccatcagaaatttacattcacatcatcccaacaaaaaaaaaaattaaattctccacacattttactttctccgcaactttctcagcactctacactcccatttctgcttccatgactgaaccacacaaacgtagctatctaaagcttcgacttcaaccttttttcagtaaagagagagctgagtagttctcagtaagaagcagctggaaaaaaaattaaaaaaaaattctcactccttctagggttttgttttattttgcattgaaattgaaatcccactactcaaaattcaaaatcccaaaccttctctctagaaaaagaaacagttttttttttttaattattattattattattattattctttgtgggatgggaagggtttaaattttgaatttagaattcggcattgacctgagctgagagtgagtttgagaagaaggttctagagtgcagggtttgcaatgtcgggcccacccagagttcgatccatgaacatggccgtcaccgacgctgacgcgcgcccggtgctcgtccccgccggcaacaaggttctccctgccatcgaccgacgcaagccggtgatgaaatcgtcgccggagacggagaagaaaccggtggcgcattcgccgcaatgcgtctccgttacgccgccagctatttcgcggcggcaggagcaccatcaggccgtgctgaaaagcctgtcgtcgatgaacgcctcctgctcttccgacgcgtcgtcgacggattcctcccctcacagcagcggcgcgtcgtc

SEQ ID NO: 3409 - DNA, 1809 bp, Glycine max
tcagctacgtaggcccccccccccccacagataaagtagaggcaaaacatgatgtttgtcactgctgctgccgccacttccgccgccgcagcagggtcctatccctcactctcacgatcgcgacggcggcggttaacggtggctctccgatctgacgacgtgtcagtcaccccaaccaccacaatattgacgaaactcaaatacgagtgtgccactcctctgccccttcttcagcaagtggccaataacatgtctgctgacatgcgagctgggcttgggtttgggcctgggcccgggcttcccatgatacccagctatgttgaaaatcttcctactgggaacgagaaagggttgttttatgccttggatctcggaggaaccaacttccgtgtgctgagggtgcagttgggtggcaaagatgatcgtgtcattgccactgagtttgatcaagtttccatacctcagcaactcatgtttgctacatctcatgagctttttgatttcattgcttcggggctggcaaaatttgcgtccaaggaggatgatagatttcatatctcaccgggaagaaagggagagattggcttcacgttttcatttcctgtgaagcagacatcaattgattctggcatactaatcaagtggaccaagggttttgctgtctctcgaacagcagggagagatgtggttgcttgtctgaacgaggcaatggaaaggcaaggaattgacatgcgagtttctgctctggtgaatgataccgtggcaacgttagctggagcagaatactgggacaatgatgtcgtggttgctgtcattttgggtactggaagcaatgcttgctatgttgagcagatcagtgccattcctaagttgcagggccatgtctcttcttctgggaaaatgatcattagcactgagtggggtgctttctcaaatggtctccctttaaccaagttcgatagggaaatggatgctgctagcatcaatccgggcgagcagatctttgaaaagacaatctcgggaatgtatctaggcgaaattgttagacgagtgctgctggaaatggctgaagagggtggtctgtttggaaaatctgtcccgcagacactatctacacctttcatactcgggacctcagatctatgtgccatgcaacaggactgttctggcgatttacatgcagttgggtctctcctctacgataaagcaggggttgaatccaatttaagtgaaagagaaacagttttggaggtttgtgagactattgtaaagcgaggcgggagcttagctggtgcaggaatagtggggattctacaaaaaatggaagaggaccagagaggtctcatctttgggaatgggaacagaagtgttgttgccatcgatgggggcttatacgaaaattatcctcaatacagggcttatttgcaagattcagtcaaagagcttctaggaacagaaaagtcaaacaatgtggtgatagagcatacaaaagatggttctggcataggagctgctctattggctgcttcaaactccatctacaaccaagatttatagggaatttatttaccattatcattatcaccgagataaaaaaatttagttcatgtaccacgtatgtaattattggaacccctagtccttgattgagcattggagaggtaagaataagtgcatatttagattgcagtttttaaaagtttcaataattatttctttcaaactgaacttttaggttaaattttagtttcaaatatactttcagtgacaaaaaattttggttgtcaaagtcaatttcctctctaaatt

SEQ ID NO: 3410 - DNA, 1875 bp, Glycine max
atttattaaagtaagagaacatcaggcacttaattctttggagaagatgctctggatagatgacaagggcaggtggggtgtttaacgtgtcttcagctacgtacgccccccccccccgagaatgaaagtgcaggcgaaaagggggaaaacaaattggctagtgctgtgcgtcacgtctaatatcttagtttgtctgatctaatctaaattttctcgcaaacagaagaaaagtcaagcgcggcacgaatcgcgatctttccttctttctttctttcgttccttcacaatcctaccagccgccaagccgcagagtcaacttgtacaaatgcccaccgaatccattaaaactaaaaaatcttctaccacgaacacttgtcttcattcttcaaccttcgtttcgtttctaccactccattccagaatgcttcgttacctgttggtgttcttcttattgggcttgggaacccgggtggagtcacacgaggaatcgggtcattggagctgcgagtccgagtcggagatccgagtcgagactgagttcaaacccggtgtaatcacactggatggtcacgctgatgattggaaggacattgatgggtcctactttcccctccttcccgcccttgacccagatgctgaaaatgaattcaaagggggaaagatgagcgttaaaagtgtccatgatggccgcgatatcttctttctgctgcaagtagatggtgactatgcctactctaaaggtgaaagcaataaatgtccatctgttgctctcatgtttcaaattggagatagtgcctcttatcatgatatgggtggctgtaaagaacattcgacctcatgcactgacaagacctgcaaaggtcatgaagttgacattatgcacttttcgataggaagtgctattccaggacgactttacggtggcaatcccctagacaatagagatgggaatggtggcgataggtttggtcacttggttgatctatatgcttggaatccacattgtagatacttggatggaattggtcctccaggttctgctaatgattcaagtgcgcagaatgactggaaaggtgcttggtggcatagcagcttcacagttcactcaggattcgtagaggatgagagtccatatgcagataatggaaaaaagggcacatacttttttgaattctcgaggtctttgaggactatggatcatcttcaacaggacgtgcaatttaacattggtggatccagtaagatgtctgttgcattctggtatccagtagatggtcaaccttggcatggttctgggcactactctgtttactgtgattgggttcccattgacatatctgttggtaaatctttgaatggcaagtcagtagatgcagcatcaaatagctcgtggaatgttgctagtgccttttctgttatactatcagtagcagcactttgtgtgtctgtttttgtgagctatagggtgttcagccccaagagtgtctcttttacaccgatagagaacaacaacctttaaatattgaaccaagagcttgagtttgggattgtactattcatttcgcttgtactagataggtttgtactgtttagtgctttctctttgctctatttttttattataactaaagcattactttagttattttaagcagtgtcagaaaagtattaattcattatcaacattatggagttccatcctctttggcttagttattgcaattgcagtaccgtttgccttcattcatttcaaaatggaacttgagttgcaatccggcgaaagagaggaagattttgagtattaatataaataaattgagacaaattgatagcaaaaaaaaaaaaaaaaaaaaactcgagactagttctctctcc

SEQ ID NO: 3411 - DNA, 2213 bp, Glycine max
  misc_feature (2139)..(2140): n is a, c, g, or t
tcagctacgtaggccccccccctcatctctacctccacaaatcaatctccaggctatctatcaagtaagaaagctgttaagaggaggagaatggctgatgatggaagcaggagggaattgatattcaggtcgaagcttccggatatctacatccccaaacatatgcccctccactcttactgcttcgagaatttgagagagtgtggttcacgcccctgcctgatcaatgcccccacgggagacgtctacagctaccacgaggtggacagcaccgccagaaaggtggcgagggggctgaagaaagagggcgtggaacagggccaggtcatcatgatcctcctccccaattgccccgaattcgtcttctcgtttcttggcgcatcccaccgcggtgccatggccactgccgccaaccctttcttcacccccgccgagattgcaaagcaagcccatgcctccaatgccaagctcctcatcacccaggcctcttactacgacaaagtcaaggacctccgcgacatcaagctcgtattcgtcgactcttgtcccccccatacagaggagaagcagcatctccatttctcacatctgtgtgaggataacggtgacgctgatgttgatgttgatgttgatatcaagcccgatgacgtggttgcattgccttattcttcgggaacaactggtcttcccaagggagtgatgctgagccacaaggggctggtgaccagcattgctcagcaggttgacggtgataatcccaacctctattaccactgccacgacaccatcctctgcgtgcttcccctctttcacatttactctctcaactccgttcttctctgtggcttgcgtgccaaggctaccattctcctcatgcccaagttcgatattaactccttgcttgctctcattcacaagcacaaagtcactattgcccctgtcgtccctcccattgttctcgccatttccaaatcacccgatctccacaagtacgacctgtcttccatcagagtcttgaagtccgggggagcccctctgggtaaggaactcgaagacactctcagagctaaattccccaacgccaaacttggccagggatacggaatgactgaggcagggcctgtgctaacaatgtctttagcttttgctaaagaaccgatagacgtgaaaccaggtgcatgtggaaccgttgtaagaaatgcagagatgaagattgtcgatcctgaaaccggtcattctttacccagaaaccaatccggtgaaatttgcataagaggcgaccagattatgaaaggttatctaaatgatggagaggctacagagagaaccatagacaaagatggttggttgcacacaggtgacatcggttacatcgacgatgacgatgagttattcatcgttgacaggctcaaggaattgatcaaatacaaaggatttcaagtggctccagctgaacttgaagcccttcttctcactcatcctaagatctctgatgctgctgttgttccaatgaaggatgaagccgcgggagaggtacctgttgcatttgtggtcatatcaaatggttataccgacacaaccgaggatgaaattaagcagtttatctccaaacaggtggtgttttacaaaagaataaaccgagtattcttcattgatgcaattcccaagtcaccgtcaggcaaaatcttgcgcaaggatctaagagcaaagatagcggcaagtgttccaaaatgaaattaaaccaaacccatcatgttatggtgttattatacgatgcccgcataagcaagcttcaacacaaaaggaagaggcgctgttgcttgatcccgctagcttttacgtattttctcttacgtaacaaccgtgtataagttaccagtgtgattttcttacagaactatcttctgtaaagatttcaatctgtcaaggactttcaccttctataatatcaaattatattttttttttataaaaaattatataaaattacaaaaataaaaaaaaaaaaaaaaaaaaaaaaaaaaaaaaaaaaaaaaaaaaaaaaaaaaaaaaaaaaaaaaaaaaaaaaaaaaaaaaaaaaaaaaaaaaaaaaaaaaaaaaaaaaaaaaaaaaaaaaaaaaggaaaaaaaaaaaaaaaanngggggggggcctttttaaagaaaccaaattttttcccgggggggtgggaaagaaatattttttttttttgggg

SEQ ID NO: 3412 - DNA, 1823 bp, Glycine max
tcagctacgtaggccccccccccattaacattgtaatcaaacgattctttatcacactattcactcaagtaaaccttttctttctttttttgcagaagccggtactaatgtcttaagaggtgagttcctctatttttatatgctacacataatattaaccatgcaaaacatttcactagagttagtatgtgttacaatagtttgacattattattactattgattatatgatggtatgaaccactttgtgtctttgactcttccaataattaagaatattctaatattaacatattgtgcatataggttttatgatagtcatcttttttcctttatcatccgttataatataatagtcacattttttatattaattcacaggattgtttgaaattataagaggaccaaacccagaacttgaacataaattagatgcgtatgtctcactatttgttatctttggacactacattctaccattcttggcaagcaagtttttgtttgggatgacattgtttattgtgcttttgatatacaaatggagaaaaaggcatttgtcaatatatgaaaatattgaaaattatctggaacaaaataacctgatgcctattggatactcatacaaagaaattaagaagatggctagaggtttcaaggagaaattgggtggaggaggctatggctttgtattcaagggaaagttgcgtagtgggccttctgtggcaattaaaatgctacataaagcaaaaggtaatggccaagactttattagtgaaattgcaacaattggaagaatacatcatcaaaatgtagtacaactaattggatattgtgttgaaggctcaaaacgtgcccttgtttatgaattcatgcccaatggatctcttgacaaatttatttttcccaaagatggaaatatacatttaacatatgacgaaatatataatatagcaattggagtagctcgtgggattgcttatctccatcatgggtgcgagatgaaaatattgcattttgatatcaaaccccataacatccttcttgatgaaacattcaccccaaaggtctctgactttggattggcaaaactatatccaatagataatagcattgtgactaggacagaggcaagagggacaattggatatatggctccagaattattttatggaaatattggaggaatatcccacaaggctgatgtttatagctttgggatgcttttgatagatatgacaaataagaggaagaacccaaatccccatgcagatgatcattcaagtcaactttactttcctacttggatttataatcaacttgaaaaagagacagatatagaaatggaaggtgtcacagaggaggaaaagaagatgatcattgtttcactttggtgtatacagttgaaaccaagcgatcgcccctcaatgaacaaagtagtggaaatgcttgaaggagatattgaaagcctagaaatacctccaaagccttctctatatccacatgatacaatggaaaatgatcaaagcatctactctagtcaaacaatgtcaacggacttcattagttcttctagttattccaaggaaattgtgactaatcctttggtagaggatgttatttgataatgcacaatagttatgtatttgtattcaccttattgtcttgaacacctgttcatctgtaatatttattttatctaaaagatttcctattgttttatctttcaaagttcaaaaaaaaaaaaaaaaaaaatttaagattttgttccaattaaagttccctgatatgtaatcaagattcatgatataaattgattttacttg

SEQ ID NO: 3413 - DNA, 2166 bp, Glycine max
gaaattgataaccactaatcaatttggtccttgatgcattagtaacgaaactgaccgctatgccaaatcctcaacaactaaattggttgatatttgtcaaatttgatggataatatcaattttaagaactaaattgatattctattttaacaaataccttacttattgcatctcacattaacattgtaatcaaacgattctttaattatcacacaattcactcaagtaaacctttttgtttgtttgcaggagctgtttttgctgtcaaaataggtgagttaattagtatgtgttataatagtttgacattgttattactattgattatatgatggtatgcaccactttgtgtctttcactcttctaataattaagaatgttagtttaattattcatttagatattttagtccccaggcccccccccccaatttcaaaaaggtttttgtcgttaaatttttttaattccaatcttttgatagaaaccttttgataattaaaatataaacttcgaaactaaaaaatctacttattaactataaggactaaaagagataagtttaaaaattataagaactagatgagtaattaaaccaagaatcttgtaagattaacaaattgtgcatataggttgtatgttagtcatcttttttcctttatcattgttataacataattacacattggtgatatcaattcacaggattgtttaaagctataagacacccagaatttgaaagtcgtcattattctgcgtatgcatatcactcaataatatttattacctttggacactacattctaccatacttggtaggcaagtttttgtttgggatgacattgtttattgtgcttttgatatacaaatggagaaaaaggcatttgtcaatatatgaaaatattgaaaattatctggaacaaaataacttgatgcctattggatactcatacaaagaaattaagaagatggctagaggtttcaaagagaaattgggtgaaggagactatggcttggtattcaagggaaagttgcgtagcgggccttttgtggcaattaaaatgctacataaagcaaaaggtaatggccaagactttattagtgaaattgcaacaattggaagaatacatcatcaaaatgtagtacaactaattggatattgtgctgaaggctcaaatcgtgcccttgtttatgaattcatgcccaatggatctcttgacaaatttatttttaccaaagatggaagtatacatttaacatatgacgaaatatttaatatagcaattggagtagctcgtgggattgcttatctccatcatgggtgcgagatgcaaattttgcattttgatatcaaaccccataacatccttcttgatgaaacattcaccccaaaggtctctgactttggattggcaaaactatatccaatagataatagcattgtgactatgacagcggcaagagggacaattgggtatatggctccagaattattttataaaaatattggaggaatatcccacaaggctgatgtttatagctttggaatgcttttgatggagatggcaagtaagaggaagaacctaaatccccatgcagatcattcaagtcaactttactttcccttttggatttataatcaacttggaaaagagacagatatagaaatggaaggtgtcacagaggaggaaaataaaatagcaaaaaagatgatcattgtttcactttggtgtatacagttgaaaccaagcgatcgcccctcaatgaacaaagtagtggaaatgcttgaaggagacattgaaagcctggaaatacctccaaagccttctctgtatccacatgagacaatggaaaatgatcaaagcatctactctagtcaaacaatgtcaacggacttcattagttcttctaattattccaaggaaattgtgactaatcctttggtagaggatgctatttgataatgcacagtagttatgtatttgtatccaccttattgtcttgaacacctgttcatctgtaatatttattttatctaaaagatttcctattgttttatctttcaaagtttaaaaaaatgggttacgaaaatttaagattttgttcaaattaaagttccctgatatgtaatcatgattcatgatataaactgattctacttgaatgtgt

SEQ ID NO: 3414 - DNA, 1631 bp, Glycine max
tcgcccgcgtagccacccacgccgagaacagagtgtgataatagtaagacagagcacctactcactcgtaaatggcgaggaagaagatcagagagtaccactccaagaggcttctcaaggagcatctcaaacgtctcgcctctatcgacctccaaatcctctcagctcaggtgacagaatctacggatttcactgagctgacagaccagcatccatggctttcgtcaaccagattggtcgtcaagccagacatgctgttcgggaagcgcggcaagagtggcttagttgctctcaatttagacatagctcaagtcgccgagttcgtcaaagcacgcctcggcgttgaggttgagatgggaggttgcaaggcgcctataaccacttttattgtcgaaccgtttgttcctcacgaccaagagttttatctgtctattgtttctgaaaggcttggctccactatcagcttctccgaatgtggcggcattgaaattgaagagaattgggataaggtcaaaactatattccttccgacggaaaaaccattgactccggaggcatgtgcgccattgattgctatacttcctttggagattagggggacaattggcgatttcataatgggtgtgtttgctgtcttcaaagatctggacttcagttttttagagatgaatccatttacactggtgaatgaaaagccatatccactggatatgagaggggaattggatgacactgccgcattcaagaacttcaacaagtggggtaatatagaatttccattgccttttggaagaattctgagccctacagaaagcttcattcattccttggatgataagacaagtgcatcattgaaatttactatattgaatccgaaaggacgcatatggacaatggtagcaggaggtggtgcaagtgtaatttatgctgatacggttggagatttaggctatgcatcagagcttggaaactatgctgagtatagtggagctccgaatgaggaggaggtgttgcagtatgcaagagttgtaattgattgtgctactgaagaccccgatggccgtaagagagcccttcttattggaggtggcatagcaaacttcactgatgttgctgccacattcaacgggattattcgagccctgaaagagaaggaatcaaagcttaaagcagcgcaaatgcacatatatgtcagaagaggtggtccaaactaccagactggtttggcaaagatgcgtgcattgggggaggagttgggagtaccaattcaggtttatggaccggaggccacgatgacgggtatctgcaaacaagctattgattgcatcatgtccgaagcataaagaagattaatttttgtctcatcatgtttcatttgtgaaactaatttggtggtgttttgatggatatattgatataagtccataatctgaaccaaagcaaagagtaataaggtgaagatgatagatgttacaagcctgaaactgttaaattcttatcttttcttcctattgtgattttattgttatattttgactaaacattataaaaatccccaatagtatccgtgaaaaatgtaatcttagttggcgatttttccttaaaatgttgagttccatatttgattcccc

SEQ ID NO: 3415 - DNA, 1840 bp, Glycine max
tctctttcccccgcgttcggcgaaagccaagggtcaccaaaaccatcatcataacccaaacccaacccaacccaacacaacacaacaccacctcctatcacataataacaaccttaaccttaaccttaaaccccccaattttcatgtctcggatcccgtgattcggatccccaacaaaaaaagaaacctcgtatttgttattttcgtcggatccggttgggaacgctcatgacgcggcgttgctcgcattgcagccacaatgggcacaactccagaacctgccctaaccgcggggttaagctcttcggggtccgattaaccgacgggtcgatccggaagagcgccagcatgggcaacctaacccactacgctggttccgggtcggccccgctccatgtcgggttgaataacccgggttcacccggggagacgcccgatcacgccgccgccgccgccgacggctacgcctccgaggacttcgttcccgggtcttcttctagctcccgtgaaagaaagaagggtgttccatggactgaggaggaacatagaatgtttttgctcggattgcagaagctgggcaaaggtgattggcgtggaattgcaaggaactatgttatatcaaggacgcctactcaagtggccagccatgctcagaaatatttcatcaggcaaagcaatgtgtccaggcgaaaaagacggtccagcttgtttgatattgttgcagatgaagcagctgacactgcaatggtacagcaagacttcttgtctgctaatgagttaccaactgaaacagaaggcaataaccccttgcctgctcctcctcccctcgatgaagagtgtgaatcaatggattccacaaactcaaatgatggagagcctgccccatcaaagccagaaaacacacatccatcttatcctatgttatatcctgcgtattattctccagtgttcccgtttcctctgccctattggtcaggatacagtccagagcccaccaagaaggaggaaacacatgaagtgctgaaaccaactgcagtacattctaaaagccctatcaatgttgatgaactggttggcatatcaaaactgagtttaggggagtctattggtgactcgggtccctccaccctgtctcgaaaacttattgaagaaggaccctctagacaatcagcttttcatgcaacaccaacatgtggtgatatgaatggcagtgccatccatgcagtttaagcgtgtgcctcgtgttccgaggaagggattgttatgtgagcattatggatcaacttggggcctgcatgaatgtggtcttgtgttcatcatacatctgtttgtggggtaacctaaataatttttttctttgcccattcacagtgattaacctagtttgtttatttgctggtagcagtagcgtctaggagttactttgggtctctaaactaaaactttatgtttgtccagtgattttatttgtcagggttatgtaaagttaatgttgattgtgcagtttgacaatctacctagtaccaagttgtgcttcatgtttgaagtgctgtggattaaaatgtttgaagtgctttagcccctcaaacccgggtctctcctgaattaacccagtgagacaggaaatcaagagcactgagctgcttgctagggtttgaaatgggttgagtttttttttttctccttcaggtttggttagtttttataaaaatcttaatttgggcttggaaatttattttaaagatgtcaattaacatatgggagttgctattggccccaatgggttttgctattggttcctataatccctcaaatttcaaaattacccatccccaaaaag

SEQ ID NO: 3416 - DNA, 1184 bp, Glycine max
cttgttgagttttgaattacgctacacacttcgtactccaacctcaaatccattacctacactgactctgagctttgaaccctgaactccatcgccgtcaaccgccgtcgtcctcagctacgtaggcccccccccccctcaggtaattatgaagaattgaagatcatggtttaacaaagtggcgtgtgaagagtgtgaagtgtgagctgtttctgtgggaaagttggagggcagaacgtgagaataccttccagagaagtagcaaagcagcaatgaatgcaccaaccctaatattggaggctctaacaactttgaaattaattacatagtgatgaaagccacccatgatcttggctttacaaactcgctttagcataagcagaaatcaacgaattgagtttcttttcttcaaatatggatgagaacatgaaacagttccaaaagaaattaacagaactggaagtggaagctgagcatattcttttagcccgacatcagctggttgagaacgatagattgagaaatgggaatagagaagcacttactgcattaaggaaaagggctcgaacaacaaagagcagtgttccatctccttttgaatcaataatgaagggagttgcagggtccagctcaagacctttggtgcaagaggtttgcaccacctgtggcaaacatgactcttctgagcagacgtggatgatgtttccaggaactgatctgtttgccagaattccatttcatgcggctcatactatattggaaacagatcaaacgcagcttgactttgagtcaaagagactacagagcattgtgaaggaaaaatcttacattatatcagaggcaggtgttcttgcagacaagataagtcctggagtgctcaaatcacttgtatccttaaacgacaagccaaagtaagatgctttgagctgactatttagtgagaaaccttgtggtggcagtatcaactgggtggaaaatggcaagtgttttctggaagtctttcttgaggcatttaggctgaggcttatctattctgttgctgtgattgtgtaaaaagttcccatgtttatactatggctgctacattcaatcctagaaatggagcaattgttacacattcaaaaaaaaaaaaaaaaaaacttttttttttaaagaaataaccatttatttttacaaactcatat

SEQ ID NO: 3417 - DNA, 1051 bp, Glycine max
  misc_feature (1020)..(1020): n is a, c, g, or t
tacggctgcgagaagacgacagaaggggacatgtttaacagaaacgaagcgaagccccaaaagaggagagaaagaagaataaacactcgagaaatttctcacttagggtttggatttttcgagtaatcttctctctccgtcacttcatctcacgcgatctcgttccgatcgcacgcgttttaatgatcgtcgtcttccgcggcctctgattcggctctgatcttcctcgccgcacctctccgcacctctccgccggaaccatgatctccgtgcagggcgacctccaccgccaccaccaccactaccaccaccagccgcagcttcccggctccgccgacacctctcggcagcagttcaccgcggatcgcgtcgagccattctccgtcaagcaggaacccgcgtcgctcactcttctgccgttgcgcggtcatgattctagtgaagttgatgaagatgtgcacttgtctcttgcacatcaaatgtacaagactggcaattataagcaagccctagaacatagcaacactgtctatgagagaaatccgctccgtactgacaacttactactcctgggtgcagtttattatcagttgcatgattttgatatgtgtgttgcaaaaaatgaagaagcactgaggattgagccacactttgctgagtgttacgggaatatggcaaatgcatggaaggagaaaggaaacattgaccttgcaattcgctactacttgattgccatagagctccgtcccaattttgctgatgcatggtcaaatctagctagtgcatacatgcgtaaaggaagactcactgaagcagcccagtgttgtcgtcaagcacttgctataaatcctctaatggttgatgcccatagcaacttgggtaatcttatgaaagctcaaggcttggtgcaagaattcgatacagatatgaagttgttgtcttcaagccagggctcagatgatggttgctcttgttgtaacttccatctccaagactgcaaatagtcagaatctaacattntttgcaggcatacagttgttaccttgaggca

SEQ ID NO: 3418 - DNA, 1840 bp, Glycine max
ccacgcgtccgagcgaagccccaaaagaggagagaaagaagaagaaacactcgagaaatttctcacatagggtttggatttttcgagcaatcttctctctccgccacttcacctcacgcgatctggttccgatcgcacacgttttaatgatcgtcgtcttccgcagcctctgattcggctctgatctctctcgccgcacctctccgccggaaccatgatctccgcgcagggcgaccaccaccgccaccaccaccactaccaccaccagccgcagcttcccggctccgccgacacctctcggcagcagttcaccgcggatcgcgtggagcccttctccgtcaagcaggaacccgcgtcgctcactcttctgccgttacgcggtcatgattctagtgaagttgatgaagatgtgtacttgtctcttgcacatcaaatgtacaagactggcgattataagcaagccctagaacacagcaacactgtctatgagagaaatccgctccgtactgacaacttactactcccgcgtccggtttattatcagttgcatgattttgatatgtgtgttgcaaaaaatgaagaagcactgaggattgagccacactttgctgagtgttacgggaatatggcaaatgcatggaaggagaaaggaaacattgaccttgcaattcgctactacttgattgccatagagctccgtcccaattttgctgatgcatggtcaaatctagctagtgcatacatgcgtaaaggaagactcactgaagcagcccagtgttgtcgtcaagcacttgctataaatcctctaatggttgatgcccatagcaacttgggtaatcttatgaaagctcaaggcttggtgcaagaagcatacagttgttaccttgaggcattgcgcattcaacctaccttcgctattgcatggtcaaatcttgctggcctgttcatggagtctggtgatttcaacagagcccttcagtattacaaggaagcagtgaaactaaaaccttccttccctgatgcatatctgaaccttgggaatgtatacaaggctttagggatgcctcaagaagctattgcatgttatcaacatgctcttcagacacggccaaactatggcatggcttatggtaatttggccagtatatattatgagcaaggtcaactggacatggcaattctacactataaacaagctgttgcatgtgaccccagatttttggaagcttacaataacttgggtaatgctctaaaagatgttggcagagtggaggaagcaatccagtgctataatcaatgccttacgttacagcccaaccatccacaagcattgaccaatcttggaaatatatacatggaatggaacatggtagctgctgctgctcaatattataaagctacactgaatgtaacaactggattgtctgctccttataacaaccttgccattatctataagcagcagggaaattatgttgatgccatatcatgctacaatgaggtcctccgcattgatcccttggcagctgatgggctagttaatagaggcaatacgtataaggagattggtagagttagtgatgctatccaggattacatacgggcaattgctgtcagacccaccatggctgaagcccatgctaatttggcttctgcttataaagatagtggacatgtagaggctgctgtgaagagctataaacaagcattgattcttcgtccagacttccctgaagcaacttgcaatctccttcatacacttccagtgtgtctgctgttgggaggatcgcgataaaatgttcaaggaagttgaagatcaataatcaggaggcagattaat

SEQ ID NO: 3419 - DNA, 1857 bp, Glycine max
ctctcttgataggctcgctcacctcacgcccggaattcccccgtcggcccgagctaatcccaaaactgaacccaccctcttcgtccggttcacagttcactagcgttcgattcgtttctctccctctgtctctctaatgggttcactcgaggccccaaccgccgcggaaaacggttccgctcccgccgccggcaacggaaaatccccctccgtcaacggcgcggaggcggcgctggagcccgacgcatcgaagcggcggagatcgtcggtgctcccactggaggtgggcacgcgcgtcatgtgccggtggagggacaacaagtaccaccccgtcaaagtcatcgaacgccgcaaggttcccaacgtcatccccaacgattacgagtactacgtccattacactgagttcaataggaggcttgatgagtgggtgaagcttgaccagttggatcttaattcagtggaggctgttgttgatgagaaagtggaggagaagggtgcaacaggtttgaagatgactcgccaccaaaagaggaagattgatgagacacatgtagagggacatgaggagcttgatgctgccagtttgcgagaacatgaggaatttaccaaagtgaaaaatatagctactattgagcttggaagatatgagattgagacatggtacttctccccattcccaccagaatacaatgactgtttgaagctgtacttttgtgagttttgcctcaatttcatgaaacgcaaagaacagcttcagaggcatatgaggaaatgtgatcttaagcatccccctggtgatgagatatacagaagtggtacactgtcaatgtttgaggtcgatggcaaaaagaacaaggtttatgggcagaatctttgttatttggccaagttatttcttgatcacaagaccctctattatgatgtagacctgtttctgttctatgttttatgtgaatgtgatgatcgaggttgtcacatggttggctatttctccaaggaaaaacattctgaggaatcttacaatttggcatgtatcctcaccctaccaccttaccaaaggaaaggctatggcaaatttctaattgcattctcatatgagctgtccaaaaaagagggcaaagttggcacacctgaaagacctctttctgaccttggactgctaagctacagaggatattggaccagggttctcttagacattctgaagaagcataagggaaacatttctatcaaggaactgagtgatatgactgccattaaagctgaagacatattaaccactctgcagagcctagaattgattcaatacaggaaaggtcagcatgttatatgcgcagatccgaaagtgttggatcgccatcttaaagctgctggcagagggggcctggaggttgatgttagcaaactgatctggactccttataaagaacaaagttgatggtcattggtcatatccatcaaggaaatactatgatgtgatgtaacttgtgcttttgtgtataaagtatatgtaggctaggtttcttggacaaaccctttgatgtattagtctttacaaataagatttaatacattttaagatgagaataggaacataactgattgttttatgtgctgaaccgtagccgtaggtatatgtttagtttgtatcttcgtttctaatgatgaatgcaagagggaaatattttttaatttgtggatatgtttagtttgtaaaaacgtttcttagacaaccccatttgatgtattagtattaacaaattttaatcctaagattggtggttgcatgatgtcataacccttttgagcacacttatctttggtgcagaatcctttggcgtgctatagctgcag

SEQ ID NO: 3420 - DNA, 1907 bp, Glycine max
ggctcgagggagattggtagagttagtgatgctatccaggattacatacgggcaattgttgtcaggcccaccatggcagaagcccatgctaatttggcttctgcttataaagatagtggacatgtagaggctgctgtgaagagctataaacaagcattgattcttcgtccagacttccctgaagcaacttgcaatctccttcatacacttcagtgtgtctgctgttgggaggatcgcgataaaatgttcaaggaagttgaatcaataatcaggaggcagattaatatgtctgttcttcctagtgtccagccattccatgccatagcatatcctcttgatccaatgcttgctctggaaattagccgtaaatatgctgcacactgctcggtaattgcatctcgttttgctcttcctccattcaaccatcctgctcctattccaatcaagcgcgagggaggatatgaaagactaaggattggttatgtgagtagtgactttggtaatcatcccttgtctcatctcatgggatctgtttttggtatgcacaacaggaagaatgtggaggtgttctgctatgccttgagtgctaatgatggtactgaatggaggcaacgtattcagtctgatgcagagcactttgtcgatgtatctgcccccccccccgatgcaatagcaaaaatgattaatgaggataagatacatatccttgtcaacctaaatggttatacaaagggtgccagaaatgagatatttgctatgcaacctgcaccaattcaagtttcatatatgggattccctggaacaactggggctacttacatagactacttagtcactgatgagtttgtttcaccactacggtatgcaaatatatattcagagaagattgtacatctaccgcattgctactttgtaaatgattataaacagaaaaatcaggatgtgttagatccaaactgcccacacaaacgatcagattatggtctacctgaggataaatttatatttgcatgcttcaatcaactttacaagatggatcctgaaatatttaatacatggtgtaatattcttaaacgtgtacccaacagtgcactctggctcctcagatttcctgcagctggggaaatgagactgagagcatatgctgctgcacaaggggtacaaccggatcaaattattttcacagatgttgcaatgaagaatgaacacatcagacggagttctttagcagacttattccttgactcgcctttatgcaatgcacatacaacaggaacagatatactatgggcaggtttgccaatggttactctgcctcttgagaaaatggctactagggttgctgggtcactctgtcttgccactggactaggggaggagatgattgttagcagcatggaagagtatgaagatagagcagtctcattggctctgaatcggccgaagcttcaggctcttactaataagcttaaagctgtacgcatgacttgccctctatttgacacggcccgttgggtgaggaatcttgagagatcatattttaaaatgtggaatctgcattgctctggtcaacgtccacagcattttaaggtcactgaaaatgatctagaatgtccttatgacaggtagacgtaggaattagacgggaatgtagataaagaaaattaagaggcgtagttacccacattgttgaggcgtagttactcaaaatgttgatgggctatttagttactcattgttgatgatgtattaccttacctcggattagtaaaagagaaaattcgtgacgtactcatcaccgtcggtggactaccccgtagtagtaagagagtaaaacaatgtgacttattcttatttataaaagaaaatgtttggctttttaaaaaaaaaaaaaaaaaaaaaacaac

SEQ ID NO: 3421 - DNA, 2132 bp, Glycine max
  misc_feature (18)..(18): n is a, c, g, or t
  misc_feature (61)..(61): n is a, c, g, or t
tcgagtcagctacgtagntcccccccccacaaccttgccattttctataagcagcagattntattgcagggaaattatgttgatgccatatcatgctacaatgaggtcctccgcattgatcccttggcagctgatgggctagttaatagaggcaatacgtataaggagatgggtagagttagtgatgctatccaggattacatacgggcaattgctgtcagacccaccagggctgaagcccatgctaatttggctccggcgctcggaagttcgtgcgccaggtagaggctgctgtgaagagctataaacaagcattgattcttcgtccagacttccctgaagcaacttgcaatctccttcatacataccagtgtgtatgctgttgggaggatcgtgataaaatgttcaaggaagttgaagcgataatcaggaggcagattaatatgtccgttattcctagtgtccagccattccatgcaatagcatatccacttgacccaatgcttgctctggaaattagccgtaaatatgctgcacactgctcggtaattgcatctcgtttttctcttcctccattcaaccatcctgctcctattccaatcaagcgcgagggaggatatgaaagactaaggattggttatgtgagtagtgactttggtaatcatcccttgtctcatctcatgggatctgtttttggtatgcacaacaggaagaatgtggaggtgttctgctatgccttgagtgctaatgatggtactgaatggaggcaacgtattcagtctgaagcagagcactttgtggatgtatctgccatgtcatcagatgcaatagcaaaaatgattaatgaggataagatacatatccttgtcaacctaaatggttatactaagggtgccagaaatgagatatttgctatgcaacctgcaccaattcaagtttcatatatgggattccctggaacaactggggctacttacatagactacttagtcactgatgagtttgtttcaccactagggtatgcaaatatatattcagagaagattgtacatctcccccattgctactttgtaaatgattataaacagaaaaatcaagatgtgttagatcccaactgcccacacaaacgatcagattatggtctacctgaggataaatttatatttgcatgcttcaatcaactgtacaagatggatcctgaaatatttaatacatggtgtaatattcttaaacgtgtacccaacagtgcactctggctcctcagatttcctgcagctggggaaatgagactgagagcatatgctgctgcacaaggggtacaaccggatcaaattattttcacagatgttgccacgaagaatgaacacatcagaagaagttctttagcagacttattccttgactcgcctttatgcaatgcacatacaacaggaacagatatactatgggcaggtttgccaatggttactctgcctcttgaaaaaatggctactagggttgcgggctcactctgtcttgccactggactaggggacgagatgattgttagcagcatgaaagagtatgaagatagagcagtctcattggctctgaatcggccgaagcttaaagctcttactaataagcttaaagctgtacgcttgacttgccctctatttgacactgcccgctgggtgaggaatcttgagagatcatattttaaaatgtggaatctgcattgctctggtcaacgtcctcagcattttaaggtcactgaaaatgatctcgaatgcccttacgacaggtagcataggaattagacgggaatgtagataagaaaattaagagaaggtcgcattgttgagacgtagttactcaaatgttgatgggttatttagttactcattgttgatgtactacccctatcttgtattagtaaaagagaaaatttgtgatgtgtactcaccgtcggtggattacctcgtagtagtaaaaagagtacaacaatgtgacgtatttttatttataaaagaaaatgtttgcctttggtgttaaaaaaaaaaaaaaaaaaaaaaaaaaaaaaaaaaaaaaaaaaaaaaaaaaaaaaaaaaaaaaaaaaaaaaaaaaaaaaaaaaaaaaaaaaaaaaaaaaaa

SEQ ID NO: 3422 - DNA, 1543 bp, Glycine max
ctacacaactctgcttcacttcacacccctcctctctctcttttgctcatttcctttgactcctcattatcaaagaaaatggctctcattgggttgctcttgatgggttttctcacaatgttctcctctgctcatgcctatggtggagggtggactaatgctcatgccaccttctatggagggagtgatgcatctgggacaatgggtggggcatgtgggtatgggaatctctacagccaagggtatggaacaaacactgctgctctaagcactgcactgttcaacaatggcttgagctgtggctcttgctatgagattaggtgtgccaatgaccacaggtggtgccttccaggttctattgtggtcactgccaccaatttctgtcctccaaacaatgccttgcccaacaacaatggtggctggtgtaaccctcctctccaacactttgacctagctcaacctgtcttcctacgcattgctcagtacaaagctggaattgtccctgtctcctacagaagggtggcttgtaggaggaagggagggatcaggttcacaatcaatggacactcctacttcaacctagttctcatcacaaacgttggtggtgctggtgatgtgcattctgtttcaatcaagggttcaagaactggttggatgccaatgtcaagaaactggggtcagaactggcagagcaataactacctcgatggtcaaagcctctcctttaaggtcaccacaagtgatggcagaactattgtgtccaacaatgttgccccatctggctggtcctttggccaaacctacactggtgctcaattccgctagatcttgttgtccaaagttctaagtcacacattcaaatactactactatatagcataatagatatatggtattagtaggttctaagagtattattattatgagtttatgatgactggttagtatactagggtattagatagtatgctgctaggggaaggggtcagttttttggtaatttttgaaggccagggaattaagatttaagaaggggtatgttttaaattgctccttcattttaattttaatttcttttgtgtcaacaagtggggacctatttttttaggcccttcttgattacaggggtgtttttttatataactttttcagaagtgtttttttgaaccttcggtggctgaagagaagaagctagtgaaggtggagttcttttttatgggtgaggtactaaattggaagaggtggactttgttgttaccacccgccaattagtattgggatagtgtgtttttcattttggtgttgttattggcagttttattaagtgttgtttgctttttattactgatccttttgtcatcagcctgggctgtgtgtcttcggttgtgttggagactgaaaatgtaaattttcttgaaaggaaagttactgtagttactagtaatatttcctttttatttcttaattgataattgttatatttatcccacgtgcctcattaaaaagaaaaaaaaaaaaaaaaaataaaaaaaaaaaaaaaaaa

SEQ ID NO: 3423 - DNA, 2099 bp, Glycine max
  misc_feature (2088)..(2091): n is a, c, g, or t
aaaaattttcattccacgtaaagataagaagagttgaatttgggtacaatataataaacaattctccaccacacaataatctataatcaaaatacaccactaattaaactcttattatacataaactttactaggtgataatacaataggaacttgatgccaagcatgccataaactattggagagtaattcacattcgactttgcgtgaaggaccccatctccttggcgatttgtctcagcacaaacttctgtatcttccccgtagatgtcttaggaagctcgtctttgaaaacaaccgttttgggaaccatataatgcggcatgttgtccctacaatactcaattatgtccttctcagtgggtttctctttctcttttatcccttttttcaagctcacaaacgcgcacggcgtctctccccaatactcgtgcggcctcgccaccaccgccgcctcgttcaccgccggatgcccgtacaatatcgactccacctccacgctgctcaaattctcgccgccactgattataacatcctttgacctatctttgatctccaagtacccatcttcatgcatcacaccaacatctccggtgtagaaccaaccgttcttgaaacaacttgctgttcccgaagggtcttttaggtagcctaacatcacacaccctcctttcatcacaacttctccgatgctaaccccgtcacgcttcacgctctccccggtgggacccaccacgtcgacttccgccattgcaaccgttctcaccccttgcctcgccttcagccgagccctctccgtcgccggcaacttgttccactcccccttccacgcgcatgacaccaccaatcctccggtctcagtcaaaccatacccgtgactcacgacaaaccccaaagcctctgttctgaagagcaccgccgcaggaggcggcgctccggcggtgaggatctgaaccggtttctccaacggggagttcgcgttggttaacatgttgagcaccaccggcgcgccgcacatgtgagtcacgtgatggcgttttatgagagagtaaacaatctcagcgtcgaacttgcggacacagatattagttccacccacggcagcaatcccatacgggaagctccagccgttagcgtggaacatcggaagcgtccagagataaaccgggttcttcggaaccgcccaatcaataagagagtccactgcaacaataaacgttccacggtggcagtggacaacgcctttgggagacgacgtcgctccagccgtgttgttaagtaccatcgggtcccactcggagtgcggtaggacccacttgaatcccggatcacccttgcttacaagcccctcgtaggtgtcgaggaaattatcaacggcgggtgcggctttctctttctccacggtttcgtctgtgatgagaattagggttgggcgttgattttggttttcagggaagagagatagggcttcgaggacgaggtcgcgtgaggcgcagtcgacgaagaccagcctggagttcgcgtggcggaggatgacggagacggtgcgggcgtcgaggcgggtgttgatgttgttgagaattgcgccggcgaaagggacggcgaagtggagctcgtacatggcggggacgttcggggcgaggacggagacgacgctgccgcggcggatgccgagggaggagagggaggaggcgagctggaggcatcggcggcgcgtgagggaccaggtgaaggtggtgtggttgtagactagggaagggacgtgggcgtagacggtggctgctctgtccaagaaggcgagtggagtgagaggggatgagttaggagcgcttggcttcagctgttccattaggagaaagattctctgaagcaaaacacacacccacgctgcttctgaatgaatgaacagaacgtatatacacagcgtcttgctcgtgtagtgatgagggagaaatatatgttaaatcattcatttcctctaatatttaagaatgatttagttagatcttttcgtccatttttgcacgtgactctcttacactttctgataattcagtaaatctcattagataaagtgatgattaaaannnngtctcctt

SEQ ID NO: 3424 - DNA, 684 bp, Glycine max
aggaaggtccaccgaagctaaaggtgcttccacacgcagcagattttacctccataaacccttcgttcttcttcgtctccctttgcttctctcacttcccatgtctgagtggcttcgacgccttccctcgccagaatgctaactcatctccgccgcgcggctgccgcatgcggtggtgctacctccgaccacttcctcgctctcaggcagttcagctccgccgtggtcgccgtttcctccgtgtctgattccgatccaacacttccctcttcttccgattcacagagaaaagcatctagatggttgctatttctacctggggcaatcacatttggccttgggacttggcagattggtagaagagaagaaaagattaaaatgttggaatatcgagagaagaggttgcaaatggaaccattaaaattcagtagtgcttattcatcagatgaggaattagattctctggaatttaggaaggtggtgtgcaaaggatattttgatgataaaaaatcagtctatgtgggaccacgttcaagaagtatttcaggagtcactgaaaatggctactatattataacacctcttatgccagttcccaattgtcctgacagtgtaagcattccaattttagtcaacagagggtgggttccacgtagtttgaaagacaaatttttagaaggctca

SEQ ID NO: 3425 - DNA, 1470 bp, Glycine max
gctagttattgaggatggtgaagtagttcatctcaaggatggtggggtttctattttgaaatatgagaatgacattgggagaacatggcgcttctctttccagagctttctcagtgcgacgtgcattatctgttctagagatggaggttgagcaaataaataaaggtaattatgagcattatacgcaaaggcgacagaaggggcagccagagtctctaacaaccacaatgaggggggggcttatacatcgaggatctaacaaatccaagtctgttctgttgggtgggctgaaggatcacctcaaaacaattaggcgaagtagaaggatacttttcattggttgtggtacaagttataatgctgctttggcagctagacccatcttggaagaactttctggtgttcctgttactatggaaattgctagtgatctattggatcgggagggaccaatataccgggaggatactgccgtttttgttagtcaatctggtgaaactgcagacactttacttgcactgcaatatgctttagacaatggtgcattgtgtgttgggataacaaacactgttggtagtgcaatagcaaggaatacacattgtggtgttcatataaatgctggtgctgagattggtgtggcaagtaccaaggcatatacaagtcaaatagtagtgatggtcatgttagctcttgcaataggaggcgatacaatttcaaatcaagccagaagagaagctatcatagatggtctttttgatctgccaaataaagtcagagaggtgctgaagcttgatctggagatgaaggatctagcaaagcagttgattgctgagcagtctcttcttgtctttgggagaggatacaactatgcaactgctcttgagggagctttgaaagtaaaggaagtggctctaatgcatagtgaagggatacttgctggtgagatgaagcatggtcctttggcattagtggatgaaaatctcccaattgttgttttagctacccgtgatgcctgcttcagcaaacagcagtctgttattcagcaacttaatgcccgcagaggtcgtctgatagttatgtgttcaaaaggggatgcttcctctgtatgccctaatgaatcttgtagggtaattgaagttccactagttgaggactgtcttcaacctgtaattaatgtagttccattacagttattggcatatcatctcactgttctcaggggacataacgtcgaccagccgcgtaatcttgccaagagtgtcacaacgcaataatgaagtttgtggcatattaacgcattgtaaattagtagatgcaggcacactggttgattaaaagacaccttctcagcaggcagattattgtttaacatgattttaacatctttgatgtatttaattttcttgaaactcaccaggcagaatactgtttaatatgattattacatctttgatgtatttaatttgctgg

SEQ ID NO: 3426 - DNA, 1328 bp, Glycine max
ccacgccgcccatctcaagatcagatcctcatctaccaccattccaggtgtagccatcaaaacaacgtttgtttaacaaaacccattatcagatcagatccgatcagatcctcttcagattcggatcaccgccgagtccatgagcacgccagcgctttcagggggcacgggcctcttctctggattcacgcgtttatgcaagggccttgcggtggtgcttgtttgcggtcacattgcggttcagtttatcccttcagctgttaactatcttgctcttattcccgccaggacaatcccatttgcctggaatctcattacagctggatatgttgaacaatctatatatggggtagtggtcagcacattaagtctcctgtttattgggaagctgcttgaaccaatatggggctccagggaattctttaaatttatctttgtggttaatcttctaacttcagtatgtttattcatcactgctattgccttatactacattacaaggctggagacttacctttacatgccactttctggatttcatggagttgtatctggtttcttggttggcattaagcaaattataccagatcaagagcttcctttcattaagataaaaacaaagtggttgccatctatcactgtattgctttccattgctattagcttctggacactagaggctacagcatatcttccaaccattatatctggcacgtatataagctggatttatcttagatactggcagaggaaaccagaaactaaacatagaggtgatctgagtgaagattttgctttctccacatttttcccagaatttttaagaccagtcatagaccctatcgcttcaatatttcatcgaatgctctgtggaagatatgatgcttctaatgatggtcaaggcaacagtctggaaagtgagcctttaccaggttcggactcaattgaggcatccaggagacgagaaagaggtgctcgagcactggaagaacgattggctgcagagaggttggctgttgcacgacgtgagttgcaaagagaggctgaggaaaatgtataattccccagcgtttgtaaattttggatcagttcaggcaatatgcacctattaggagtgatattttcagaggtcgtacagtaattagaaattttttgtttaggtcaaggaaaattttaatgtggttttgccatggactatgatctttacaaaaccgaaggtttctctttcttttgtcagataaatatatttgactttcttgtgtactttacacaaatacatagaatctaaagagtttttcagttgttgtctcccaaaaaaaaaaaaaaaa

SEQ ID NO: 3427 - DNA, 878 bp, Glycine max
  misc_feature (839)..(839): n is a, c, g, or t
ggaagtttttgagagcttttctaccaaaaatatagaatattttgggtggagaacctctcaatttggaaaagtaaattctaattgaaaacatttcacacctttaattacttataaatttaaataaaaagaacatttttcttaaaataaaaaacagtaatatttaatttggatcatcactgttagtgtaaagtgggtctctgaagatcagatcctcatcttctaccatttcaggtgctcactttcttcgcccatttttatttgtttgttgttttaacaaaacccataatcagatccgatcctcttgagattgggatcaacgccgagtccatgagcacgccagcgctttcagggggcacgggcctcttctctgggttcactcggttatgcaagggccttgcggtggtgcttgtttgcggtcacattgcggttcagtttttcccttcagctgttaactaccttgctcttattcccgccaggacaatcccatttgcctggaatctcatcacagctggttatgttgaacaatctatatatggggtagtggtcagcacattaagtctcctgtttattgggaagctgcttgaaccaatatggggctccagggaattctttaaattcatctttgtggttaatcttctaacttcagtatgtttattcatcactgctattgctttatactacattacaaggctggagacttacctttacatgccactttctggatttcatggagttgtatctggtttcttggttggcgtcaagcaaattataccagatcaagagcttcctttcattaagataaaaacaaagtggttgccatctatcactgtattgctttncattgctattagcttctggacgctagaggctacagcata

SEQ ID NO: 3428 - DNA, 1220 bp, Glycine max
ccctcgcgtccgtacggctgcgagaagacgacagaagggggcggtaggcgcagtacgccactgtccacaccacaccccctttgctgcttccaccactccctaaccttcgctctcacacactctctttcatccatcgtcatctctgaattggaaactcattattattaaatgaaattacgaaaacgaagaaaccaaacaatagtagcttagttaattgaattgaatgaatctcaatggaacctcttctcttcaacgactccacattctcttcagctaacccttctttgtctgagatttggccctctcatttcccctccgatcacactcccaggaagaggcgcctctccccctcgagtgattctgccagcaataaacatatcaagttatcagcaccagaatcccaggatcaaaacggtgcgttgaaggttggtgaagtagacgcgacttccgtggccggtaacaagctacctcaacaaaccccgaaacctagttcttcggagcaggcacctaagcaagactatatacacgtgcgagccagaagaggccaagccaccgataaccacagtctggctgagagagctagaagggaaaaaatcagtgagaggatgaaaattcttcaggatttagtccccgggtgcaacaaggtaattggtaaagcatttgtgctggatgagataattaattatgtccagtcactgcaacgtcaggttgagttcctttcaatgaagcttgaggcagttagttcgagattgagcatgaagcctactcttgaatgttttccttcaaaagaagttagtgtattgacgtttgcactcaggccggaataatatttggatcacaaccggccaagggatatgctcaaggatcacaaatgggatggctgcatatgcagatagctggtggttttgagaaagcaacataattcaagggagattcatagggaatgacagatcaatcagtgtggttggttttacattgaaaaggaaaaaagtcacttgggctggttggttagcatggtctgctctattaacaacctagtcaattgatgcaaaatgttgtaaggtctgtatgttctttgtcatagtatgatatcgattgtaagaaatgcatctaatttcctcgcgcatcatctgactgggaatgtagtgctgcactatgttagcaattgaaataatcttattgtggtttggttttcgtattaaaaaaaaacaaaccaaaaa

SEQ ID NO: 3429 - DNA, 911 bp, Glycine max
cccacgcctccggccgctgcgagaagacgacagaaagtggaacagcagttgcggagtcaatcgaaatcggcggagatggttgccatgaggtttcaccagtaccaggtggtgggaagggctcttcctaccgaatccgatgagcatcctaagatctaccgcatgaaactctgggccaccaacgaggtccgtgccaaatccaagttctggtattttttgagaaaattgaagaaggttaagaaaagcaatggacaagtgctagccatcaatgagatttttgagaagaatcctaccaagattaagaattatggaatttggctgcgttatcagagccgcactggttatcacaatatgtacaaggaataccgagatacaactctgaatggtgcagttgagcatatgtacactgaaatggcatctcgtcatagggtgaggcatccatgcatccagataattaagactgccaccatcccagctaagctgtgcaaaagggagagcaccaagcagtttcacaattctaaaatcaagttcccattggtgttcaagaagattaggcctccaactaggaagctgaagacaacatacaaggcatccaggccaaacctatttatgtgattcagttaatggaatttccctgctttttgattcattaagtataaaaaggaagagcttagaggtgatccatgtagtgacaaacttcgttgcctgcaaccatagtttgcattcttttaagctctgaagattttgtttttgaaagatggtgttttatttaattttatatttttgcagagtcgtctattttactcattctgatgtattcgatcaagttgcttttgaatttagcgattacttttttgtctccgttctgggtttatcgccggttagttgatatgtgctctctgatttttggtaat

SEQ ID NO: 3430 - DNA, 1405 bp, Glycine max
atttttctcccactaattcacaaataccacggcaacatatattgaaattcgccgcggatcgaatgcttgcgtttctcaaagattggcctcgcgtccgcatcacggcagtagctgccatattggtatccgttttaatagatcattccaccagctgatgctgttgacgctctcaaaacttgtgcttgcttgttgaaggattgcaggatagaactagctaagtgtctttcaaacccatcttgtgcggccaatatcgcttgtcttcaaacttgcaacaatagacctgatgaaaccgaatgccaaattaagtgtggggacctgttcgaaaatagtgtggttgatgaattcaatgagtgtgcagtctcacggaagaaatgtgtacctaagaagtctgatgtgggagaatttcctgctccaaatcctgatgtccttgttaatagctttaacattgctgagttcagtggcaagtggttcatcactagtggcttaaatcctaccttcgatacctttgactgccaattacatgaatttcacacagaatccaacaaacttgtgggtaatttgtcatggagaatacggactccagatgctggatttattactaggtccgctgagcagagatttgtacaagatccttcctatcctgggatcctttacaatcatgacaatgagtaccttcactatcaagatgactggtatattttgtcatccaagattgagaataaatcagatgactacgtatttgtatactaccgaggcagaaacgatgcttgggatggttatggaggtgctgttgtatacacaaggagtgcagttttgcctgaatctatagttcctgaacttgaaaaagcatctaagagtgtgggaagagactttagcaagttcatcaggacagataacacatgcgggccagagccttccctggtggaaaggctggagaaaaaggtagaggaaggagaagagaccattgtaagggaagttgaacagatagaagaagaggtggagaaggtggggaaaacggaggcgaccttatttcagaagttggcagaagggttcaaaatgtttcaagaagacgaggaaaatttcttaagagggttatcaaaagaagaaatggagattcttgatgggcttaaaatggaagccggtgaagtagaaaagctctttggacgtgccttgccgattaggaaactaagataagtctgagaaccatgtccaagataacttggcatcataatctttttttatcatctttgcttttattcgttgactacatatattgcatggctgtagatagctttcctccttaatcattgcttttatgttgacatactaatgattattcaaatatttgtaacagcatttatcaattgttgtatatatattcagagtattgcatttgcataggttt

SEQ ID NO: 3431 - DNA, 857 bp, Glycine max
tttttttttattgaggtttcttttatttaattggaatcaaagagtcttttgttaacattagaagacttacaaacaatgatatatatatatatatagggatattttgccatccaagattgagaataaatcagatgactacgtatttgtatactaccgaggcagaaacgatgcttgggatggttatggaggtgctgttgtatacacaaggagtgcagttttgcctgaatctatagttcctgaacttgaaaaagcatctaagagtgtgggaagagactttagcacgttcatcaggacagataacacatgcgggccagagccttccctggtggaaaggctggagaaaaaggtagaggaaggagaagagaccattgtaagggaagttgaacagttagaagaagaggtggagaaggtggggaaaacggaggccaccttgtttcagaaattggcagaagggttcaaagtattccaagaagatgaggagaatttcttaagagggttatcaaaagaagaaatggagattcttgatgggctcaaaatggaagccggtgaagtagaaaagctctttggacgtgccttgccgataaggaaactaagataagcctgagaaccatgtccaagataacttgacatcataatctttttgatcatcttaaatttatctttgcttttattcattgactatatatattgcatggctttagaaatctttcctccctaatcattgcttttatgctgacatactaatgattattcaaatattacgtaacagcttttatcaattgttgtatatatattcagagtattgtatttgcataggtttagatgcctgtgctctttttcagttgaaaaaaaaaaaa

SEQ ID NO: 3432 - DNA, 2013 bp, Glycine max
attctatcggtttcttcttctgggtgttgcttgaatccgtggaaagttcatttattttcgattttcatgcgaccagggacttttggggctaataaagtttctgaagagataagatgatcgttgtgctgagcatggttattgatgggtagcagaagtagaacagtaaacgttaacactaaggacactgacaaggttctgaacgggatgccaagctacgctcctccattgccttcttcttccaattccatggccatggaagcaactaatgctcatccttcccgtatttctgaatttggaaccctggagcaatctcttggatttcgtgttgaagataccattaatcttagcagaaatccgatgtttaatcaaatgaaatcaaatagccaagctctaggtgctgatattcaatttggtgctttaaataagtcaattgcaacatcggatataaacctctctgctgctattgctgcatctcaggcactggtattccaaaaagattcgcaaccaactctggcttcgacatctgctggtcgtgagaactggggagagaccaacatggctgatgctagccctaggactgatacttcaacagatgatacagaagacaaaaatcaaaggcctgaaaggggtgaatccagtggatcaaaagataaatcagatcaaaagacattaagacggcttgctcaaaatcgtgaggctgccaggaaaagccgactgaggaaaaaggcatatgtgcaacaattagagagcagtaggttgaaactgacccaacttgagcaggagctccagcgagcacgccagcagggaatatttatttcaagtactggagatcaggcacagtcaatgagtggaaatggcgctatggcatttgatgtagagtacgcacgatggttagaagagcataatagacaaaccaatgagctaagggctgcaataaattctcatgctggagatattgaacttcgaaccattgttgacaatttcatgacgcagtttgatgatatcttcaggctgaaaggtattgcagcaaaagctgatgttttccacattctgtcaggaatgtggaagactccagctgagaggtgtttcatgtggattggaggctttcggtcatccgaactcctcaagcttcttctaagtcagttggagcctttagccgagcaacaattgatgggcatctacaacttgcagcaatcatcccagcagactgaagatgctctttcccaagggatggatgcattgcagcaatcactatctgagacattggctaatggttcgcccagctcatcaggctcctcgggaaatgtggcaaattacatggggcaaatggctatggccatgggaaagcttggtacacttgaggggtttcttcaccaggctgacaatctgcggcagcagacattacaacaaatgcttcgaatattaacgaccaggcaatcggctcgtgctcttcttgccatcagtgattatttctcacggctgagagcgctgagttctttgtggcttgccaggccaagggagtgaagcatttcacagccccattagtggacttctttcatgcctgactcccttaaacaccgatgatcattgaatcttgtgctctgaatgagttcaatggaagctggtgtcttttgacaatgaattcctcttgaagcctagttgtgatgctataaacattaaatgctatgatttttctactctgccaactgctggtgtggtgcaacatttttctttaagcttttgtggttttaaaatagtctcaataatttgattatataggtgtatgatagatagaagctgttgaagggaaaaatgtagaaatagtgtatctgtatttttaggttatagctgttcattgtatttcagaaatcagcttttatttgagggggtatttacctctctttagtttcatttcctgcttaatggtttgtggttggttgcacataaggctccatggtgtatgtatttatacgttctcttttggtatattagaaagacattactaactaaaaa

SEQ ID NO: 3433 - DNA, 1528 bp, Glycine max
cccgggctcgacccacgcgtccgtacggctgctagaagacgacagaaggggatgcatcccaacggctagcccattcaatttgaatcggggagacagaaagaatagggcaaattttcgattttgattttccaaccaaaaaatccagggtttaccctcacaccccactccctccaaagcgtttgcaattcatcgttctcttaaaaaagttttcaattgaaacactgattttgaattcgaggtttgatttagttctcagaaagaagtgctgcaatggatctccctcgagacgttgacgactacatcaaacaaaccctcgacgatacattaggtattcccgtatcgtcgaaaaccctagaatccaaacttcgagcttcccaagactcgcaatggcgcctccgcgaacgcctcctttcccttctcccccaattgaaacagaaagaccaactcatcgatcgcctcaagtctgaagcgggaatgaacgcgcgagctctgaagaagttcgttgaggagaatcagagactggcgacggagtgtgagagattgttggctcgctgccatcagttggagaatgagtgcgcgctgtatgataaggacagagaagcgttgatggagtttgggaacaatgccgatgaacgggcacgcgaggctcaaacccgagttcttgatttggaacgggatttgctcttcatggggaatgaattgaacaaatataagcatcagcatcaattggtcaattcttctgtgtgcacacctggggaaaagaatttacttgattctgttttggcaacgccaacacttactagtaaagatgatgattctacatatgcatttttgcaagtaaacagtgagaatgaggcctgtaaacagttgctgagtatgtggaactgcataaacccatcaactcggagtgttttgtcacttgttgccaaagtcaagtcacttgagaaggataaggagcatctaagaactaaccttcacaaagccgaggaggaggtcaaattactgtttgatgaaaacaatgtattggaaaaggagaacaaaaggttattgaggatatacaaggaaagaaaccatcccgattctggtggggagtataccaacagcccatcagccaagtcaaacaagagaaagtctagtcccagaacaagtagcccaatgcagaggaagattgattttgacgatcaagaggtagcaagacgaccattatcacccttacgacataactccccagactgtagaatgcataagaagtaacgtgacacactaacagtgtgtttggtcagacgtttgaaactgtcaaacatcccttcagctcaatgatacaaaagacccatggtttgggttcaatcgtgccttgtaatgtttaaacgctaaaacaaacacacattaagggaccatgagtttacatcatgcggaaagtttcaaacattgtttccgatttatagatggatgactaatcatagcaaaaaaaattgttgctcaaaaaaaaaaaaaaaaaaaaaaaaaaaaaagcggccgctctagagga

SEQ ID NO: 3434 - DNA, 1746 bp, Glycine max
gttggatttctttgaagataccattaatcttagcagaaatccgatgtttaatcaaatgaaatcaaatagccaagctctaggtgctgatattcaatttggtgctttatcgaggcagctacctagggcccccccccatataaacctctctgctgctattgctgggtctcaagcattggtattacaaaaagattcacaaccaactctggcttcaacatctgctggtcgtgagaactggggagagaccaacttggctgatgctagccctaggactgatacttcaacagatgatacagaagacaaaaatcaaaggcctgaaaggggtgaatccagtggatcaaaagataaatcagatcaaaagacattaagacggcttgctcaaaatcgtgaggctgccaggaaaagccgactgaggaaaaaggcatatgtgcaacaattagagagcagtaggttgaaactgacccaacttgagcaggagctccagcgagcacgccagcagggaatatttatttcaagtactggagatcaggcacagtcaatgagtggaaatggcgctatggcatttgatgtagagtacgcacgatggttagaagagcataatagacaaaccaatgagctaagggctgcaataaattctcatgctggagatattgaacttcgaaccattgttgacaatttcatgacacaatttgatgatatcctcaggctgaaaggtagcgctgccaaagctgatgttttccacattctgtcaggaatgtggaagactccagctgagaggtgtttcatgtggattggaggctttcgctcatccgaactactcaagcttcttgaaagtcagttggagcctttaaccgagcaacaattgatgggcatctacaacttgcagcagtcatcccagcaggctgaagatgctctttcccaagggatggatgcattgcagcaatcactgtctgagacattggctaatggttcacccagcacatcaggctcctcgggaaatgtggcaagttacatggggcaaatggctatggccatgggaaagcttggtactcttgatgggtttcttcgccaggctgacaatctgcggcagcagacattacaacaaatgcttcgaatattaacgaccaggcaatcagctcgagctcttctcgccatcagtgattatttctcacggctgcgagctctgagttctttgtggcttgctaggccaagggagtgaagcatttcacagctccattagtggacttctttcatacctgacccccttaaagactgatcgttgaatcttgtgctctgaatgagttcaatggaagctggtgtcttttgacaatgaattcctctagaagcctagttgtggtgctataaacattagatgctacgatttttctactctgccaactgctgctgtggtgcaacacttttctttaagcttttgtggttttaaaatagtctcaataatttgattatataggtgtatgatagatagaagttgttgaaggggaaaaatgtagaaatagtatctgtattttaggttatagctgttcattgtatttcagaaatcagcttttatttgtggttggttgcatatatggctccatggtgtatttatgtatggatgtatatatacgttctctcttggtatattagaaagacattaccaactagtaactgaatttgttcaaaaaaaaaaaaaaaaagaaacaataaaaacataatataactaaaaaaaataaaaggggcgcccgtttt

SEQ ID NO: 3435 - DNA, 1257 bp, Glycine max
  misc_feature (2)..(2): n is a, c, g, or t
  misc_feature (5)..(5): n is a, c, g, or t
  misc_feature (9)..(9): n is a, c, g, or t
  misc_feature (13)..(15): n is a, c, g, or t
  misc_feature (18)..(19): n is a, c, g, or t
  misc_feature (26)..(26): n is a, c, g, or t
  misc_feature (32)..(33): n is a, c, g, or t
  misc_feature (35)..(35): n is a, c, g, or t
  misc_feature (37)..(37): n is a, c, g, or t
  misc_feature (39)..(40): n is a, c, g, or t
  misc_feature (62)..(62): n is a, c, g, or t
  misc_feature (64)..(64): n is a, c, g, or t
  misc_feature (70)..(70): n is a, c, g, or t
  misc_feature (78)..(80): n is a, c, g, or t
  misc_feature (83)..(84): n is a, c, g, or t
  misc_feature (93)..(93): n is a, c, g, or t
  misc_feature (95)..(95): n is a, c, g, or t
  misc_feature (97)..(98): n is a, c, g, or t
  misc_feature (101)..(104): n is a, c, g, or t
  misc_feature (110)..(110): n is a, c, g, or t
  misc_feature (118)..(118): n is a, c, g, or t
  misc_feature (122)..(122): n is a, c, g, or t
  misc_feature (124)..(124): n is a, c, g, or t
  misc_feature (126)..(126): n is a, c, g, or t
  misc_feature (130)..(130): n is a, c, g, or t
  misc_feature (134)..(134): n is a, c, g, or t
  misc_feature (142)..(142): n is a, c, g, or t
  misc_feature (144)..(145): n is a, c, g, or t
  misc_feature (151)..(151): n is a, c, g, or t
  misc_feature (153)..(153): n is a, c, g, or t
  misc_feature (155)..(156): n is a, c, g, or t
  misc_feature (161)..(161): n is a, c, g, or t
  misc_feature (164)..(164): n is a, c, g, or t
  misc_feature (166)..(166): n is a, c, g, or t
  misc_feature (169)..(170): n is a, c, g, or t
  misc_feature (175)..(175): n is a, c, g, or t
  misc_feature (178)..(178): n is a, c, g, or t
  misc_feature (184)..(186): n is a, c, g, or t
  misc_feature (192)..(192): n is a, c, g, or t
  misc_feature (197)..(197): n is a, c, g, or t
  misc_feature (202)..(203): n is a, c, g, or t
  misc_feature (208)..(208): n is a, c, g, or t
  misc_feature (217)..(217): n is a, c, g, or t
  misc_feature (219)..(219): n is a, c, g, or t
  misc_feature (227)..(227): n is a, c, g, or t
  misc_feature (238)..(238): n is a, c, g, or t
  misc_feature (248)..(248): n is a, c, g, or t
  misc_feature (259)..(259): n is a, c, g, or t
  misc_feature (264)..(264): n is a, c, g, or t
  misc_feature (279)..(279): n is a, c, g, or t
  misc_feature (285)..(286): n is a, c, g, or t
  misc_feature (292)..(292): n is a, c, g, or t
  misc_feature (304)..(304): n is a, c, g, or t
  misc_feature (362)..(362): n is a, c, g, or t
cntancatncatnnncanntacacanatcatnnanancnnataagccaatacacaatcatananattatntaaccctnnnatnnaaacatacnananncannnnaacaanaaaataanattnananacantaanataccatncnnaatatnanannaaaanacnanatnnggacncanatccannncaatcncccancgggnnaagtnaaaggtaancnccataaantgaggacaaanacccataacntgatcattaangtatngggttacagagtgangtcagnnttccanaagtggtggctngtggtccccaggtgtacccctcgaatctcccctaacaattggtatcagagccgatggntcaagttagtgaccggcttagatgagtatgcaagtaccgcaggtggccagaatggctagcggcacagcgcgccccacaggtgaagcggggtagccagaatggctagcgggcagggcaagtaccgcaggtggccatggctatactcgtggatgataaagacttccgctcgagggggagactaccatgtggaagagactcacacttgagggggagatgtattgggttacaagtgtgaggtgaagtcccacatcggatagaagtggaaaggttgagcaccatataagtgaggagaagacccataaacctgagccttaaggttttgggttagagtgtggtgtcaggtctccttatgtggtggcttgtggtccacaggtgtacttctcgaatctccccaacaggtggattggaaggggtattcaatccttgtcaagtcagatagatggctaccaagctcaaaagttgcgtaagtgggatgttcaaaaagttcaatcaattttctctccggaggggtcctttagttatattcaaggagatttttggaaaaagctatggaagattaaagccattccaaagtgtgtccatttgctctagagggcatgtaaggacattttgctggtgatgacaaatttgaaaagaaaaaaaagattagaagttgacagtatttgtcctagatgcagtgtggggaatcaaacagtggtccacactctcccttttatgtcgggaagtccccaggaatatgttttgcataaagcttaggtggtaggattcaggctcaaccccagtcctcatttgttgtatgagttgggagttgtatacaggttggtgatgctatttttttgggagaatttgtgaacttgtttgggttatttggtatgaaagggatcaatgggttttt

SEQ ID NO: 3436 - DNA, 1006 bp, Glycine max
tccgcttggattgtgtctttagggatgatgctgaaatccctaacctaaaattcccctccctgatggctttaccagaggttgggttgagactgctcctttcacccgttacttccaaccttcttctccgcacagcatgctgttcaatagggcttgcgcttcccgtgtattccacgtttaaagctattgagaacaatgacccatatgagcaacaaaggtgcctattgtattgggcagcttatggttcttttagtgctgcagaaatgtttgctgaaaaattattttcctggattccactctatcatcacatgaagtttgcatttcttgtttggctacagcttcccactcttgatggtgcaagacaactgtattctagtcacttgcgtccattcctgttgaagcatcaagctagaatggatctgattgttgaatttgtgtatggtgcaatgagtaaaattattagtgcataccaaccagaattagagtttgcaagaactcttgcagtgaaatttttaatgacagccactcagatggttaggaatctcattcatccagttgggagggagtcaaatggcattgaaccccaaaagaggcaggtttcagaatcagaagaagattaatacatgtttttttttctcattacaacaataaagtcttatccaactaagtgagatcaattacatggatcacatgacgtcatttgacatagttaattattggacaaaattaggttggctagtttttaatgaatgaatgtaatgatttgcacgtggtgcggagttttaattattagttctactaaagtttctagttttgtttatatttttgatttcctctcgctatacataggaaatagacatatttgatgtaaatactaattttcctagcagttgtcttgggagtatagtattatagtacatagttaggaccacgtttatgcttactgacctgtaagcatcgaacaaccatatgattataatttatgcattttatggtggtgattttcgac

SEQ ID NO: 3437 - DNA, 2002 bp, Glycine max
  misc_feature (1800)..(1800): n is a, c, g, or t
  misc_feature (1803)..(1803): n is a, c, g, or t
tcagctacgtaggccccccccccaaaacaaaatacaataaatttggtaaagggcaatggcactttaaagggaagaaagcaccacctgaaaccagaagtggaaagtgctcctaacattagattagaccctctaccatgctcctctgcctctgaagtctgaacctcccacaggaatggcaatggagaagacaacattgtttgtgttgttgctgaatgtgcttgtgttcagtgcctctcttgtgtcctcagagcaaagtcatgtctcagctgtaggggacccaggaatgcagagagatggtctgagggtggcctttgaggcttggaacttctgcaatgaagttggtcaagaagctcctcacatgggtagtccaagagctgctgattgttttgatctttcaggttctctgactcacaaggtcacagaagctgataacagacttggggtgggggactcatttcctggtttaaaaccagaaaatatcaacaacacagacctttatgcaattgaaaaggaattgtatttgggttctttatgtgaagttgcagacaccccaaggccttggcagttttggatggtaatgctgaaaaatggtaactatgacaccaggtcggggttatgtcctcaggacgggaaaaaggtacccccttttagcccgggaaggtttccttgttttggacaagggtgcatgaatcaacccatcttgtgtcatcaatggacacagctcaaagatggcacaatgcaaggggggttcagtggtacttatgatttggattctggttgtggaggtgaacacgatggtgtgtcttactatgaggtagtttgggagaagaaagttaatgttgggagttgggtgttcaaacacaaactaaggacttcaaagaagtacccttggttgatgttgtaccttagagctgatgcaaccaaaggattctctggaggttaccattatgacactaggggaatgctaaaaactcttccaaagtcaccaaatttcaaggtgaggttgagcttggatatcaagaaggggggaggggccaagagccagttctatctgttagacattggaagctgctggaagaacaatggtgctccttgtgatggagatgtactcactgatgtcactagatatagtgagatgatcataaaccctgaaaccccagcttggtgcagccccaaaggcttggttaactgtccaccatttcacatcactccagacaacaaaaaaatatacagaaatgacacagccaatttcccctactcagcatatcactactactgtgctcctgggaatgctcaacacttggagcaaccagtgagcacttgtgatccttacagcaatcctcatgctcaagagatagttcagttgcttcctcaccctacttggggtgagtatggctatcccaccaaaaaaggtgatggttgggtgggggatgcaaggacttgggagcttgatgttggagggctatcaagtagactctacttttatcaggacccaggcactcctcctgccaagagaatatggacatctattgattctggtactgagatatttgttagtgacaaagatgaagtagcagagtggactcttagtgactttgacgtcattctaacacaatcagggaccaacttgatgaacaaggctgagagaaagaagtaaggaatattgacgatggactaaacttttgggatttttgatagtccacgaagtataggcttctaaatcctaggggtggtagaggttaccgcacatttacacgaaaataatcttcattggtcaaaccctgatcataggatcttgangtngtgcatgtttggactgtaattttcacattccaaatctttgtttggagattgtgaatgttacacccacaaaaataacgtcaaaatcatggagtaaatatggaaaagagttattttattttcagttgggtcaaataattgtttgtaaactataatttgaacatatccgtaaagtaaaatgatttcaataactttctctaaa

SEQ ID NO: 3438 - DNA, 1161 bp, Glycine max
tcagctacgtaggccccccccccaaatggttatggtgaaatactttgcgttggttggactctttgtcctaattttactgataacatgataatttttgtcattttagggaaatcgcttgcacaaggtgttactaaaccattggcagaagtatacgtttaatccaaggtaataggccagggtcctgcattccttactttatctatcttgttaccgtacatattactgtaatacatactgctttgacttggaaaaaatgttcataagctaatcacagattgatcttcctcaatggtctttcttttaccctatgttttgtaatggttgaactcttttagccacatctatttgtgtatttttagcttttatggcaagtgtttttatctccaacttttttcaatttttatgctgacagtattttatgaactttatatatattacttactagttctataatatccgccattgttgtgtgcccatgaatcactttgcagtggagggttgcgactgaagcgtgacattactgaatatggagaatttctgcgtagtttcaatgctccgtctgttgatgaaaagtttgaattattgggcataatggccaatgtatttattgttgctcctgagagcctttcaactttgtttgagggcacacccagcatacggaaagatgcacaaagatttattcaacttcgggatgactacaaggctgccaaacttgcgtccaaactaagttccttgtggtcttaacaaaagcgggcttgtgatctaaaatcttcggggatgactacattcacctgtttattggctatgggcgctgacgcttgaactgaattcatttggtggtgttagaagagtgattaacaatttgttctatacaaaattatagaaggttattcaatggccgttttagtagaattgagtgttctttcttgctgaatatttggaggcatagataggatgggagaccatgtagatttgtattttgttttattgtgcatagttttcctttgtgaatgtagttgtatttttatgtttgcggagctgttgatttttggtgctaagtggatcatgcttagaccgagtaaatatagccaatacttggattcgtggtgtaaattagtttcactctgtcgtctatggaatgcagtgtttcattatcatggt

SEQ ID NO: 3439 - DNA, 1905 bp, Glycine max
  misc_feature (1759)..(1759): n is a, c, g, or t
ggtctgttgctgaagaagatataggaagacatggaatacctgtcccatcagctatgggaaatgcaactgctagcagaggattagaagtagcagttgctaatttacaggactactgcaatgaactggagaatagattgctttctcggtttgatgcagcatcacagaaaagagaattgaccacaatggcagaatgtgccattattttgtctcagtttaacaggggtacaagtgccatgcaacattatgtggcaacacgtccaatgtttattgatgtggaaataatgaatgcagacactaagctggttcttggtgaccaggctgcccaagctagtcctagtaatgttgctcgtgggctttccgcctcgtacgccccccccccagatactgttcgtaaagaggctgcaacaatcacggctgtattcccttcaccaagtgaagttatgtcaattttagttcagagagttttagagcagcgaatcactgcccttttggacaaactgttagagaaaccatctcttgtcaatttaccttccatggaggaaggtgggctcctattatatcttcgaatgctggcagtggcgtatgaaaagacccaagaactagcaagagatctacaagctgtaggatgtggtgacttggatgttgagggtctaacagagtccctattttcaagtcacaaggatgaataccctgaatatgagcaggcatctcttaggcaattatataaagtgaagatggaagaactgcgagctgaaagccagcagatttctgatgcatctgggtcaattggacgctcaaaaggagcttcagtagtttcttctcaacagcaaatatctgttactgttgtaacagagtttgtgcgttggaatgaagaagcaatctcaagatgcaatctctttgcttcccagcctgctacacttgcaacccatgttaaagcagtgtttacttgcctgctagaccaagttagtcaatatatagctgatgggcttgaacgggcaagagacagcctgactgaagcagctaatttgagggaaagatttgtgttgggtacaagtgttacccgtagagtggctgctgcagctgcatctgctgcagaggcggcggcagctgctggtgaaagtagtttcagatctttcatgattgctgtgcaacgttctggaagcagtgtagctattattcaacaatactttgctaattctatatctcggcttttgctccccgttgatggtgcacatgctgctgcttgtgaggaaatggctacagcaatgtcaagtgcagaggctgctgcttataaaggactacaacagtgcattgaaactgtcatggctgaggtggagcggttgctttcagctgaacaaaaggctacagattatcgatcacctgatgatggaatggctcctgaccaccgggcaaccagtgcctgcacaagagttgttgcttatctttctcgtgtgctggagtctgcatttactgctttagaaggccttaacaaacaagcattcctgactgagttgggaaatcgcttgcacaaggtgctactaaaccattggcagaagtatacgtttaatccaagtggggggttgcgactgaagcgtgacattactgaatatggagaatttctgcgtagtttcaatgctccgtctgttgatgaaaagtttgaattgttgggcataatggccaatgtatttatagttgctcctgagagcctttcaactttgtttgagggcacacccagcatacggaaagatgcgcaaagatntattcaacttcgggatgactacaaggctgccaaaactgcgtccaaaactaagtccttgtggtcttaaacaaaagcggcttgtgatctaaaatctttcgggatgactacattcaccctgttattgggctatggcgctgatgcttgaa

SEQ ID NO: 3440 - DNA, 2649 bp, Glycine max
  misc_feature (1341)..(1345): n is a, c, g, or t
  misc_feature (1490)..(1512): n is a, c, g, or t
  misc_feature (1836)..(1840): n is a, c, g, or t
caggaagaaaggtccttgtttggccacttgagtcgtcgcagtcgtcttccactggcaattaacaaattttctctgaactttcctctctctctttcccgtgctttctttcctagcaactactccaggataacctatgaccatgataaataataagtcttcacactttcactgacaattagagttgtagtttttcaccataagccatgaggctccttagcatcatcaccacctccttaacactattcttccttcttctctttctctccatacagctccaagcgtacaccccagaagacaacttcaccatcagttgtggcaccaccgggatagtcttcgacggccaaaggacatggacgggggacgcagacacaaagtacttatctggtggtcaaggcagcaccgttttaacccaagcagcaacacaagatccttctgtcaatcaagttccctacaccacagcacggttatccccttctcagttcaattactccttccccgtttctgcgggccccaaattcgttcgcctcttcttctacccggctgattacccttcctttccccgcactgatgcctctttctccgttcaatctaacggattcaccttcttaaaaggtttcaacgcctctctaaacgctgacgcggaagccaccaaaaccatcttcagggaatatgtggtcctcgtccccgtccggctcgagctcatcctcagcttcactccctcgcaaccaaactcctacgctttcatcaatggaatcgaggtgctttccatgccaagtgatttgtattacacgtcagcaactgactcaacaggattcaagttcttgggaagtaccacgctgtacagcgtagaaaccagatttgcgctgcaggcggagtatagaatcaaaatgggagggcaagaaatatcaccactaaacgacaccggtttgttcaggaaatgggccggtgacgaagaagattatttaatcaaacaaaatccacagaataatgatcttccaagcaacacggatggtaagatgaacataaccgtgaatcctgattacgtggcacccaaggaactctacagaacagcgcgtaacatgggcacaaacgccactctgaacaaaatcagcaacctgacttgggagttcccggttgattctggcttcacttacgttctcaggctccacttttgcgagcttgaccccaatattaataaagatggtgacagggtgttcttcatttacatagcgagccagttggctgagaaccacgctgatgttatgcaatggagccacaatcagaaaggtctcgcactgcagagaaactatgccgttttaattccgaaggacaatactcagnnnnnggttaatctctcgcttcggatgcatccttatgcaactaatgatgaaacgacatacagcgacgcgttcttgaacggtctcgagatcttcaaaatcagtgaggctgggtcaaacaaccttgccggacctaacccggacccggttcannnnnnnnnnnnnnnnnnnnnnnccccaaagggaaaccgcagcagcaaaagcggaacgacgtcgataatcggcatcgtggcaggtgtggtatccggcgtcgttttgatctcactcatcatccttttcctcatcgtcttcttccgacgcaagacaatcactacgcccaaggactacaacaagtccaagtcctccgcgacctccaagtggggcccactctccttcacaacgaccaagtcaaccaccaccacgaagtcctccctcccctccgaactctgtcgtaacttttccctcgccgagatcgaagccgccaccaacaacttcgacgatgttctcatcattggcgtcnnnnnattcggccacgtgtacaagggctacatcgacggcggtttcaccccagtcgccatcaagcgcctcaaaccggattcacagcagggtgcaaatgaattcacgaatgagatcgagatgctctcacagctacgcccaccttcatctcgtgtccctcattgggtactgcaacgagaactacgaaatgatcctcgtctacgatttcatggcacgtggcaccctccggcaacatctctacaactctgataaccctcctgtgtcgtggaagcagcgcttgcaaatttgcattggtgccgcacgtgggctgcattatctccacacaggcgggaagcacacaatcatccaccgtgacgtgaaaaccaccaacatactgttggatgacaagtgggtggccaagatttccgactttgggctatccagaattggtcccacgagcattgacaaatctcatgtaagcactgttgtgaagggcagttttgggtatttagacccagaatactataaacggtaccgtttgacggagaagtctgacgtttactctttcggtgtagtgctctttgagatattgtgcgctcggccacctctaatccatactgcggagatgcaacaagtgtcacttgctaattgggtcagacattgttaccaaagtgggaccatgacacagattgtggaccccacgttgaagggaaggatcacgcctgagtgcttcaataagttttgcgagattgggatgagttgtttgttagaggatgcgacgcagaggccatcgatgaacgacgttgttgggatgctagagtttgcgttgcagctgcag

SEQ ID NO: 3441 - DNA, 934 bp, Glycine max
  misc_feature (736)..(736): n is a, c, g, or t
  misc_feature (751)..(751): n is a, c, g, or t
  misc_feature (854)..(854): n is a, c, g, or t
  misc_feature (904)..(904): n is a, c, g, or t
ctctacttcacatactgtcacaacccacatgcagtattctctttctaaagcacagccaaacacacactcacacacacaacaaagatcatcatcccatttccaaaccattctttgaaactcaggcttcactactcccttagttcagttgcaatggaagaatggtactacaagaagagccaagtgccagcatttgggagttgggattggaacgataacctacctttcacacagtgcttcgagtcagcgaggcaagctggtttgctacgatgtagtaattactctgagtctgaggaacgtgacctttatgttacaggggatttgtacgagaataatgttgtcacacccgccatgatcgttgttcctcgcagaagggcaaatgtggttgaccagcatgaaaaagaaacgaaattaaagaattggatcagtgatgatgtggatagtgaatcacccagcccaactccactgccaaggccaacttcaaaacccgttgatgaggacttgtacaagatctcaccggggcttgtttatgccaaagctaaaaagaagagagggttgtgcttcttttctagttgcttgttaccaacttgcatcgcttgaaaatcagagaatgtgttgatgccaatgtacatatacctgaaatagaggaatagatacttcaattggatgatgctcaagtaaaagcagcatattttgagtccaagaagactattattatagtcatgacattggaatggtnttcttgccaacttanagggttcttttttgtttcactttttccttttagtctttcatgtactatgggctgagttattgttatgactagaaactgtgtttgaaaaggtgtgtaaagaatnaaaaagaaacggggtagtgaaaaagtttatcagtccatatcagctaattnttttgcaaaaaaataaaaaaaaaaaaaaaa

SEQ ID NO: 3442 - DNA, 689 bp, Glycine max
aaaaccctaaaaaaccctacttccttgaacccagtccctagaaccttccaccctcatccagaaaacacctgcttctggcgtcttaaaaatacgtcacactccttctcaaccctaaaatcagtgttctttgtttttttgcagaaaagattaggagatggcgaagcgcttgattccctgcttcaatcgcattctcatcgagaaaatcgtccctccctccaaaaccagcgccggcattctactcccggagaagacctcccagcttaattccggtaaggtgatagcggttggacctggatcacgtgacaaggcggggaacttgattccggtgtctgtgaaggaaggtgatcacgtgctcttgccggagtacggtggcacgcagatcaagctcgatgacaaagagttccatttgtttagggatgaggacattttgggtattctgcatgattgatgttgtgaatgtgatgcgtcctacaacatgcaaattgtgattgagttggaaaataatttgtcttagtttatgaatgcaacttgttacaaacatttgagggggacttgtttttaagaatttatatcctgtttttgtattctgaatatggcaatgggaaccgtgcttcttactttgctccgcaaaaaaaaaaaaaaaagttgttgttgttttgcaattttctttaatttagtgttacgagttt

SEQ ID NO: 3443 - DNA, 665 bp, Glycine max
agatgaaaatgaaaataatatgttttgctctctctctcctcgtgccgaattcggcacgaggctggcgtttaaccatgaaagacgtaacactcctctcaaaaccctaacatcacagtattcttttttcttcttttttttttctgcagagaagagtagaagaagaaggagatggcgaagcgcttgattccctgcttcaatcgcattctcgttgagaaaatcgtccctccctccaagacaagcgccggcattctcctccctgagaagtcctcccagcttaattccggtaaggtgatagcggttgggcctggatcacgtgaccaggcagggaacttgattccggtgtccgtgaaggaaggtgatcacgtgctcttgccggagtacggtggcacgcagatcaagctcgatgacaaagagttccatttgtttagggatgaggacatcttgggtattctgcatgattgatgttgtgaatgtgatgcctcctaaaacatgcaagttgcgatttacctgaaatttttttttgtcttagtttaagaatgcaacttgttacaaacatttgagagggatttgttttttaggaatttatatcctgttttgtattctaaaaatgacaatgggaatggtgcttcttctagtcttctttgttggtgtgttttttctttcgg

SEQ ID NO: 3444 - DNA, 1309 bp, Glycine max
tcagctacgtaggccccccccccaaaaaaaaaataataaaaaaagaaaaaaaaaggacaaaggaaagtaaataaaatataaagatggcagatgatgaatatagtttctgatgcataaaccacgatggatgaaaggtggtttttccactttataaatacccaattcttcagccactttgcttttattttctgatatatctccttcctgttctgctaagtggcaaagaaagaaagaaagaaaatttcaagggctgaaacatctatctttaactgtattctccctttgtttcctcaccagttgattcaggttgcaaacatggcttttccagacccatccatgtcagtttctccacagaggaagatgggaagggggaagattgagatcaagaggattgagaacactaccaatcgccaagtcacattctgcaagcgcaggaacggcttgctcaagaaagcatatgaattatctgtgctttgtgatgcagaggttgctctcattgttttctctagccgtggacgcctctatgaatatgctaataacagtgtcaaagcaaccatcgagaggtacaaaaaagcaagttcagattcgtctggcgctggatctgcttctgaggctaatgctcagttttaccagcaagaagcagataaacttcgtcaacaaattagtaacctgcagaataacaacaggcaaatgatgggtgattctttgggctctctgactgccaaggatctcaaaaatctggagactaaattagaaaaaggaattagtaggattcgttcaaaaaagaacgagctgctatttgctgaaattgagtacatgcaaaagagggagatagacttgcacaacaacaaccagcttcttcgagcaaagatagctgaaagtgagaggaaccaccataacatggctgtgttgcctggaggctcaaactatgactctatgcagtcttctcagcaacaatttgactctcgtggctacttccaagtcactggattacaacccaataatcagtatgcacggcaagatcagatgtcccttcaattagtatgatgtgtttagtattgagatttgagatgttctgctacttgtagtttgccttctagtatgatagcagatgaatgctaagggtaatgtaagtagaaccatttgtaggggatttaagcatatatcccctcagtactatatatatgtaatggctttgtagactttcttaagactatcctgtatctattgtgaaacgctctgagatgttagtatttgtgtcctaattaatagtatgaagaagaaacctagcttggcatgtttttccccc

SEQ ID NO: 3445 - DNA, 1314 bp, Glycine max
aaaaatccaacataaaaaaaaaagtctataggttattttattacaaattttattttatcttcctgtattacctctctgagcagtccacaacacagtgagtattgttcaggatgaggataagccttttcctgagtttccctccttcatccccttccatggcagcaccttcactctcctccgctctcaactctctctcctccccctccctctctctctccttctccacctcctcccgccgcttctctctcctccctccaccctcacaccaaccctccaaacccctcttcctcaccctcaaatccaaaccctccgacgacattgacacatcgttcttcgacaacatcaacccgcaagacgacatcacattcaatcccccggagcccccggaagggttcgtggcgcctccctcctttgacgacggccctctggagaccgaggacgaaatcgccgctgcctacgaggagctctacggccccggctacagcggtgtctcggtcctcggcaacgacgtgtacgtgatggacgcgaaggtgaagaaagagaccgggttcgggtccggcgccaagaaggagaaggtgagggacgggttcgaggagagggtggtgcaggtcaggagggtcaccaaggtcgtcaagggagggaaacagctcaggttccgcgccgtggtcgtcgtcggcgacaagaagggtcaggtgggagtcggagttggcaaggccaaggaagtcattgccgcggttcagaagtccgccgtcaatgccaggaggaacatcatcaaggtgcccatgactaagtactccactttcccccatagagctgatggagattatggagcggcaaaggtgatgcttagacctgcttctcccggtactggggttattgcaggtgggtctgtgagaattgttctggaaatggcaggagttgataatgctttgggaaagcaactagggagtaataatgcactcaacaatgccagagcgactgttgctgctgtgcagaaaatgaagcagtttcgtgaggttgctgaggagcgtgggattccaatggaagaattgtggaagtaatgaaatttgtgaagggaatgtaatttttagatgtcgatgtttgtgatatacagctggtcatagttctgttaaggaagtgaaaaacattgttcaatttttgttgaaagttttatgaaagtgaacagtttcttcaaaaagctactttgttcaggttgaattcaatatattctttatctatctgtttaatttgtattaaaaaaacaaaaaaaaaaaaaaaactaaatcaatgtcaatgactcaattattcagttgc

SEQ ID NO: 3446 - DNA, 1234 bp, Glycine max
cccacggttgggctttgaaagtcactaagaagatgaccatatctttaaaccccatcgtgagcttcagctcaacgaagttggaaacaaagtatcaggatgcatcaagatattctgttggagcttctttaccaaaggcaactcagtttacacctttgttgatagtgtctagatcgagaaagcttgtcaaggaaagaagatttggtcattgcttttcagtggcagatagtgatcagcttgccgcagacaacagtagcagtaaggattttgacaatgttgaaagttcagcaaccaatgatcagttagcattcatgaatcctccagatgaaaatttccaattgcaaactgaagtaaatgctgagtcaggatctccaacattagaggcttccaatggttcaattaaccaagagcaagggtcagaagcatctcctaagtcacaatctgcaaccaaacgacctaacctgactgcaagagagaggttaaaggcagctcgatccctcaaccgatacgccgaatcaaaagcatctaaacaagacctgagcagcagggtgttggaggcttcaaaacaaagtgacaaagggtcagggaagaaaaaatctggacttccggaggcccctactaatctgtttgatgatagcaaacgagggttatcaacaggcttcactttccaatttcctggaggttctgatctctttttcattatcttctcatttgtttttatcagcacagtgatgtttgcaacaacttacattgtgtggaaagttggtgcaatccatttcaatgagtactgagatgtggtgttaagaatttaccataaaaatagatagtttatttatatttctagacaagcttcggctgcttgaactgatgatgttgatgatcagtttttcacattttaggtgctgagatacttttttttgtcaagttaattattgttataattattattttataagctagaaaaaaaaaaaaaaaaaaactcgagactagttctctctctccctcgtgccgaattcggcacgagggtggaagtaatgaaatttgtgaaggcaatgtaatttttagatgtcaatctttgtgatatagagccggtcatagtcctgttaaggaagtgaaaacattgtttcaatttttgttgaaagttttatgaaagtgaacagtttcttcaaaaagctacttgttcaaactaaatatattctttacctgcccaaaaaaaaaaaaaaaataaaaaaaaaaa

SEQ ID NO: 3447 - DNA, 2164 bp, Glycine max
tcagctacgtaggcccccccccacatgcaacaccatcaggtatgttctttccttgctttcaattttggaaaagcttaaaattttgaaactcttgaaatgaaatttgcccaaaaaaacaaaaaaaaaaactaattggaactggtgctagttcagcttgatttataaccccattcttgggcaaacaaatagggttgtcattttattattattttgaaaatttcaacttgcttaagctgtggatctttgacttcagttggagattttgagttgtttttttaacctcttttcagatgatgttgagtgaatgctactaccctttaaggtacaaaacctctgtctttgtcagagtagatttaaagtttctatttttatttttattcatttttgtttttggattattggtgtggtagactttgtgatcctggggtttgttatcttgttcggttcaaagatttaatggggttaggttatctgagaatttaattgatgggttttattttttgtttgattttgcctgttgcttagtgttattgctttatcagcggttattccttgaataaaagaatatctgtgtttgttcatctcactaatcagatgctgaaggttcgttttggtgttccctgcaggtttttgacttcatagctggcgaatttcttgcactttgcttggtttttgtctcttgactgcttgtgttcttcggttgggatgaaagatgatgaagacttcggtttgattttacaataataggatattggtattcagtgaagttaacatttgagatacagaacaagagaaaagaaaatttggtgtaacttttctgatttgttggcctgggattgtagaggagtttggttgaaatctgatcagggttattgtttactgattttcgatggattcaattcaaaataaagtttattactgctgtgtttctaagggtaacaatgtcctgtatgtgtatggtggtggagaccaagaagttgagaaagttgcagccttgtgcttggagagggctcctcctttccacaggtggtattttgagacaataggtaaaagaacttttgggttttttatggaagatgggtatgtttacttcacaattgttgataaaggtcttggtaacccggttgttctttggtttctggagcatgttcgagatgaatttaaaaagctagctagaaaaggttcaagaggaattttgccaaacatgaattcaatttacattcaggaaaaactggttcctgtcattcgtggtctgatcacttcattggagagtgtttcacatggtggtagtaattggagagatgaaacttccttgtcttttcaagtggatctgtctccatcaccaagtaatttgaatggacaaattgaaggtgctagttcaacaaaagccccattattgggaaaatctaacaagccagataagaagaaagtaaaagatcatgtcattgctatgagagatgttgagttggaggagcatcagaaatctacagatagaggagcaagggttgattcatgcaatctggatggtgtaagccaaggtggtgctggtgcatcagtctctttgcaaaaggatatgggttcaatgaggatgagatcagcccctcaaaacattcgtaagaaatggtggcgccaagtacgcattgttctagctattgatgcagctgtgtgtatattactatttatcatctggttagtaatatgtcatggtatatcctgcattcgatagaattcaaacttcttgtgtgactctgaaattgaatcactatcatatttggaacttgagattttccatgcatgatctgatcagcaacagaaattggtttctttgatggggcatgtaaatggaagttacatactggtcatgttgattagatctttagtgctatttgcaggcacgtgcttcttgtcacccatatataggcattttactttataaagtctactgtacagtttcattacttttagacatctgtacttgtatatgaattttgggaagattttaaaggttcttgattggcctgtttctatagatttttttctaaatagataattattttctaatatagccgaacagatgaccaatattctcaaatctcagagttgtatatgcagaataattatgcccccgaaattctttaggtatgttttgaccaccttttataaa

SEQ ID NO: 3448 - DNA, 1873 bp, Glycine max
ttgagttgaatattcccggggtcggcccacgcgtcaggtttggatctctatctcattgttgatttagtattaaatttctatgtagttgttgtttgtagtaatcatcaactcactcagttgccgtaggttgtcgtgatccatcacaacactttgtcactgaaattcagaaaaatggcatcagcaatgtttcgtaggaacatcatcacccactactccaagtttgcttcttctttgtcttcgttgcctcgccattcctcaatctacaaccctctctctatgtctgtttcttcatttcatagcgaaagtgttggtggtggtggtgggttgccatcttccatgcgtggagctgtgtattgggaaccgaacaagccgctaaccatcgaggaatttcacatgcctcgccccaaggccggtgaagttctcatcaaaacaaaggcctgtggagtatgccactctgatctacatgttatgaaaggtgaaattccgtttaccagtccttgtgttgtggggcatgagattaccggtgaggttgttgaacatggagcactcactgacagcaaaaccatagaaaggcttccagttggatctcgagttgttggggccttcatcatgccttgtggcaactgctcctactgttcaaagggccatgatgatctatgtgaagctttctttgcctataaccgggcaaaaggaaccctctatgatggtgaaactcgactcttttttcgaaacagtggaaaaccagcatacatgtatagtatgggagggcttgctgaatactgtgttgtgccagcaaatggagtgtctgtgttaccagactcattgccatatacagagtctgcaattctaggatgtgctgtttttactgcttacggcgctatggctcatgcagctcaagtgcgtcctggtgattctgttgctgttattggaactggaggtgttggttctagttgtttacagatagctagagcctttggtgcctcagatataattgctgtggatgtacgggatgaaaagctacagaaagcaaagacatttggtgctactcacactgtaaattcagcaaaggaagatcccattgaaaagatacttgaaattactggtggaaagggtgttgatgttgctgtggaagccttggggaaaccacagacatttgctcaatgtacacaaagtgtgaaggatgggggaaaagctgtgatgattggactggcacaagctggttctttaggagaggtggatataaatcggcttgttcgcagaaagatacaagttattggctcctatgggggcagggcaaggcaagatcttccaaagttaattagactggcagaaacaggtatcttcaatcttggccatgctgtttcaagaacatacacttttgaggaggcgggaaaagcattccaagatctcaatgaaggaaaaattgtcggtcgagctgtgattgagataatatagctctatattcccagaaatgcttttctgcagcagcaatagctatgcttttcacaccccacaagatatacatgctttggagttgcaaggtgttggtaccctgagaacataaataaatagatgtcttctgatgtttcattgcaggggcatgttcaaatgaaaactgtttttctttttgtgcatttctttgcttctaactcatgtaatcaggtaggtacaccaaggtgaagaataatagtctctgaatgctcatcattggcgtgtcgtaaaactgatgatgaaaatgcaggaaaataacagaaaagctagagatgctccaagaaagtaaattaaaaaaaaatgtttccgacataaacttatgagcagattaggggtgaatgcggcttttactttttaacttaacgtacttgagcacccaaaa

SEQ ID NO: 3449 - DNA, 1719 bp, Glycine max
tcagctacgtaggcccccccccccccggacacgtcaagttgggatctctatctcatctcatagttgatttagtatttaattcctatgtagttgttttgtactttgttgtaatcatcaactcactcagttcccgtaggttgtcgtgattcatcacagcatattgtctctgaaattcagaaatgacatctgcaatgccaaggtgttggtggtgatgcattgccatcttacatgcgtggagctgtgtattgggaacccaacaagcctctcaccatcgaggaatttaacatgcctcgccccaaggccggtgaagttctcatcaaaaccaaagcctgtggagtatgccactctgatctacatgttatgaaaggtgaaattccgttttccagtccttgtgttgtggggcatgagattaccggtgaggttgttgaacatggagcactcactgacagcaaaaccatagaaaggcttccagttggatctcgagttgttggggccttcatcatgccttgtggcaactgctcctactgttcaaagggccatgatgatctatgtgaagctttctttgcctataaccgggcaaaaggaaccctctatgatggtgaaactcgacttttttttcgaaacagtggaaaaccagcattcatgtatagtatgggaagggcttgctgaatactgcgttgtgccagcaaatggagtgtctgtattaccagactcattgccatatacagagtctgcaattctaggatgtgctgtttttactgcttacggcgctatggctcatgcagctcaagtgcgtcctggtgattctgttgctgttattggaactggaggtgttggttctagttgtttacagatagctagagcctttggtgcctcagatataattgctgtggatgtacgggatgaaaagctacagaaagcaaagacatttggtgctactcacactgtaaattcagcaaaggaagatcccattgaaaagatacttgaaattactggtggaaagggtgttgatgttgctgtggaagccttggggaaaccacagacatttgctcagtgcacacaaagtgtgaaggatggggggaaagctgtgatgattggactggcacaagctggttctttaggagaggtggatataaatcggcttgttcgccgaaagatacaagttattggctcatatggaggcagagcgaggcaagatcttcctaagttaattagactggcagaaacaggaatcttcaatcttggccatgctgtttctagaacatacacctttgacgaggcaggaaaagcattccaagatctcaatgaaggaaaaattgtcggtcgagctgtgatcgagataatatagctctatattcccagcaatgcttttctgcagcagcaatagctctgcttctcacaccctacaagatatacatgctttggagttgcaaggtgttggtgccctgagaacacaaatagatagatgtcctctgatgtgtcattgcagggacatgttcaaatgaaaactgtttttctttttgtgcattgctttgcttctaagttctaactcatgtaatcaaataggtacaccaaggtgaagaataatagtctctgaatgctcatcattggcatgccataaaactgatgatgaaaaagcaggaaaataacagaaaagctagacatgctccaagaaagtaaatttaaaaaaaatgtttccaaaatgaatttttgtaaaaa

SEQ ID NO: 3450 - DNA, 2025 bp, Glycine max
gttcctctcacaccatcatctccactaccaacccacaatgtcataacattctaactattaatttaatacaataaaatccaaaaaaatcagctagtaggccccccccccgaaataaataaccgttatttttttggttctgtgtagcttttggagctggatccttgaattcttcacttgacaagtttttgtttctgggtttgcttgatcttcccaaagggtccagctcctgcgttctgctaaggattgctcacaccaaaaatcattgctttttagttgattctgtttcccttttgtttggttgattgagatgtggagagatccgggagtttcagctgattctttctatgaaatccgccccgaatgcaccgatgttcccgttactcgatttaagatcaaggctggcaaaacactaagtgcaagaaaatggcatgctgcatttactccagaagggtatctagatataggcaagactctaagccgaatctaccgcgggggagtccatccatcaattaagggagaagtttgggaatttctacttggttgctatgatcccaagagtacatttgaggaaagatatcagataagacaacgccgaagaatgcaatatgctacatggaaagaagaatgccgccaattgtttcctcttgttggaagtggtagatttgtcacagcacctgtcattactgaagatggtcagcctattcaagatccattggttttgaaagaaacaagtccggccaagggattggctgtacatccacaacataataatagtccttcaagtatggatgctgcaaataatttagaaaaggtgacagacaaggcagtagtccagtggatgttaactctgcatcaaataggtcttgatgtggctcgcactgataggacattagttttttatgagaagcaagaaaacttgtcgaaactatgggatattcttgctgtttatgcttggatagataaggacgttggctatggtcaaggaatgtgtgacatatgctccccaatgataattcttcttgatgacgaagcagatgcattttggtgctttgagcgtttgatgcgcagacttcgaggcaactttagatgcaccgagagctctgttggtgtggcggctcaactaagtaatctggcttcagtcactcaagtaattgatccaaaacttcataaacatttagaacatcttggtggaggtgactatctgtttgcttttcgaatgctaatggttttgtttcgtcgagaattctccttttgtgactcattgtacctttgggagatgatgtgggctctagaatatgatcctgaattgttcttgatgtatgaaatgcctctatcagcttctgaaaaagctgagggctcaaaagggaaaacaaagtcaatacgtcaatgtggaaagtatgagagagaaattgtgaagagtggagcaaaaaatgcagaagcacctcttcctatgtctattttccttgttgctagtgtattgaaagataaaagtgcaaaactactccaagaagcacggggcttggatgatgttgtcaagattttgaatgacacaactggtaatatagatgcaaaaaaagcttgcagtggggctatgaaacttcacaagaaatatttgaaaaaggccaagaaaccctagcaccaaatacatcgaaatacccaatgattcttttgtaatgtgttgtatggtagatgtgttgctccctgggagacaataatggagaacataggactttaaagaattgaaaaaaggaattcaaatatccaaccatcaaaatccctgagcaattgttgtatgtgaaatcatttttttccccttttgtatccataaaagaagtaagattgtatattatgaaatatgaaaatagaattgttgtgtatacccatctatttgtacttcgttattgcatagaggaaacaagatacaggaaacaaccattcaatttcgagccaataaaattaattttgttttgatattaaaaaaaaaaaaaaaaaaaaaaaaaaaaaaaaaaaaaaaaaaaaaaaaaa

SEQ ID NO: 3451 - DNA, 2028 bp, Glycine max
tacggctgcgagaagacgacagaagggggacacacatgggcaaaaaagaagtgtccaggttcatcctcctgaaccagtctctgtcgaagaaggaaggccctttatatataaaaacctaaactcgtattgttctgagcaacccaggttgtctgttacggattagcatcaaagcaagttaacaaaatttgggtgcgtcctggattgacccttttgccccctctccctcaccctccactaactcctcctttttggtttttataaagcacattcccaatagaggagggtccctacacaacacaacccttcaatgacgtccatggccactttcttcgcccaaacctccttcccctcccactctctctccaaaaccttcgatacccatttcgcccctgccccgaaagtcaacgtctttgtgaacttcagggcgaggaggcacgttggggtgcgagtttcgaacgcgctgatcgaaccagatggagggaagctcgtggagcttgtggtgacggattttgagagggatttgaagaagggtgaggctctttcgttgccgaggatcaagctctcaaggattgaccttgagtgggtccatgtcctcagcgaaggatgggccacacccctgaaaggcttcatgagagaagccgagttcctccaaacgcttcatttcaactcgctccgactcgatgatgggtcggtcgtgaacatgtcagtgcccatcgtgctggctattgatgatgcgcagaagcatcggatcggggataacaaaaaggttgctctttttgattccaagggagaccccgttgcaattctcaataatattgagatttataagcatcctaaagaagaaagaatagcccgaacttggggaaccattgcccctggcctaccttatgttgaacaaactataaccaatgctggaaattggttgattgggggtgacctagaggtcattgaaccaattcagtacaatgatggacttgatcattttcgtctatctccgacacaactccgtgcagagttcacaaggcgcaatgcggatgctgtgtttgccttccagctccggaatcctgttcacaatggccatgctttgctaatgactgacacccgaaagcgccttcttgagatgggctataagaatcctgtcctcttgcttcatccacttggaggctacaccaaagctgatgatgtcccacttgattggcgaatgaagcaacatgagaaggtacttgaggatggtgttcttgatccagagacaactgtggtatccatattcccatctcccatgcactatgctggacccacggaggtgcagtggcatgcaaaggctaggatcaatgcaggggctaacttctatatcgttggtcgtgaccccgcaggcatgagccatccagttgagaaaagagatctgtatgatgctgaccatggaaagaaagtattgagcatggcaccgggactagagcgtctaaacattcttcctttcagggttgctgcatatgacaagactcagggtaaaatggcattctttgacccttcaaggcctcaggacttcctgttcatatcaggcacaaagatgcgcacactggcaaggaacaaagaaagtcctcctgatggatttatgtgccctggtggatggaaggtgctggttgattactatgatagcttagtactctcaagcaacggcaaagtgcaggaagctgttccagcttaatcttgtatcatatcataatgtatatatctcatgattgggagaaaccttaagcttatgtattctcctgctaagacatacttcacgaggatcctctggcccaatctaataataataataaattaaaactttggggaggcacaagcacggacacattgcctctctctgtatgtatggcatttagacagcctcttgcacttatggtgcaattgtgcatgccaactctctgtaatataatgtggttgtgctaaggatttggtttgatcaataacaatctttaaaaaaaatggggctagttctcctcgtaaaaaaaaaaaaaaaaaaaa

SEQ ID NO: 3452 - DNA, 1326 bp, Glycine max
ttctcacagttttcagcatttgcatggtcccaacagctcaaatattgtgtctatctgtctgtcaggttgatgttgagtcacctctatttattccttcccaatttcctcctccatttccacaaacaacttctttcaaggaaaatggctcttcttggatttcttctgggacttttcttaatggtcactcatgtcaaggggtatggttttggaggttggaccaatgcacatgccaccttctatggaggtggtgatgcttctgggacaatgggtggggcttgtggttatggaaatctgtatagccaaggttatggaactgatacaacagcactgagcactgctctgttcaacaatggcttgagctgtggtgcatgctatcaaattaaatgtgtgaatgatccacagtggtgccttcctggctccatcatagtcactgccacaaatttctgtccacctggtggttggtgtgaccctcccaatcaccactttgatctttctcaacctgttttccagcacattgctcaatatagggctgggattgtgcctgtagtttacagaagggtgaggtgcaggagaaaaggtggaatcaggttcaccatcaatggccactcttacttcaatttagtccttgtaaccaatgttggaggggctggtgatgtgcatgctgtgtccatcaaaggttcaagaactagatggcaagccatgtcaaggaactgggggcaaaactggcaaagcaactcctacttgaatggtcagagtctttcctttgtagtcaccaccagcaatggacacagtgtggtgtcatacaatgttgccccagctggttggtcctttgggcagacctacactgggaggcagttcaactactaactaacccttaattatcttttcaataatgttttagtaatattatatcatctcaagattacaaatcaaagaaccaagctatatatagttgagtattgtagatggattagtgttgtgggctagatagaagatgatttagcccccttttaattatatataaatatatttaatttgatttatatgtagcaagcatttgcatatgatgtgctggcttaatttatgctatgcctcagcaaatgggatacttgctctgtacgttgagaaagataaattgtagaaaagattgttgaaccgttgaatgtaagctcttgtactttagttattgatgaatgaatgagtgagaaaggtgatgcttcaattgagtaaaaaaaaaaaaaaaaaaaaaaaaaaaaaaaaaaaaaaaaaaaaaaaaaaaaaaaaaaaaaaaaaaaaaaaaaaaaaaaaaaaaaaaaaaaaaaaaaa

SEQ ID NO: 3453 - DNA, 1424 bp, Glycine max
tgatgggagagaagctgagcgtgaaatgcaaaaaagaagagaagaaagtgacaaaatcccagtaaagcgtgacagtgccagctccctacctcaaccccaaagtcttgtgcttttcacatccccattttccccattcccctttctgcttcctctttctttcgccaaatgggtcatcatctccttctcccataacacaatcttcttcaccttttctttcttcttcgcttcccttcggtggggtttcaagtttcaccataggaataggatgttttctaggttgattcatccccatgaaggccaggaagacatgcagggtggttccaaccacgctcacctcggagacccttgtcttgttctcacctctgatcccaaacctcgtcttcgttggaccgctgaccttcacgaacgctttgttgatgctgtcactcaacttgggggtgccagtaaagccactccaaaagcgataatgaggaccatgaatgtcaagggtttgacgctctatcatttgaagagtcatcttcagaagtacaggcttggtaagcaatcaggaaaagattctgatgagggactcaaagatggaatgtcagcttcatatcttcaagaaagccctggtactgataactcttctccaaagttaccagcttctgatgctaacgagggtcatgaagtcaaggaggcattaagagctcagatggaagtgcaaagtaaactacacttactagtggaggcagagaaacacttgcagattcgccaggatgcagagcggagatacatgggcatgcttgagcgagcgtgtaagatgttggcagatcaatttattggggatgtaattatcgacagggatggccaaaaatttcaaggactggaaaacaaaacatcaagaagtcccctagttgatcatggaggcttttttcccgcagcgtgtactgaggtgggtggaatgcatgtttcagaagtaccacccattctccagcctcaaggggctgagtgctccagtgaaagttgcctaaaatcacttgagagtctgggagggttgacactagaaggatctcccggcggatcaaagaagaggatgctgaacttggactcaatggtagcacctttgatctggagcgaagccaacaccagaactcaaggaatccatttagcccaagttaatcctccaggaatgactaggtatggcatgtaggtaggatagggaaggctagttcctcatgaagagagttgaggacattgtgctttgttccaagcttttaggatgaagtaccgagttagattcttatctgttcttgcccatcaagttggtgggaatcaacttgtctcacatctttgtgtaaattgaaaatactatgtggcttaacttggactatcactactaaaggttggcgctgaccattgacaaaaaaaaaaaaaaaaaaaaaccg

SEQ ID NO: 3454 - DNA, 2790 bp, Glycine max
  misc_feature (2704)..(2704): n is a, c, g, or t
  misc_feature (2709)..(2709): n is a, c, g, or t
  misc_feature (2714)..(2714): n is a, c, g, or t
  misc_feature (2720)..(2720): n is a, c, g, or t
  misc_feature (2726)..(2726): n is a, c, g, or t
  misc_feature (2729)..(2729): n is a, c, g, or t
  misc_feature (2731)..(2731): n is a, c, g, or t
  misc_feature (2733)..(2733): n is a, c, g, or t
  misc_feature (2740)..(2740): n is a, c, g, or t
  misc_feature (2742)..(2742): n is a, c, g, or t
  misc_feature (2747)..(2747): n is a, c, g, or t
  misc_feature (2752)..(2752): n is a, c, g, or t
  misc_feature (2756)..(2757): n is a, c, g, or t
  misc_feature (2761)..(2761): n is a, c, g, or t
  misc_feature (2763)..(2763): n is a, c, g, or t
  misc_feature (2767)..(2768): n is a, c, g, or t
  misc_feature (2770)..(2770): n is a, c, g, or t
  misc_feature (2772)..(2772): n is a, c, g, or t
  misc_feature (2776)..(2777): n is a, c, g, or t
  misc_feature (2780)..(2780): n is a, c, g, or t
  misc_feature (2782)..(2782): n is a, c, g, or t
cgcgtccgcccactcttccgttagtctcgagcttccctcacacattctctgtgactgcctctgttccgccgaacccagcattttcccaccgttcgggccaccggcggagttagttttccggcaaggatgggtgctgctctgctgtctgagcttgcgacggagatagttgtgccggcctgcgccgtcatcgggatcgtgttctcgttggtgcagtggttcctcgtgtcgcgcgtcaagctcactcccgaccgaaacggaacgacgtcgtcgccgcgcaacaacaagaacggctacggcgacttcctcattgaggaggaagaaggcatcaacgaccacagcgtcgttgtgaaatgcgctgagatacagaacgctatctccgaaggtgcaacatcctttcttttcactgaatatcaatatgtggggatcttcatggttgcttttgcaatactgatcttccttttcctgggctctgtggaaggcttcagtactaagagccagccctgcacatatgataagagcaagctatgcaagccagcccttgcgactgcattgtttagcactgtatctttcttgcttggtgctataacttcagtcctatctggtttccttgggatgaaaattgcaacctatgccaatgcaaggacaaccttggaagccagaaagggagttggaaaggctttcattactgcatttaggtctggtgcagtgatgggtttccttcttgcagcaaatggtcttttggtgctctacattaccatcaatctcttcaagctatattatggtgatgattgggaaggtctttttgaggctataactggttatggtttgggtggatcttccatggctctgtttggcagagttggtggtggtatctacaccaaggctgctgatgttggggctgatctggttggaaaagttgagagaaatatcccagaggatgatccaagaaacccagctgtgattgctgacaatgttggtgataatgttggagatattgctgggatgggttctgatctttttggctcatatgccgaatcgtcttgtgctgccttagttgttgcttccatttcctcatttggaatcaaccacgagttcactgcaatgttatatcccctactcatcagttctatgggcattattgtctgtttgattactactctctttgcaactgatttctttgagatcaaggctgtcaaggaaattgaaccagctctaaaaaagcagcttatcatctctacagtactcatgactgttggaattgcaattattagttggattgctctgccaacatccttcacaattttcaactttggtgctcagaaggaagtaaagagctggcagctgttcctctgtgtgggtgttggtctatgggctggacttattattgggtttgttactgagtactatacaagcaatgcttacagtcctgtacaagatgttgctgattcctgccggactggagctgcaaccaatgtcatctttggccttgctctgggatacaagtctgtcattattcctatttttgccatcgcaatcagcatttttgtgagttttacttttgctgcaatgtatggcattgctgtggctgcccttgggatgctgagcaccattgcgacagggttggctattgatgcctatgggccaatcagtgacaatgcaggaggtattgctgagatggcaggcatgagccatcgtattcgtgagagaactgatgcccttgatgctgctggcaacactactgctgccataggcaagggatttgctattgggtctgctgctttggtgtctttggccctatttggtgcatttgtgagcagagctggaattttgactgttgatgtcttgactcccaaggtctttattggactcatagttggtgccatgcttccttactggttttctgccatgaccatgaagagtgttggaagtgcagctttgaagatggttgaggaggttcgtaggcagttcaacaccattccaggactgatggagggtcatgccaagcctgattatgccacctgcgtcaaaatttctactgatgcatccatcaaggagatgattcctccgggtgcccttgtcatgctcacaccactcattgttggaatcttcttcggggtggaaacactttcaggtgttcttgccggggctctagtttctggtgtacagattgcaatatcagcatccaacactggcggtgcttgggataatgctaagaagtacatagaggctggtgcgtctgagcatgcaaggaccctgggcccgaagggatctgaaccacataaggcagctgttattggagataccattggagaccctcttaaagatacttcaggtccttcactcaacatcctcatcaagctcatggccgttgagtcgctcgtcttcgcaccatttttcgccactcacggtggcctgcttttcaagatcttttgatttgagggtagagttttctatcaatttatcctatttttctcggagcctgcagcaggcatttttctttgtaccaatataccctctccacctttaggggtagctcttctaattatcaggacttgctcttcaaattatcaggacttgaaatttgttactaaatgtagtagcttttcgatttttcacccagttttatatgataattcgtaatttaattatgaatcaattattacatattataccactttgtccttgacgcggtattcactgggancaggnaactntctggnaatgtnccntnantccccananaccgnaaaanaaanngggngnaagnnananaaanntgncnccctctcg

SEQ ID NO: 3455 - DNA, 1547 bp, Glycine max
cggacgcgtgggcggtcgcgtgctgtgattgtccgtaagagagagagagagagagagagatggtgatgcattcacgggtcagaagcgtcgccggaaacatcaaatgcgcagcgagactcttctgttcatcttcgacgaccacgccgccggctgcgccgttgcagttcccgcagactctggcggggctccgggcgcggctggcggaggagtcgccgtcgctgtcggacttcctcgcgttaaaatcggagagcgcgtactcggtggaggtcgggactaagaagaagccgcttccgaagccgaagtggatgaaggaggccgttcccggcggcgagaagtacgtgcagatcaagaagaagctccgtgaattgaagcttcacacggtttgcgaggaggctcggtgccctaatttgggggagtgctggtccggaggcgagaccggcactgccaccgccactatcatgattctcggcgacacttgtactcgaggttgcagattttgtaatgttaagacgtcaaggactcctccaccacctgaccctgatgagcccaccaatgtggctgaagcaattgcatcttggggtctggattatgtggttataacgagtgttgaccgtgatgatttgcctgatcaagggagtggtcattttaccgaaacagtgcagaagctgaaggcactgaagcctaatatgctgatagaagccttagttccagattttcgaggagatgctgactgtgtagagaaggttgccaaatcaggattagatgtctttgcacacaacattgagacagttgaagagcttcagagtgttgtacgggatcatcgtgctaattttaagcagtcattagatgttctaatgatggccaaggaatatgcgcctgctggaacacttactaagacttcaataatgttaggttgtggggaaacacctgatcaggttgtgaagacaatggagaaggtgagagcagctggtgttgacgtgatgacatttggtcagtatatgagaccttcaaagcgccatatgccggtatctgaatatgttacaccagaggcctttgataagtatcagaaacttggcatggaaatgggctttcgatatgtggcatctgggcccatggtgaggtcatcatacaaggcaggtgaattctatattaaatccatgattgaatcagatcgggctgcttctccctcaaagctgacctcttcttgatccaccatcttttttgttattcacacacttcattgtgcattatatgtaaggagtgcagacttactacattgctgttgatgctcatgccacgtgtaatatcagtaaaaagctataaacgggcatatgctgctgtctgcaatttttttcactgcctcctccccaacctatgagtgaataggttgatttatttagaaaatgcaaatttcaaaggttgattgtatatgttctcatttacatgaactcatttttctctattaaactggtgctaacttactccagttactgtagttattaaaagttaataagtgtttacctcttatttgagaaaaaaaaaaaaaa

SEQ ID NO: 3456 - DNA, 1391 bp, Glycine max
gcccccccctcgagtcagctacgtaggccccccccccgacctgacaactaagaagagaagagactcaactcaacaatggcttcttctattcagtgttcagtttgggttccttcccttcccaacactaacaccattcgctttctttctgttaacccaaactctgttactgtctcttcttcttcccttaccagaatcagagcctcctcttcctccccaaccgtcgaagaagccgctatgaacatcgacaacctccgacgtttcatcaaccttaactccggaaagtggaacggctctttctatcaatttgattcatgtgggaatatgttgcaacaactgagtaccaagctttctgctagctcttatggggaagatgaactcatgagtctcattcaaacgctgtatattaaacaaccttcatcaagtacttcaatttctggagatgacaatgatgcagaatgggcagagtacaaaattaaggaaaccaatatgtttactgttgacaaatatcaacaatttgcagataggctttttcccatctgagaaagcatttgcactgaggtatcaaacagctggcatgttggaaacagtattaaggcaaggtgttcttggagaagatgacactggtgaagaatcaccaagaaatctcaagcttccctctcggcgaccttctgttgtatgtgagaattgcctgtactctctagagagagatatgcgagcaagagcctttcacattttggagccaaaaggcactgtagatatgcttatcctcttcctagaggaaagaagtgatggggctcctcctctacttgatagttatagggatgcgaagagtaggattataccttttcttggtaaatggaaaggtcattccatcacaaaacgaagtggtgtgtatggatctacaattgctaatgctgatactgttgtgttgcacgatatggatgacaatggccaacttatgcaggatgttacttcaagttcaacttttgatggggaaaatgttactaccaatgtgcattggactggcacagtatcagactatttggttacatttgatggaggttatcagatgatactattacccggtggcatgtacatggggtgcccttgtgatgtagcaaaaagtgtggcagaatcaaaatcgttccatttggagttctgttggttggagacacctgacaagaggcaaaggcttgttcgcacgtatgatgtgcaaggcttggctgtctcatctacttattttcttgagaccaaattgtgaatcctatgttacctttttctcaagtcatccaaattgttggctcctgtaataaatactcatatttgtctttgcatccgttgattgaatatgattggttagtatatttattttcaaaaaaaaaaaaaaaaaa

SEQ ID NO: 3457 - DNA, 1042 bp, Glycine max
gtttgtatatcctcgaaaatgatgaatgaagcggctggtgaaccctaattagttgtcggtgtttgttggaagagcacatctctgttttcttcgtcatcttcccctcccctccccaaccagagatgcgccccgcaacacatatgtactaaagctttcaacttttcagcatcctttcagatgttagcgaaaacccataacaaaggggatggatctaagtccctggctaagatactggcaaaatggaaagaatataatgcccagattgattccagcagtgatgcggataagccagttcgcaaagttcctgccaagggatcgaagaaggggtgcatgaaaggtaaagggggccctgagaactcgcggtgtaactacagaggtgttaggcaaaggacttggggaaagtgggttgctgaaatccgagagccaaacagaggcaataggctttggctaggtactttccccactgccattggagctgcccttgcatatgatgaagcggccagggcaatgtacggttcctgtgcccgtctcaactttcccaatgtttcagtttccagtttctctgaagaatcttccaaagattctccggttgcgaatcattgtggttcgtcaatggcagtgtctgcaaacgagtccatgatttcaccaagtaactcgggggtaggtgcagaagatgatgttgatatggagcccatttccttatccttaactgtaaagcatgagaatggggaaggtgaatcggggataagttcttcccctccttccccatgatgtacattgggacatggctaaattttttagcgcatgtacttgttaatggttagcttaggtttaatcatatttgatcctggagattagctgttgtaaaactaaaatgaactccgttgcaaaaatggtcatttcttttggccacctaatttgcatggatatcctgtctatttttaactcattaggtgtgagtcatacttacctttgtcaaaaaaaaaaaaaaataaaaaaaaaaaaaaaaaaaaaaaaaaaaaaaaaaaaaaaaaaaaaaaaa

SEQ ID NO: 3458 - DNA, 1338 bp, Glycine max
ccacgcgtccgaaaatgctgggtgccccaagcagttgccaaaattcggggcttatcttggaacccaaggcccaatcatcggacacgacaacaacaccctaaattcagctacgtaggcccccccccccggtcctcctctttctctccgtgtggccgttcagtgacaccgagtgtaaagaagaggagagaaaccgagaaagaagaagaaaactagggttttgcaattgctgcaatggcgcatcaaggagaaccggcgaagctgcggtggggtgagctcgaggaggacgacggcgaggatctggacttcctcctgccgccgcggcaggtgataggccccgacgagaacgggataaagaaggtgatcgagtacaagttcgacgaggacgggaacaaggtgaagatcaccaccaccacgcgcacgcgcaagctcgccaacgcgcgtctcagcaaacgcgccgtcgagcgccgctcctggcccaagttcggcgacgccgtccacgaagacgttggtgcccgcctcaccatggtctccaccgaagagatcctactcgaacgccccaagcctcttggtgccaagtcagaggagccaaagaatgctggagacccattggctcaatttcagaaaggtgctgttcttatggtctgtaggacttgtgggaagaagggtgatcactggacctcaaggtgtccatacaaggatcttgccccgccatctgagggattcgtcgataaacctgcggcggcagacactgtggcagccactgctggtgcaaccaagggagcatatgtgcctcctggtatgagggcaggtgctgagaggactactggatctgatatgcggcgcaggaatgatgagaattctgtgagggtaactaacctctctgaggacacgagagagcctgatttgctggagctgttccgtcctttcggtcctgtcagcagagtctatgttgccattgatcagaagactggcatgagcagagggtttggctttgttaactttgtcaacagggaagatgcacaaagagctattaacaaactcaatgggtatggctatgacaatctcatccttagagttgaatgggcaaccccaagggcaaattaaatgttgaatgtttttgcctctttctttaaaacggtattttgaaggtctttctatttttgtagtctgagtcctgtactatctgtttcctttgagatgatttattatttaaaagtatacattcattctagatctcatgttggtcattgataatcaggtatcatctcacctataaagtatcacattttggaagtgaaaatggttgatatttcttagcccaaaaaaaaaaaaaaaaaa

SEQ ID NO: 3459 - DNA, 1308 bp, Glycine max
aatttcactcgccgccactccccactcacaatgcaagcccttcaccgtctcgcatcctccacgcaccgcgtggccgcgtcgtcgctccgtcacggcagcctcctctcccgaaccacttccagaatcctctcattctccaccgattcgcccgccgggggaggctccttcgacgcagcatgggagagctcctcctcgtggtcgacgggccttgccggcgaccacttcaacggccagtccccctcggaggtcctctcaaacctccaggacacggaggacaggctcttccagctggaggcggagaaccgcagagggaaagcctactgtgacagctggaggagtcgcttggaggagacgacggtgctgctgaagcaggttcaggagcccggcgcgcgaggctcgtatctcaaggattccgagaaggcagagatttatcgactgcacaagaagaaccccgaggtctacacagtggaaaaactcgctagggattacagaatcatgcggcagagggttcacgcgatcctctggctcaaggagatcgaggaggatgaggagaagaagctcggccgcccgctcgacgattccgtcgagcaattgctcgattcttgccccgagttttttaattcgcatgatagggagtttcatgtggcgtctctgccgtacaagccggacttcaaggtcatgccggaggggtgggatggcattaccaaggatgtggatgaggtgcattacgagatctccaagaaggaggatgagatgctttaccgagagtttgtcgagaagatgaacttcaacaaaaagaaaatggctggagaggtaaaatgccacaagtatagtcgacgacgcccttccgatggatggacttttacagtagagaaattgggatccagtggaaaacgtgggggtggtggtggctggaaatttgcaagcatgccagatggatcaagccgaccactgaatgagatggagaaaatgtatgtgaagcgagagactccacgccggcgacgcaggatccttccttgattacttgatttgttttttttttgggaagttttgattagctgttaaaattagaaattttagccaatgtattcaatggttgggatgtgtagtgtcaattgttgtctcttttctttttcttttgggtgaattgtcgtatattttaataagctgactggtgtgatgcttttaattcattctccttttggcttgtgcacggtgatatggagaatgaacatcctctttgttgtcgagaaaaaggtaacccctaatatttaagagcatgaaacctggaagatttactgaaaaaaa

SEQ ID NO: 3460 - DNA, 1698 bp, Glycine max
  misc_feature (1671)..(1672): n is a, c, g, or t
  misc_feature (1674)..(1674): n is a, c, g, or t
  misc_feature (1677)..(1677): n is a, c, g, or t
  misc_feature (1687)..(1691): n is a, c, g, or t
  misc_feature (1693)..(1693): n is a, c, g, or t
  misc_feature (1696)..(1696): n is a, c, g, or t
aacttttttcattctggctccacggatcactctattcgattaagcgaagcacgtgacgagcctaatttacgctttacacccctacacttcccacaatttgttcctggagaagacgccgttccatcacaccctcagcggtcagagcatggcggcggaaccggtgagtgacggcggagccgcggcggagaaattgatcagcgggagagaagaatttggtgattcgtccaacttgttcagcgcgattctagcaatggtgctgtggctgggagctattcatttcaacatcgccctgatcctcctcgccgtgttcttccttcctctctccaaatcgctcttggttttcggttttctctttgggtttatggtgcttcctatcaacgagaagagcagatttggccgaagattgtcgaggttcatatgcaagcacgcttgcaattactttccgatcacgcttcacgtagaggatatgaaagcctttgatcctaaccgtgcttatgtttttgggtatgaaccacattcagtgttgccaattggcattgttgcattggctgaccacacaggtttcatgcctcttccaaaagttaaagttcttgctagcagcacggtgttctacacaccatttttgagacacttatggacatggttgggtcttacaccagcaacaaagaaaaattttatctccctgttagcatctggccatagttgcattttaatacctggtggagtgcaagaagcatttcacatgcagcatggcactgagattgctttccttaaggcaagaagaggatttgtccgcgtagcaatggtgaaaggcaaacctttggttccagtcttctgctttggtcagtcaaatgtctataagtggtggaaaccaggtgggaagttatttctgaaatttgcaagggctatcaagttcaccccaatatgtttttggggaatttttgggtctccattaccgttcagacatccaatgcatgtggttgtgggtagaccaattgaggttgacaaaaaccgagaaccaaccaccgaggaggttgccaagatacatggtctgtttgtggaagcacttcaagatctctttgaaaggcacaaagctcgggctggctatccaaaccttgagttaagaatagtttgacaaggccttaatattgtaccatattttcattggtttattttatttatttattttattccttttggggatggagttggtgaatgaaaatgaccaactatcatcttgggaatgaaatagaataataatgagaaatagggcagtagctacctttcgttagggtatctatttcagttcatggacacatttatatgcctagcctttatatgctggatgttgtcaaagtatttcagtctgggaacctttgccacggctagcagaataataagaaatgataatacaaagtagtggtgatcaaggtatatattaccgaagcaactccctgattcaagggaaaaaacaaaggtttgattgggttgaatttgtatatatctgattgagtcggctcgtgaactaggtttaacaatcttgtatctgacctgattcaatctaattacagaaagaatatgtaggattccctatatatatatatatatgtatgtatgtatgtatatgtgtgtgtatgtaatgtgatttaatgaatgttttggggaataatnnanaanaaaaaaaaannnnnanaanaa

SEQ ID NO: 3461 - DNA, 1476 bp, Glycine max
ggctcgagcgagacgagacgaaaacccacgtgacatttttgcccctcacactttcccctatttactccacgcccctcacttccttgttccttcataaaaacaacacttcctcctcttgcattcggcaaccaaaccatgcagcgcacggcgttggcgacagatgaaccacggcggcgctccggcgacgcggagggggagaaggtgttcaaggggagcgaggtgttcggtgacacgtcaccaaattacttgaagaccattttggccctggcgttgtggctcggaaccattcatttcaacgtcgcgttggtgctcttcgcaatcttcttcctctctctccacaaagcacttttgcttttcggtttgcttttcgtgctcatggtaattcctgttgatgaaaagagcaaattcggtcgaaaattatccaggtacatatgcaagcacgtttgcgcttactttcccatcacgcttcatgtggaggacatgaaggcctttcatcccaatcgtgcttatgtttttggttatgaaccacattcagttttgccaattggagttgttgcgttagctgacaacacaggttttatgcctcttcctaaaataaaagttcttgctagcagtgcgatattttacacaccatttttgagacacatatggacatggttgggtcttaacgccagtgacaaagaaaaggtttacctcgctgttggatgctggctatagttgtatcttgatacctggtggagtgcaagaagcatttctcatggagcatggttctgagattgcctttcttaaagcaaggaggggatttgtccgcatagcaatggagaagggaaaacccctggttccagttttctgctttggtcagtcaaatgtctataagtggtggaaaccaggtgggaagttaattctgaattttgcaagggctgtcaagttctccccaatatatttttggggaatttttggatctccgataccctttaaacatccgatgcatgtggtggtgggtagaccaattgagctcgagaaaaatcacgagccaactcctgaggaggttgccagaatacatagccaatttgttgaagcacttcaagatctatttgaacgacacaaagctcgagctggatatccaaaccttgagttgagaattgtttgatatggtcgtaacttcgacccatagtttcatgggggtaattacacttttcttctcttaggttaggctttatttgggagttttgaagatggagtggagtgattggttcatgattaattggatttgaatggggtgaggtaaataaatactgttgattgattgagaaaggagttatctttgttgtcttagaagtcacattggtaattaatcatgtaaattgtaaacttccaattatgagtccgtgaacaatttatatcagatatatttataaatctgagattaatttaaaatgttacgctatggctaacaaacacaaaaaaaaaaaaaaa

SEQ ID NO: 3462 - DNA, 1830 bp, Glycine max
gttggtttcaagtgtgaagcttcgagggaaactgctgttgttatcatgaaccacgcgtccggaacctgttaaccttgttgagatcctcatggacgtgaaccaatggtccaccgtgttcgctggcatagtctcaagagcaatgactttggaagtgttatcaacaggggtggcagggaattacaacggtgcattgcaagtgatgacagcagaagtgcaagtaccttcacctctggtgccaactcgagagagctattttgtaaggtattgtaagcagcacggtgacgggacttgggcagtagtggacgtgtccttggataatttgcgtcctagtccttcagccagatgtagaagaaggccctcaggttgcttaattcaagaaatgcccaatggctactctaaggtcatatgggttgagcacgtagaagtggatgacagaggtgtccataatctatacaagcagcttgttagctcggggcatgcatttggtgcaaaacgttggattgcaaacttggatcgacaatgtgaaaggcttgctagtgccatggcaacaaacattcccacagtagatgttggagtaataacaaacccagatgggaggaagagcatgttgaaactggctgagagaatggtcataagcttttgtgctggagtgagtgcatctactgcacacacatggacaacactttctggaactggtgccgatgatgtaagggtcatgacacgtaagagtgtagatgacccaggaaggcctcccggcatcgttctcagtgctgcaacttctttttggcttcctgtgtcaccaaaaagggtttttgaattcctccgcgatgagaactccagaagtgagtgggatattctttccaacggtggagttgtccaagaaatggcacacattgccaatggccgagacactggaaattgtgtctccctacttcgtgtgaatagtgcgaattcaagccaaagcaacatgttgatattacaagagagttgcgcggactcaacaggatcttttgtgatatatgctcctgtagatattgtggcaatgaacgtggttctgaatggaggggacccggactacgtggcccttcttccttcaggatttgctatactcccagatggaaccactgcacatggaggtggcattggtgacactggacatggtggttctctcttgactgtggcatttcaaatattggttgattcggttccaacggcaaagctttctcttggatcagttgctactgttaacaatctcattgcctgcactgttgagagaattaaggctgctttatctggtgaagttgcttgacctaatggattatagtttagaagaaggataaaggggtgcattgcattttggacaaatgggaggtgttgggaacttcggcttataccaaaaaggatgagaattgagaagtcaagagcgcaccttgcatgatcctttcttagcacccaacacagtgctgaaaggattaaggttcgggaattgacttccctgaaaatcgtaaatgctaagagcttaaatcaagaccttagtaccttctctcttcaccttcaaagactacatatttatagttagtgttagctttttctatgattattaggttggagctgtgacttaacctcttatgttctttcttctaatgtttttttgtattttataagatcaagcgcgctagccttatagctagtaaatgggaagcttgcaccgttagtgtagtggttaagttctcactacactaccatgtttgaccctttttaaggttttcaaatgaatgttccttccaatttgcccaatctcattcaacaattcaagtctcgtggtttatt

SEQ ID NO: 3463 - DNA, 757 bp, Glycine max
  misc_feature (743)..(743): n is a, c, g, or t
gctctgccctggtggaaaaaaccttgtagttaatagtaagaacagggacaagtatgttgatcttcttatacaggatcgcttcgtaacatccatatctgagcaggtatcacattttgccaaaggttttgcagatattctttcaaactcaaagctccagcagtacttcttccaaagtttagacctcgaagatcttgattggatgctgcatgggagtgaagataccatttctgttgaagattggaaagcgcacactgagtataatggctataaagagacagatattcagatatcttggttttgggagattgttggaagaatgacagcagatcaaaggaaggttcttttattcttttggacatctgtaaaatatttaccagttgaaggtttccgtggtttggcttcccgactctacatatacagatcccttgaacctggtgatcgcctgccttcatctcacacatgctttttccggctgtgtttcccagcttattcatctatggctgtcatgaaagatcgtcttgaagtcatcactcaagaacacattggctgcagttttggtacttggtgaatgaacacacctgcaatctgaatagaagtggttttgactgcacataaaattatcgttgtacatattatagggagtattccatctgtcctctaattggataatgtgacaagttgtctgttttgcaaagtagtcaagggttgcagtggcattggtctttgtaaaaagttaaaatggncagattataataaa

SEQ ID NO: 3464 - DNA, 681 bp, Glycine max
gaattcgcacgagatcctttcccccctccagttccaactttattgtgtttaaaaaaagtaatctcttcacagaagaaaaaagagaagaagatgggtttgaagaacaacatggtggtgctaaaggtgtgtttggtgctacttttccttgtggggggtactactagtgccagcttgaggctgagtgagcttggcctgctcatgaaaagtgatcatcatcaacactcaaatgatgatgagtcttcaaaaccatgctgtgatcaatgcgcatgcacaaagtcaaaccctcctcaatgccgctgttcagatatgaggctgaattcgtgccattcagcttgcaaatcttgtatttgcgcattatcgtatcctgcacagtgtttttgtgttgacataaccgatttctgctatgaaccttgcaagcccagtgaggatgacaaggaaaactactaatgaacaagtgttatgcatgtaagctctctctccaatggacaaagccccctttatgctttgtttgttatgtaaggaatgactaaataaacttggaataaaacttcctctcttttcgtggcccataatttgctttctgcaaatctgggtcttcttcattccaatgttaaaaacaaaacaccaaaaaaaaaaaaaaaaaaaaaaaaaaaaaaaaaaaaaaaaaaaaaaaaaaaaaaa

SEQ ID NO: 3465 - DNA, 1715 bp, Glycine max
  misc_feature (1704)..(1704): n is a, c, g, or t
tttttttttttttttttttttttttttttttttttttttttttttttttttttttttttttttttttttttaggttttttttttttttttttttataaaaaagaaatttctgaagtgaataaaaatggccgtatctaagaaaattccagatacatagtttgtcatcactctaaagcgtaaaaacagcctgtttccaaccaagttaccatgtctctaggtatgcaggcatagaactaacaatttctaagccaagtacaagggactgctctttccagcaatcattcaaaaagcaaatgaagcatataaagttagctacattcattgcccatgtcacttggaagtctcttcatcttttgtcgccttaggatgtattcccttcaacttaagaaattgttacaaagagcagaaaccaaattaaagaaaaatcacgatccaattagatcaggtgtttcagcctcaatggacagcaatgcagtgtgaacttttccagtccaactgtccagtcgatcccgtaaggatttgatctgttgaatacccagaactcttggctgcacccaggaaacatgcactgtgccctcaacttgatcaattataccctcaattagatgaacagataggcttttcataaggagatgctccacattctctatagaaagttttgtgcgctctgcaattacactcaagggaatagttcgatcttccgaaggccgactgaatataatctccatcagacacagaatgttgatcttttccaacaacttttgctcattttgaactagtgctggttgggctcttaaagcagcattatgcacccgacataattcttgatatcgtaccagatcaccagaattgaatgcctgcagaatatagtaaagccattccacctttgtccccagaaggctcttaattataggatgggcaagtagctctccaaagttgtagatgttatccccaagaagggcagagagggacaaatcaaatgccagatccagcttgaatgaatctgagagagattccactgatgtgtatgccaaatagagaagggcacttttgtagaactcagcaaattcttggcatgtcttatgaaactgagatgatacccagtaatagctagcatatacagatggatcaatatctgtcatgctgtcgagtgtactcttcccatcttctagaagtttcttgcattccttttgatcaccttgctcaagcttgaatattgctatttgcatcttaatgtaaagaataggttcttctatgcgctgctctctagtgtcttgaagtttctgaatgacccctccaagataaccaacagcagcttctttttcagaatactgccgagaaactataacagcaaaatgtgcaagcttgagaaggttgattttcgtctcaaagtctgtgatgaaattgtgatataattgtattaaagcatcaccagcctggaagacggcgagagccacaaactgctcgagcttgagagtgagctggtgccagagcttcttctggtacagatccgccagcgaattgtaccaatcggagagctcagggtgcgaattgcgcagcgattccaagtattgcagagcagccatagcagagcggttcttgattcacaccaacacgcaataccactggtgtacctccttgctgctcttttttataccctaactccttttttcttttttcttttttgggggggggggcctacgnagctgactcga

SEQ ID NO: 3466 - DNA, 2305 bp, Glycine max
  misc_feature (2286)..(2286): n is a, c, g, or t
cccttgttcaaacacatttctagattcacgcttccaccatttcacacactcttctttggaagcaaagcaaatggcacctactaccaccgtacctattggtaccctcccctccggttccgtcaccggacgcttagcctccgtctacagtgaggtccaaaagacgcgcgtggaccacgcgctccctctcccctccgtcctcaagcatcccttcaccattctcgacggtcctccaagctccgccgccggaaatccagacgagatcgcgaagctgtttccgcatttgttcggacaaccttccgcggcattggcgccgagcggtgcggtgcagacgcagaagaagttgaagattggcgtggttctgtccggaggccaggctcccggaggtcacaatgtcatttctggaatattcgattacctgcaagagcgcgcaccaggaagcacgttgtacggtttcaaaggtggacctgctggcattatgaagtgcaaatacgttgaactcacttctgaatatatttatccttatagaaatcagggtggctttgacatgatttgcagtgggagggacaagattgaaactccagagcagtttaagcaagcggaagaaacagctaagaagctagacttggatgggctcgttgttattggtggtgatgactcaaacaccaatgcatgcctccttgctgagaacttcaggagcaaaaatttaaaaacaagtgtaattggatgccctaaaaccattgatggtgatttaaaatgcaaagaagttcccacaagttttgggtttgatactgcttgcaagatatattctgaaatgattggaaatgttatgatagatgcccgatcaactggaaaatattaccattttgtgcggcttatggggcgtgcagcttcacacattacgctggaatgtgccttacaaactcatccaaacattactattattggagaagaggttgctgcaaaaaagctgacgttgaaaaatgtcacagactatatcgtagatgttgtttgtaaaagagctgaaattaattacaattatggtgttattcttatccccgaaggtctaattgatttcatacctgaggtccagcatctcattgcagaactaaatgaaattcttgcccatgataccgtggatgagggtgggttatggaagaagaaactcactgatcaatcgttgaagctttttgactttttacctcaagcaattcaagagcaattgatgcttgaaagagatccacatggaaatgttcaggttgccaagatagaaacagagaaaatgcttattcaaatggttgaaactgagttggagaagagaaagcaagaaggcaaatacaatggcgaatttaaagggcaatcccacttttttggttatgaagggaggtgtggcttgcctactaattttgatgctacttattgctatgctctgggttatggtgctggagccctccttcatagtgggaagactggattaatatcatcagttgccaatttatgtgctccggtagaagaatggactgttggtggaactgcactcacctcactgatggatgtggagaggaggcatggtaaattcaagcctgtgatcaagaaggcaatggtggaacttgaaggggcacccttcaaaaagtttgcctccttgcgggatgaatgggccctgaagaattgctacatcagtccaggtccaattcaattctctggcccaggatctgaagtaattaatcacactctactcttggagcttgaagcactagcttaggcataatatgaggtctttgttttgacggtggcaattcatattttctttttgggatatttcaataatatatttgatctgtgactagctagtgagtttacttttgaaattaaccggctaatgattcttgggttggttgatgagtataaattggtcaacacaaaagttgcattcaacatcggcaatttattttcacaaaaaaaaaaaaaaaatgcctattatacaagcaagcaacaataaaagctttttccctctattaggtcactatatgaggtcgattacgttggatagctacgtacattgcattaatgcaattgagtttgaatgaagatcaaaatttcaagaatactatttactatgagatcccttgataatttcttccgaagttcttaacacctgtattcatgcaatttattcttttaactagtgattttctttgcccggtgttcaaatcactttaatcgataatcaaatattgtcttccttcctaaaaaaaaaaaaaaaaaaaaaaaaaaaaaaaaaaaaaaaangaaaaaaaaaaaaaaaaaa

SEQ ID NO: 3467 - DNA, 1243 bp, Glycine max
gcttactatttgaatcgaaacgtgtcagctgccgctgggaatccactgaccggatgtcactgactacattcgctaatatcatttctaaaagagctgaggataattataactatggggtcattcttatccctgaaggtctaattgattttattcctgaggtccaacaccttattgcagaactcaatgaaattctggcaaatgacgctgtggatgagggagggctatggaagaagaaactcaccgatcagtcattaaagctttttgaatttttacctaaagcaattcaagaacaattaatgcttgaaagagatccgcatggaaatgttcaggttgccaagatagaaacagagaaaatgcttattcaaatggttgaaactgagttggagaagagaaagcaacagggcacatataaaggaggatttagggggcagtcccactttttcggctatgaagggagatgtggcttgccaactaattttgattctacttactgctatgcattgggttatggtgctgcagccctccttcaaagtgggaagactggattaatatcatcggttggtaatttatgtgctcctgtagaagaatggactgttggtggaactgcactcacttcattgatggacgtggagaggagacatggtaaattcaagcctgtgatcaagaaggcaatggtggagcttgaaggggcacccttcaaaaagtttgcctccttgagggatgagtgggccctaaaaaattgctacattagtccaggtccaattcaattcactggcccaggatctgatgcaattaatcacactttactcttggagcttggtgcacaagcttaagacattctgaagcctttttgatggtggcaattcatgttttttgggaactactacaaatataatagaccggagattagtcaagtgattgtgtttttcactttggaactttgctagagaatagtttatgctttatcaacatcatcgacttatatttatgttttgggaatatgtcgttccatgatcttttagttcaatgtttaatcgtctcgtcatttaggtacggtaatagtgatgtaaataggaggttgagacatgagtacctgagtgagaaaattttaaggtggattgtgtttgcataagatatggaaaaccaaatggtcctgtttcagtgctttgtatattggaactctgcgaggttgaccacggtaaccacagtaacgagtaatgtttctcgcaatttaaaaaaaaaa

SEQ ID NO: 3468 - DNA, 1727 bp, Glycine max
ggtatgacagaagattcatctcatggcaagtaaagtagcacccatattgaagtacatgagtttttattcaaacgaaggtgaatgcttggcacaattcaatgaaaaaaaaaagacttcttaagtgaataaaatggccgtatctaagaaaattccagataaatagtttgtatcactctaaagcgtaaaaacagcctgttcccaaccgagttaccatgtctctaggtatgcaaaagcatagaaacaaccattcctaagccaaggggctgctctttccagtcatcattcaaaaagcaaatgaagcatgtaaataaaaatgaagccaagacaagttggctacattgcccatgtcacttggaatttctcttcatcttttgaagccttaggatgtgttccctttgacttgagaaattgttacatagggcagaaaaaaaattaaagaaagatcacgatccaattagatcaggtgtttctgcctcaatggacaacaatgcagtgtgaacttttccggtccaactgtctagtcgatcccgtaaggatttgatctgttgaatacccagaactcttggctgcacccaagaaacgtggactgtgccctcaacttgatcaattataccctcaattagatgaacagataggctcttcatgaggagatgctccacattctctatagaaagctttgtacgctctgcaattacactcaagggaatagttcgatcttccgaaggccgactgaatataatctccatcaaacacagaatgttgatcttttccgacaacttttgctcattttgaactagtgctggttgggctcttaaagcagcattatgcacccgacataattcttgatattgtaataaatcaccagcattgaatgcctgcagaatgtagtaaagccattccacctttgtccccataaggctcttaattataggatgggcaagtagctctccgaagttgtagatgttatccccaagaagggcagagagggacaaatcaaatgccagatccagcttgaatgaatcagagagagattccactgatgtgtatgccaaatagagaagggcacttttgtagaactcagcaaattcttgacgtgtcttatgaaactgagatgatacccagtaatagctagcatatacagatggatcaatatctgtcatgctgtctagtgtactctttccatcttctagaagtttcttgcattccttttgatcaccttgctcaagctttaatattgctatttgcatcttaatgtaaagaataggttcttctatgcgctgctctctagtatcttgaagtttctgaataacccctccaagataaccaaccgcagcttctttctcagcatactgccgagaaactataacagcgaaatgcgcaagcttgagaaggttgattttggtctcaaagtctgtgatgaaattgtgatataattgtattaatgcatcaccggcctggaagacggcgagagccacgaactgctcaagcttgagggtaagctggtgccagagcttgttctggtatagatccgccagcgaattgtaccaatcggagagctcaggatgcgcgttgcgcagcgattccaagtattgcagagcagccatggcattaagaaaaaaaaactcgatagcactgcgtcccctcttctatttttttttataccctagtttctttccccttctgtcgtcttctcgcagccgtaacggacgggtgggtcgaccccggga

SEQ ID NO: 3469 - DNA, 1328 bp, Glycine max
cggctcgactttcgcacggatcacttcacacagtaacttggacaccaactcactctctcaccaacaaaacaaaatccaatggcgccgtctttcgcaatcaacggtggtttccccggcgccagagtcactcctccttccgtcaccggccgcttcgccgccgtctacagcgaggtccaaaacagccgcatcgaccacgaactccctctcccctccgttctcaaaaaccctttcatcatcgtcgacggtccccaaagctccgccgccggcaaccctgaggagatcgcgaagctgttcccgaaactgttcgggcaaccgtcggcggctttggtgccgagtgattcccacgcgccgcatgcaaatcggaagctgaagattggcgtggttctgtccggtggccaggctcccggcggtcacaatgttatttctggaatcttcgattacctgcaagaccttgcagaaggaagcacattgtatggtttcaggggtggtccagctggcatcatgaagtgcaaatacgttgaacttacctcagactatatttatccttacagaaatcagggtggttttgacatgattcgcagtgggagggacaagattgaaactccagagcagtttaaacaagctgaagaaacagtgcagaagctaaacttggacggccttgttgttattggtggagatgactcaaacacaaatgcatgcctccttgctgagcatttcaggagtaaaaatatgaaaactcgtgtgattgggtgccctaaaaccattgatggtgatttgaaatgcaaagaagttcccacaagttttgggtttgatacagcatgcaagatatatgcagaaatgattggcaatgttatgatagatgctcgatcaactggaaaatattaccattttgttcggcttatgggacgtgcagcttcgcacattacactggaatgtgctttgcaaactcatccaaacattactattattggagaagaggttgctgccaagaagatgacactgaaggatgtcactgactacattgttaatatcatttctaaaagagctgaggataattataactatggggtcattcttatccctgaaggtctaattgattttattcctgaggtccaacaccttattgcagaactcaatgaaattctggcaaatgacgctgtggatgagggagggctatggaagaagaaactcaccgatcagtcattaaagctttttgaatttttacctaaagcaattcaagaacaattaatgcttgaaagagatccgcatggaaatgttcacgttgccaagatagaaacagagaaaatgcttattcaaatggttgaaac

SEQ ID NO: 3470 - DNA, 2547 bp, Glycine max
ctctctctctttctctctttctctctgtctagaatgcctctattctcctctgtcggtcacacacagcgatagatagataatagagaagagaagcattcataggcgccaattgtgagtgagagagaagtttctgttttttctacttttccatttttttgggagagatagagagagagagatctgattcttcaccataactgtcattgctttgcttctctcactcagcacaagttgacaagaagggcattgccatttcaatcccatacaaaaagcacacaccccaattcaccaccattttcctaaagcttcactcttttctctgctaagagaagaaagcaagaaagaaaaagccaaaatggttgaatctcagcccaagttcttcatcccggactcaatcaacggcgtgaatttcgacgtagcggcgcagattaagatggtgtgggaagtgatgaaggcgccactgatcgtgcctctgctgaacctggcagtgtacattagcctcgccatggcgctcatgctcttcatggagagggtctacatgggcattgtcatcatcctcgtcaagctcttctggaagaagccacaccagcgctacaagttcgagccactccaagacgacgaggaactcggcaactctaattaccccgtcgtgcttgtccagattccaatgttcaatgagaaagaggtgtacaaggtgtcgattggagcagcttgtaatctttcatggcctgcggatcgtctcgtcatccaagtgcttgatgattctactgaccctacccgtcaagcaaatggtggagatggaatgccagagatgggcaagtaagggcataaacatagtgtaccaaatcagagaaacaagaggagggtacaaagcgggtgctctaaaagaaggcctaaaacgtaactatgtgaaacactgtgagtacgtggcaattttcgatgcagatttcaggccagagccagattttctcagacgttccattcctttcttggtgggcaaccccgacattgctcttgttcaagctcgttggagatttgtgaattctgacgagtgcttattgacaagaatgcaagagatgtccctggattaccatttcacagtagagcaagaagttggatcagccactcatgctttcttcggtttcaacggaactgctggtatttggagaatagctgctatcaacgaagctggtgggtggaaagacagaacaacagtggaagatatggaccttgctgttcgtgctagtcttaggggatggaaatttttgtaccttggtgacctccaggccaaaagtgagcttcccagtactttgagagccttcagattccagcagcacagatggtcatgtggtcctgctaatttgttccgcaaaatggtgatggagattgtgaggaacaagaaagttaggttttggaagaaagtgtatgttatatacagctttttctttgttcgcaaaatcatcgcccacatggtcaccttcttcttctactgtgttgtgattccccttacaatcttggtcccagaggttcatgttccaatctggggagctgtttatattccttctgtcatcaccattctcaattcagttggaacaccaaggtccattcaccttctgttctattggatcctctttgagaatgtgatgtctttgcaccgtaccaaggcaacatttataggtctcttagagtatgggagggctaatgaatgggttgtgactgaaaaacttggtgactctgtcaataataataagaataaatcaggagatgctgccaagaagaataatgccatcaaggccacccccaaaaagactcgatccaaatttgttgaaagacttaatttactggagttgggatttgctgccttcctcttcgtatgtggatgctatgattatgttcatgggaaacacaactacttcatctacctcttccttcagaccttaacattctcaattgtaggatttggctacgttggcaccatcgtgtaaacctcgttgagccaaatttctcaagttacttaagtttcatcaatgttgtgtccatatttttctagtttctcctaaaaaaaaatacatcaaaagaggctgatttcttcaagcaacaaactctgtaccaaatcatctacagctagtttagctcaaataattttcaattcggaaagaaaaaaaaagtcctttccaaaatttcattgtcatccatcatcaagaagatacaaatcatcacaggcaaagtgctgttattactagaattgcattacacaggcttaagggcagctatgaagatgtaccaaaaacaaaaagtggttaaattagagccttagacatgaagtagagacagtgtgattttgtttgcatagattgttttgtgagattttatagttatatatttcgcgagtcctttatttgtttaggtttgcttagtctgagccaaaataatttggtggataaaaatgcgcttctaattcatgttatttgtcattttttcaccaaggaatgaattttatttaccatacatgcaatcaaaaaaaaaaaaatcgagactagttctctc

SEQ ID NO: 3471 - DNA, 2141 bp, Glycine max
acgcgtccggaaatgggagagttctgtaaattttccttctcctgctgccaaaagctttgcctttagggcagctaccggcccccccccccccccagtcatttctcagttttggtcaagcggcatagggagtcatgagaccgcgagtgtggattttgaggttgtgtttcacgggataaaggtcaatcaagaagaggttttacttgatggtagtgacgcaccagtcaggattgatgctgaaactctactggcatctgaggaacttgcacctgtggcaattctaaacaagattagggtcccatatcgaccaatagattctaagattattgcacttacagcagatcgtgacaaacttccttctggaaaacagattctggcactgactctgacctacaagatcaaattggaagatggagctcaaataaaacctcacatacctttgctaaatgaccggatatatgacactaaatttgagtctcaattttatatgatttctgactcaaataagcgcgtatattcaagtggagatgtctatccaagctcttctaatcttcccaaaggagaatatattttacagttatatttgaggcatgacaatgtgcagattttggaaaagatgaggcatttggtgttattcattgagcgaaatttggaagagaaggatgtcattcggctaagctttttctctcaacccgatggcccgctgatgggaaatggttcctttaagtcctcatcactagttccaggtataaaagaaggaatatatctcggtccaccaccaaaagaaaagcttcccaagaattctccacaaggatctgttttgctaggggcaatttcatatgggaagctgtcctttgttggtcagggagagaataaaagtcctgaaaagcaccctgcatcatatcagatttcttatatagttcccccaaataagattgatgaggacaagggaaaaggttcttccttatcttccaagaagaatgtttcagaacagctaagagggcacgccccccatgcaaaaataaaagttctagcaagcctaaaacaagaaactgatgaagagcgtttggagtggaaagagctatctgccttgcttaaatcagaatatccaaagtacactccattacttgcaacgattttggaaggtttagtttcttggagtaatatcaaagacaaaatccatcatgatgaagaggtggttggtgcagccagtgaggtgattaacagtattgacagagaagagctagcaaaattttttgctctaaaaaatgatccagaagatgaggaagcggagaatatcaggaaaaagatggagttaacccgagaccaattggcagatgcactgtaccaaaaggggcttgcgctggcagagattgagtctttaaagttggcagacttgacttggtgtatattgtcaaaggacgtagataagtccccgactttggctgccacagaaggggcaaaagaagacatagaaaataaaaaatctacggatggtcgcagtcaaggagatttgtttgaagagaattttaaagaactgaagaaatgggttaatgtgaagtcaactaaatatgggatccttttagtaactcgtgagaggcgagctcaaaggcttgggactgcgttgaaggtactgtgtgacataattcaagatgacgcagagcctgccaagaagaaattctatgaccttaagctctctttgcttgatgagattggatggacacatttggctgcatatgagagacaatggatgcatgtgcgtttccctccaagcttacctcttttctaggacctgcccatcgggaagatgctggacagcaatgttaggactttggaaccatgtccttttcctcaatatttatgtaacactagaccctttacgtgacctatcctttctttttgtgaacatcttggccttggtatttcgaacatggcatgggaactttgccatgccttcagtgtggctgccacatcagtggcttcgtcaatcccatttatattaatttaataataacaaaataaagagtttttcactagtcttttgttgatttttgttctctgtacctttttcttttataaaaaaagaaaatttagaggtcagtgattcgaaagtgattctgataaccaaaaaaaaaaaaaaaaaa

SEQ ID NO: 3472 - DNA, 726 bp, Glycine max
gggcgctttgttgatcttgtgaatgaggtggtgaacacaccgtcagacgatacttgttagcagtgctggtaatagcgggccaggattgagcactgttggtgcacctggtggtacatcttccagtatcataggtgttggcgcatatgtgtctcctgctatggctgccggtgctcattgtgttgttgaacctccatctgatgggcttgaatacacttggtctagccggggaccaacagctgatggagaccttggtgtttgtgtgagtgctcccggtggtgctgttgctcctgtccccacatggactcttcaacggcgtatgctcatgaatgggacatcaatggcatcaccatcagcttgtggaggaactgcgttgctcataagtgcaatgaaggctgagggaatcactgtgagtccatacagtgtgaggaaggcgcttgaaaataccgcaattcccataggtgatttacctgaggataaattatccactggacaagggcttatgcaagttgacaaggcttttgaatatatacagaagtgccaaaatgttccatgtgtttggtatcaaataaaaatccagcaatgcggagaaacaagtgcttcatgaaggggcatctaccttagggaagctagtgcttgccaacaatctacggagtggacagggggaggtagtgcaattttgatgaagatggctggcgcctggggggttggggcgtgattggggggggg

SEQ ID NO: 3473 - DNA, 1536 bp, Glycine max
caattttatatgatttctgactcaaataagcgcgtatattcaagtggagatgtctatccaagctcttctaatcttcccaaaggagaatatattttacagttatatggctcgcgtgacaatgtgcagattttggaaaagatgaggcatttggtgttattcattgagcgaaatttggaagagaaggatgtcattcggctaagctttttctctcaacccgatggcccgctgatgggaaatggttcctttaagtcctcatcactagttccaggtataaaagaaggaatatatctcggtccaccaccaaaagaaaagcttcccaagaattctccacaaggatctgttttgctaggggcaatttcatatgggaagctgtcctttgttggtcagggagagaataaaagtcctgaaaagcaccctgcatcatatcagatttcttatatagttcccccaaataagattgatgaggacaagggaaaaggttcttccttatcttccaagaagaatgtttcagaacgtttaaaagaagaggtaagagatgcaaaaataaaagttctagcaagcctaaaacaagaaactgatgaagagcgtttggagtggaaagagctatctgccttgcttaaatcagaatatccaaagtacactccattacttgcaacgattttggaaggtttagtttcttggagtaatatcaaagacaaaatccatcatgatgaagaggtggttggtgcagccggtgaggtgattaacagtattgacagagaagagctagcaaaattttttgctctaaaaaatgatccagaagatgaggaagcggagaatatcaggaaaaagatggagttaacccgagaccaattggcagatgcactgtaccaaaaggggcttgcgctggcagagattgagtctttaaaggacgtagataagtccccgactttggctgccacagaaggggcaaaagaagacatagaaaataaaaaatctacggatggtcgcagtcaaggagatttgtttgaagagaattttaaagaactgaagaaatgggttaatgtgaagtcaactaaatatgggatccttttagtaactcgtgagaggcgagctcaaaggcttgggactgcgttgaaggtactgtgtgacataattcaagatgacgcagagcctgccaagaagaaattctatgaccttaagctctctttgcttgatgagattggatggacacatttggctgcatatgagagacaatggatgcatgtgcgtttccctccaagcttacctcttttctaggacctgcccatcgggaagatgctggacagcaatgttaggactttggaaccatgtccttttcctcaatatttatgtaacactagaccctttacgtgacctatcctttctttttgtgaacatcttggccttggtatttcgaacatggcatgggaactttgccatgccttcagtgtggctgccacatcagtggcttcgtcaatcccatttatattatttttataataacaaataaagagtttttcaaaaaaaaattaaaaa

SEQ ID NO: 3474 - DNA, 861 bp, Glycine max
attaagacacagcggggtccgagcctgagcgtgactgtcaaatcttacatattctctctctctcttcctctttctctgtctctctctatatctctctcttcaattctcagagacgaattcataggacaagtctctcactccagagattccattcaatcgctgatcttaatcactcttttacctttcagtctcacacccaaaagaaaaaaaatataatgttttggtttcagaagggttggttctgacttgagaattaggttttgattcaaagagaggaatggagggtgacacattcaatggtgctcagattgatgccaagatcatgcagacatttaagaagaactttgttcaagttcaagacatttttgatcagaacaggctactcatcaatgagataaaccagaaccatgagtctaaggtacctgataacctcaccaggaatgtggggctaattagggagctcaacaacaacatcagaagagtttatgacctatatgtcgatctttcgagttcctttaccaagtcgatggaagttacttcagagggggattcaagtggtggtgctgtgaaatcatcagatgggaaagcaggccacaaaagacacaggcctgtgtagaggagagtttggttggtttctttgtgattcttttgcttggtggagaagttcaatttgtgttgaaaaatgaaaagtttaacacaaagattagaagattgtgctatagttgaagaagctctattttgtattgtagcacatcacttactccttatatttcaaataaaacaatatgatatattgattttcctccacagttactctcattgtaaccttgtaatctggggtctaatagaaatctagcatgg

SEQ ID NO: 3475 - DNA, 1253 bp, Glycine max
tcgagtcagctacgtaggccccccccccccattcattcagcctccctaatacttagccacatctattgcatgctctctcccctcatctccttcttattctctgcaatatatcatagtgccaaactctcatctttctctctctctctcacacacacaatataagtccaccctaaacaatcaccatggcagttgaagctagttacatgaatctcttgccttctcagttactcactaacagagaactcatcaaatccaatcaacagctacagcatcaattaaactctgattacatgtacaacactactacccagatggattcttcttcagctttgcctcaaccagcaacaatgcctgaatcactcttgtccttctaccaatccaacttttgtgatccaaacaaggcagatagtggtctcacctaccatattcctctccagagaaagcgttcaagagatttcaccaccgaattaacctctctcccagctcaccagaagaacaaaatctcctctgatccttcctttctcaaccaagagattctctaccaatttcagaaccaacaatcggaaattgatcgagtccttgcccatcatactgagaaagtgagaatggagctggaggaacaaaaaatgaggcaatcaaggatgtttgtgagcgcaatccaagaagcaatggcgaagaagctgaaggaaaaagaccaagagattcagagaatggggaagctgaattgggcccttcaagaaagagtcaaaagcttgtgcatggagaaccaaatttggagggaattggcacaaacaaacgaatccacagccaactacctacgaagcaatttggaacaagtgctggcacatgtcggcgaggaacgcgccaccgtggccgatgatgctcaatctagctgtggcagcaatgatgcggcggaggccggaaacgacactgcggcgtccgcggcggcgaccggtcgtggtaggttgtgtaagaactgtgggctgagggagtcagtggtgctgttgttgccatgcaggcatctttgcctttgcacaatgtgtgggtccacagtaaggaattgtcctatttgtgactctgacatggatgctagcgtgcatgtcaatctctcttagtacaactttttttcttttttctttttacataattttcattgtagagtttagaacaacagaaactagaaaaaaaatagtttatcttgtcaaaaagacagttagaagaaaaaaaaaatagaatttggaattcttttgttc

SEQ ID NO: 3476 - DNA, 1756 bp, Glycine max
gtcgcacacacacaacacaaaattaaaatttcagctacgtaggccccccccccccgagaataagagaaagacaacactcgtagaagaagaaagcgtttccaagaagcgaaaggaaggaaaggggttttgtgatttttgaagaatcgcgtttgggagtagtcggagatggagctttcgactccgaattcttcctcgaagcacttgtccatcacgccgggttctagggttttgagaagccctctctccgacgaacagatctggaagcgcctccgtgacgctggcttcgacgaggaatcgattaagcacaaagacaaagctgcgcttattgcttacatcgccaagctcgaagctgagatatatgatcaccagcaccacatgggccttctcatattggagaaaaaggatttggcttcgaagtatgagcaagtaaaggccttggctgaatcatctgagttaatgcataaacatgactcagccatgaataaatctgcattaactgaatcaaggaaacgtgaagaaagtttgaagaagacagtaagcgtcaaagatgcatgcatagcaagtcttgagaaggccttgcatgagctgcgtacagaaagtgcggaaacaaaggttgcagctgagagtaaatttgctgaagcacaccaattgatagatgaagcacagagaaaatttacagaggctgaagccaaggtgcgtgctgcagaatctttgcaggcagaggctaaccgatatcacaatgttgcagaaaggaagcttcgtgatgttgaagcacgtgaaaataatctcaggcggcaaatcatatctttcaagtctgattgtgatgaaaaggataaggcgatgattcttgagaggcaatccctttctgaaaggcaaaagggtttgcaacaagagcaggaaagattacttcaatcacaatccttgctgaaccagagagaggaacactttttgagtagatctcaggaactgaatcgtcttcaaagagagttggaggacacaaaagtgaaatttgaaaaggaacatgaagccctatatgacgagaaaaccaccctaaaactgaaggaggcaaccttaatacaacaagaagaggaacttgctaaatggaaatctgagctgagcaagaaagaacaagagttacttgaatttcaagcgaaactttctaatagagaatctgataaaacacagaaagttgttgctagtcaggaagccgcactgagaaccaaaaaatataacttggaagttgagctgcaaatgcagcgcaaattggttgaaaatgaaattgaggaaaagagacgggcttgggagttgaaggaggttgatcttaaacattgtgaggatcaaatcctggaaaggcagcatgagttggaagttctgtcaaggtcgctgagtgagaaggagaaggatctgaaggacctgtcaagtgctcttgaagaaaaagatcaaaggttgagtgctgctgagaaggactttgagttaaataaagtgcttttgcagaaggagaaagatcatgttgaacaggcaaaacaagatgtgcagaagtctttggaatcattggaagataaaataagacaagttgatatggaaaaggagaaactggaagccatgaaaagtgaaacgggtgacttgtcaattttggaagtgaaactaaaggaagagattgcccttgtaagatctcagaagttggagcttttggctgaggcagagaagctcaaagctgagaaggcaaagtttgaagctgagtgggagcttcttgatg

SEQ ID NO: 3477 - DNA, 3065 bp, Glycine max
tttcttttgtttttctatatatgcaaaatacttacaacatattatatagtattattcattacagaattaggttgcgccgctggcggctcgagcttgagtgttccctgggcatgagtggacgctataagactcagtgcactcactcactcactcactcactcagtgactgtgtctgaaaatgggcaaacaagtattgaattcctttcgtcccccagtggttttcttgttattcttcattgtcttttccgttgtttcctgtgatgaagcttccaagaccttcatctttcgcgtggattcccaatccaagcccaccatcttccccacccattatcactggtacacctccgagttcgcccaagaaaccagcatcctccacgtatacgacaccgttttccacggcttctccgcggtgctcacgcaccaacaagtcgcgtccataagccagcacccctccgtcctcgccgtcttcgaagaccgccgccgccagctccacaccacgcgctccccgcagttcctcggcctccgcaaccagcgcggcctatggtccgaatccgactacggctccgacgtcatcattggagtcttcgacacgggcgtctggcccgaacgccgcagcttctccgatttgaacctcggccccattccccgccgctggaaaggcgcgtgcgaaaccggcgtcagattctcccccaaaaactgcaaccgcaagctcatcggcgccagattcttctccaaaggccacgaggcaggtgcgggttcgggtcctctcaatccgatcaacgacaccgtcgaattccgatcccctcgcgacgccgatggccacggcacccataccgcctccaccgccgccggccgctacgccttccaagccagcatgtccggttacgctgctggaatcgcgaaaggcgttgctccgaaagccagattggctgcttacaaagtttgctggaaaaattccggttgcttcgactctgacatcctcgccgcctttgacgccgccgtgaacgacggggtggatgtgatttcgatctccatcggtggcggcgacggtattgcctccccatattatctggaccccatcgcaatcggatcctacggcgcagtttccagaggagtgttcgtgtcctcttccgccggcaacgatggtcccagcggaatgtcagtgacgaaccttgctccatggttaacaacagtaggcgcaggcaccattgatcgtgacttcccctcacaggtgattctgggcgacggtcggagactctccggcgtgtcgctatacgccggagcagctttgaaggggaaaatgtatcaacttgtttacccagggaaatcagggattcttggagactcactctgcatggagaattctctagatccgaacatggtgaagggtaagatagtaatatgcgacagaggaagtagcccgagggtagcaaaggggttagtggtgaagaaagcagggggagtgggaatgattctggccaacggaatatccaacggcgaaggactcgtgggagacgctcatcttctcccagcttgtgctgttggtgccaacgaaggagacgtaatcaagaaatacatttcctcttcaacaaaccccacagccactcttgatttcaaaggtactatcttaggaatcaaaccggcaccggttatagcttctttctcagcgagaggacccaacggtttaaaccctcagatacttaaaccggatttcattgctcccggtgtcaacatcctcgccgcctggacccaagctgtcggcccgaccggtttggactccgataccaggagaaccgagttcaacatcttgtctggcacttccatggcttgccctcacgtcagtggcgccgcggctttgctcaaatcggctcaccctgattggagccccgccgccctaaggtccgccatgatgaccaccgccaccgtcctcgacaaccgcaaccagatcatgaccgacgaagccaccgggaacagctcaactccttacgatttcggtgctggccatcttaacctaggacgagccatggatcctggcttggtgtacgatatcaccaacaatgattatgttaatttcctttgcggtattggttacgggcctaaggtgattcaggtgatcactcgcgcgccggcgagttgtccggtgaggaggccggcgccggagaatctgaattacccttcctttgttgctatgtttcctgcttcgtccaagggggtggcttccaagacgttcatacggactgtgaccaacgtggggcccgcgaactcagtttaccgcgtgagcgtggaggcgcccgcgagtggtgtcagcgtgacggtgaagccgtcgaggctcgtgttctcggaggcggtgaagaagcggagctatgtggtgacggtggcgggggacacccggaagctgaagatgggtccgtccggggcggtgttcgggtcgctgacgtggacggatgggaagcacgtggttcggagccccattgtggtgactcaaatagaaccgttatagagagcctcgaatcgatcatgtcgttttgatcgatgcggctcgtgactcgtgacgtaagtgggtggcacccctgtaggttgccacgactagtataaaagacaacaaaaacacaaatattttgtattttttctttctttttcatttttagatttttgtttaagtgaccaagtttggaggtgtaatccgttgttgtactttttttaataagtttttcttcttcttgggtttaatttagcttcaccttgtgtttatagactttttagtggtctatctatactcgataaaattataggagtaatttgtaatatttatgttaagccgtcattatttaattttaaccacgtttgatttgaaaatatctttttctattacagcatattctgttttctctgttgttgattagttattattattgcaatcttaagtttgtggtttatgctgccaatcttacactgttttaaactaagcattgattatgacaggaacctagattcgttgtctaatatacttctatcgcctcctctctcgattctgttttccataatattagatgtgcatgtaagct

SEQ ID NO: 3478 - DNA, 2054 bp, Glycine max
gtttttttatccataagtatagaaacacatttttattagaaaatttctgagaataaatgttatatgtcgtttatggtactttgtacagagaggagctgttccaggccctctagtggatagggaacataggacgaaccatgcatattcatttccacgcacaagttaatattattcgaattccaaaattattaattgcaatggctattaacagtacaccaacatgaagctcccaaattggttttgaggatgcaaccctggacttgatgtcttccttgccacgtggtatgtaccttgttatttatttccaagggagtttaaaagtatctttccaccatccttgttttgagcaatttgcaacaattttgtccaaccgtacaatgacctgagaaaatgttggcctcacaacaggtgttggatcccaacattcctcaatcaactctttcaactccggaggataatgttttgttttgatcttgaatgctggtcttttcccttccaagcacatcagtctaactgcctcctccgaggacttcggatggaagggctgtgtaccctctatcatctcatatataatgagaccaaaagaatatgcatccacacttctatcaaaaacttcatctttgtaaatctccggtgccacatacaagcttgaaagatcaatgttaggctctggctgtaccagctgtgcttcatcaggtgagattagcgaaaatctcacagtgccaaatccagctatcttcaattgccctccattatccagcaaaatattttttggctttaaatcacagtgaataaccggatctggtttgcattcgtgaagatagttcatgcccctggcaatatcaagagcaaagcgtagaacttttgatggagacaaacgccctttcttttgaagatagcttgccaggtcacccttagaatggtactcacgcacaatcatcataggtatattctgggtgacagctccaacaaactggaccacattcggatgtcgcaccctttctaataatgtgagttcatgtttgaaagcatttatggtatcaggatctgaataactgtccttgtcaagtatcttcactgcaacctttgtgccattccatttagctacttggtatgttccctttgaaataccatcactcttccgaacctgtagttctaccgggttgagttcatattccggaacttcacgaggattcgcaacagtcattggagtcttcctggttttcggtacttttgctccacgagccttcaacatgtaataaatttctgtatttccataatatttggcatcggccgccgccgtgctgccccagcgatcgcgagcgtcgaggttggccttgcggctgagaagtagcctggcgacttcgacgtggccttcgcaggcggcgacgtggagggcggtgcggccgtcgaggtcgatgctgttgacgtcgatgccttcgttgagcaaatcctcaactcccttgacgtcgccgcggcaggccatgaagaggagctgcatggtggagtccaggttctccggcacggtgagctcggcgttgccggagcaggggctgcggcgaatcggatcgagcgaggactggcggccgaagctgaagcgctggttgttccggcgaggatccagcgaggcctggcgcgtgaactgccacgagaggttcctccgcagcgaccccgacgagaactgccgcgagatgccgcgcttcagctgcgcggcaatgctttccatgccgccgcctcgaggagaaggattttgcaacgcaacaaaaaaaaagaacttgtcagaaatgaaaacaacaaagagcgcgctctacatgttgaaatggaagcaaccctgcaggttattccaaagagaaaatgaaatgaatcgcgcgagggagaataagaagaggaatttcttttgtttttattcaaacgcgattgcaagaaagaaggcgcaaatgtctctgtctctctcttttctttttctttcttctgaattgccgcaattagacgaggtgctgtgatgcgtccatcggttgacttacggggacccgggggggggcctacgtagctga

SEQ ID NO: 3479 - DNA, 1082 bp, Glycine max
  misc_feature (1061)..(1061): n is a, c, g, or t
gagaactagtctcctgtttttttttttttttttgttttagtcgttaatagaaaaacatttttataagaaaatttctgagatgttatatctcctttatggtacattgtacagagaggagctgttccagccctctagtagacaggaacataggacgaaccatgcaaattcattttcacgctcaaattaatccaagctcaagttaatattattcgaattccaaaattattaattgcaagggctattaacagtacaccaccatgaagctgacaaattggttttgaggatgcaaccctgaacttgatgtcttccttgccacgtagtatgtactttgttatttatttccaagggagtttaaaagtatctttccaccatccttgttttgagcaatttgcaacgattttgtccaaccgtgcaatgacctgagaaaatgttggcctcacaacaggtgttggatcccaacattcctcgatcaactctttcaactctggaggataatgttttgttttgatcttgaatgctggtcttttcccttccaagcacatcagtctaactgcctcctccgaggacttgggatggaagggatgtgtaccctctatcatctcatatataatgagaccaaaagaatatgcatccacacttctatcaaaaacttcatctttgtaaatctccggtgccacgtacaagcttgaaagatcaatgttaggctctggctgtaccagctttgcttcatcaggtgagattagcgaaaatctcacagtgccaaatccagctatcttcaattgccctccattatccagcaaaatattttttggctttaaatcacagtgaataaccggatctggtttgcattcgtgaagatagttcatgcccctggcaatatcaagagcaaagcgtagaacttttgatggagacaaacgccctttcttttgaagatagcttgccaggtcacccttagaatggtactcacgcacaatcatcataggtatattacgggtcacagctccatcaatctgatacacatgcggatgccgcaacctttgtcatcaatatgcatcggcgtnttcttcgaccttgcagtggaa

SEQ ID NO: 3480 - DNA, 1961 bp, Glycine max
tctctctccatctctttctcgatatataccgtaaatccaatccaattcccaattttcgaatctaccctttctctctctacgatggagccttcctcgatctctccaccgccagctccgcctgccaccgccgtccccttccccgccgaacccaacgaccaccttccaccacccattcccgaaccaccttctaaccacccaccctacgccgagatgatatacacggcaatcgaggcgctgaaggagaaagacggttctagcaagagggcaatagcgaagtatattgagcaagtgtatacgcagcttccaccgaatcactcagacttgttgactcagcacttgaatcacttgaagagtaggggattgctccaaatggtaaaaaaatcttacgcccttcctagatctgtgcccgtgtctgttcctggacctgcacccacacaagggacatcagcagtgccggctgctgttgttgccatcacgacgactccgaggcccagaggtcggcctcgcaaggcccaaaatccagttcagaactcgcctctgcctcaggacactgtcaacgtgcaggttcagcagaatgccgagccggtctgggctgcgcttgggcttgcagacgagcccgtgcaagcggaaggcagtggcaagaagcgaggtcgtccgaagaagagtggcatcttaggagcgggcctgaccaagaggggccgtcctcccggctctggaaaaaagccgggccgtcctcccaaggcaaccacaacagatgtttctgcttctgctgggcccaagagacgtccaggccgcccgcccaagaatcagtcgcagcccactctcattccctttgctccggctgtatctgccgcttccgtggatacagagcacgtggcagcatcagctgaaactgcgccggttgatgctgacgcggctctcggaccaagagcccgtggacggccgaagaaatatgctgacgagatgattgctgcgggccgaggcaggggacggggccgtgggcgcggtggcggcggaagaggacgagggagagggcgtggtgaattgcctgcacagcccagaaaaccaggggcaaggcccgtgggtcgtccgaaaaagggttcaacttctgctagtacttctcaaaatgctgcaaatgaagatctcaggaggaagcttgaacactttcaatcaaaagtcaaggaatctcttgcagtgcttaagcctcattttaaccatgaaagtccagtcactgcaattgctgctattcaagagctagaagtactgggaactatggacctcaatgtaccactaagggatgaaacacttccacatcaagtggagctgccaccaccacagcctccagtgcagcagcagcagcagccaccacagcagcagctgcagcagccaccacagcagccaccacagcaacacctagcaccacaacaactgccgccacagccaccgatatttcagcaaacatatcctccatttcatctgccgcagttccaccatcaccagccttcgctgcagttccagcaacagcagcagcagccgccacagccaccgccacagctattccagcaccaggcacagcctccttcccaccaacagtttcatccttaggaatcaggcccaggctaggaagaattacatggtcctcaatttgataatatgatgctaggaagaattacatggtcttcgatttggttatgaacaatctgaaacaagtgttttaacaaggcacatgaggggtaacatatttgtaaagcgagtaggcagtagcagaactgatttttcgtcaagtgaatcgattgtccatttagtttgttgttgtgcactattctagattgatccctgaagtaatttttagattttagagtactgataattctgttattgaagtaatatttgtttgactttggcagctttagattattagtcatattgttcatgttggtctaaaaaaaaaaaaaaaaaaa

SEQ ID NO: 3481 - DNA, 2004 bp, Glycine max
cggtccggattcccgcgtccgccccgcgtccccgtaaatccaatccaattcccaattttcgaatctaccctttatctctctacgatggagccttcctcgatctctccaccgccagctccgcctgccaccgccgtccccttcccggccgaacccaacgaccaccttccaccacccatttccgaaccaccttccaaccatccaccctacgccgagatgatatacacggcaatcgaggcgctgaaggagaaagagggttcaagcaagagggccatagcgaagtatattgagcaagtgtacaaggaacacctcccaccgaatcactccatcttgttgactcagcacttaactctcttgaagagcagcggaatgctccaaatggtcaaaaaatcctatgcgctccctagatctgtgcctcttaccggagctgcacccgcacaagcgcatgatgccgccacctctgctctgcagttgacttccccgaggcctagaggccggcctcgcaaggctcaaattccggtccaaaacttacctcaggacattaatgtgcaggttcagcagaatgccgagcccgtctgggccgcgctcggacttgcagatgagcccgtgcagacagaaggcagcagcaagaagcggggccgtccgaagaagagtgtcactcccggagcaggtccggcaaagagaggacgtcctcccggttctgggaaaaggttgggccgtcctcccaaggagaagtctgtcactgcaacaacaacaacggatgtctctgggcccaagagacgcccgggccgcccgcccaagaatcagtctcagccaactcccattccctttgctccggcggatgcagccgctgccgtgggtacagagtatgttgcagccgctgaaactgtgccggttgatgctgcggctgctctggggcctagagctcgtggacgaccgaagaaatacgctgatgagatggttgctgcaggccgaggtaggggacgaggccgtggacgtggtggcggcggcggaagaggacgagggagaggacgcggtcaattgcctgcgcagctcagaaaatcaggggcaagacccgtgggtcgtccgaagaaggggtcaacttctgctagtacttctcaaaatgctgctaatgaagatctcaggaggaagcttgaacactttcaatcaaaagtcaaggaatctcttgcagttcttaagcctcattttaaccatgaaagtccagtcactgcaattgctgccattcaagagttagaagtactgggaactatggacctcaatgcaccactaagggatgaaacacttccatcgcaagaggagcagccaccactgcagcagcagcagcagccaccgcagcaacagttcccaccaccacaacagcagccaccacagcaacacctagcaccacaacaactgccgccacagccacaggcaccaatatttcagcaaacatatcctccatttcatctgccgcagttccaccatcaccagccgacgctgcagttccagcagcagccacagccgccacagctattccagcatcaggcacagccaccttcccaccaacagtttcatccttaggaatcaggcccaggctaggaagaattacattgtcctgaatttgataatgatgctaggaagaattacatggtcttcaatttggttatgaacaatctgaaacaagtgttttaacaaggcacatgaggggtaacagatttgtaaagcgagtaggcagtagcagaactgatttttcgttaagtgaattgattgtccatttagtttgttgttgtgcactgttctagattgacccctgaagtaatttttagattttagagtactgataattctgttatttaagtaatatttgtttgactttggcagcttaagattattagtgatattgttcatgttggtccattttgtagtccccttttacccctccgttttttgttgtgttctgggaatttttctggtcttatttgatagggattatgctttggctgagac

SEQ ID NO: 3482 - DNA, 728 bp, Glycine max
tttttttttttagttattttccttttttttaagtaaagtaaattaccaaaaatctccaaatatatcaaattgtcaattaacaaattgtacctggccagtaactgatccaaaatgaatcatatagttctgtaaatacgttgatccagaagagccagacataaagtattccataagatcaagaggttggaatctaagtggacaagacaacaacgcatgcatttgagaaaaaaaaaacaggtaaaacaaatataaggtaataaatcactgctccttcagttcttcgcaaagaggcctccaaagccacctttcttcttttgtggcactgccacagagttcttgttgcggccagtgttgctggtggtgcctccattcttctcctccaccttcttgaggattggatcagtctctagcagctggtcttccttctgcaaccctccaaggatccaatcaagaagacccttctcttctttgcttccaccagcaccctttgccgctgtggctgcaaagactctaccagttgctggagcaaatgacatgatgatggaagccatgttgcaagctgagaaatctacaacacacacttgtgtgttagtgatgagaatgagaagacaaataatggggtggacaatattttggtgaactttgaagaataaagcgtgcctatgtcctgttatgaatataaaaaaagggggtgtggatgacttgtatatagatttctaaaatctttt

SEQ ID NO: 3483 - DNA, 1387 bp, Glycine max
  misc_feature (31)..(31): n is a, c, g, or t
tcgagtcagctacgtagtgcccccccccccngatgttagacacaaaataaaccaacgtattctctttctctcttcaatggccggaatccgcttgcagccggaggactctgacgtctcccaacaatcccgcgcggtggctctctccgccaccgatctggtctccgacgacgaccgctccgtcgccgccgactcttggtccatcaagagcgagtacggaagcactctggacgacgaccagcgccatgctgacgccgccgaagctctctccaacgccaacctccgacctccctccgattacagttctgacaaggatgaacctgattctgaagcagtcacatccatgctgggatttcagagttattgggattctgcatatgctgacgagctcacaaattttcgtgaacatggtcatactggtgaagtctggtttggagttgatgtgatggaagtagtagcatcttggacaaaagccttgtgtgttgaaatttctcaaggtcacataccaaatggtgtcgatgaggttaaggctgaagctgacaaactaggtgataaagttttgtctacttggagtgtactagatattgggactggcaatggtttactgctccaagaattagctaaacaagggttctctgatttaactgggactgattatagtgaaagggccatcagccttgcccaaagccttgctaatcgtgatggattttccaacgtcaaatttttggttgatgatgtcctcgagacaaagttggaacaagagtttcgacttgtcatggataaagggacactagatgctattggattgcatcctgatggtcctgtcaagagaatgatgtattgggattctgtttcgaggttggttgcatctggtggaatacttgtgatcacatcatgtaacaatacaaaggatgaattggtacaagaagtggagagtttcaaccaacgaaaaattgctactgcacaggaacttggggcagtgaaggacgaggaaccgtgcagagagcccccatttcagtatgtaaatcatgtccgcacatatccgacattcatgtttggtggatctgtaggctcccgtgttgcaaccgtggcattccttcgaaaatgaaaatgttgtcatttgttatgattaaggtctctggtcggatggatttgaagttgttcctaactgttgtgtcaaacagtaaatatctttttgcgatttatgtgaagttccattacctctccttcttgggtgaatagtagttatcattcggagtttatactctataattagtaaggagaaaatacagttagttcagcgtagcaaaagattttgttattctggttcttttgtgattctgattacgaggtcgatgaaactatatgggaattttgtgtttaccaaaaa

SEQ ID NO: 3484 - DNA, 912 bp, Glycine max
acgagatttatctccccccaaacgccactgttttcaccctcccccaccttcactcactctctctctctctcttcttcacaccaattcacaaatcaccaaaagcaccactgctattgagagagaggattcagaaagacaacatcaaaatcaatcacaccaagatgctgctcggaaagagacctcgtcctccaatgaagagaaccacaagcatgtccgaaatgaccttggatctgaacaccgccgccgccgccgatgccgccgccaaccaacagagatcaggtgttggtcccggtgctgcagcagatcagactacgaggatgttggcaacacccaaaatcctcagaagacattcttcggatttcggagacacgcctcccttccttcgcgcctgctccctctgcaaacgttgtctggtgcccggtcacgacatctacatgtacaggggtgataatgctttttgcagcctggagtgccgccaacagcagatgaaccaggacgagagaaaagagaagtttgtcatggcgtcgaagaaaaaggtcgtggctactccaccgtctgggtctcaagtcgccgtcgccaccgccaccaagggtgaaacaaccgtggtggcgttgtagatgtgaaacccaaaccaaacatgtcaaaaacatgtttatatagctctccctttgtctctctttttgtttttttttttctggcgtcttttttttttttaattttttttaccgtggcgaccttttggataatgggagtgcgggttgttttccttgctttcatgggcaaactaggcaagtgttatttttggaacttggaagtaccttgtagcaatcccccttgggattttgaatccatagataattaaaatggaaaaccaaatttcagaaaaaaaaaaaaaaaaaaaaaaaaaaaaaa

SEQ ID NO: 3485 - DNA, 1521 bp, Glycine max
tttttttttttaattcgaaagtttaatcgtaaaatgcagccaacagaacttattctcatacttacatcaaactattctaacaagcataattacaagaacgaagcaaggtacagttcctcttataacaatagagtaggacaggaggataaattatctacttatttggcattaaagtgaacatcggtaaatttgactttgcagcaccttgattacacgttcttcatttgtctctaaatctgaaaccatacattagtacctacatgtcttgctttggcttccggctcaatttggagtaatggccacccattagctgcaaaatctcctcccacaaactttctgacggatctgataaagccccacaaagcaaacttgagctacatgcagctacataccaataatctgactcaatctcatctctcaactgatccagttgccatccggcataaccaacaaagaatctgaagtcatgaggcttgagaatccccttcttcacaagtcctgcagcatcatccaaactgtttcgagatccaaaacatagcccagggattacctcttcaaatcctggaagcttcatcttctcctctgttttcaacaaaaccatgcttgcctcaagaggtccgccgaaatgcagagaacaatcagagaaggtagttaatagatcatggtttgtaggtttcatgtgtttgatctttttgtgaagaggacggttgatgacaattccaaaaggccctccttgatgatgtctagttccagatctgagaaggagaataacagttctttcaaaggtgcgaatgccatcaagcttttcggtagccacaagtacgcaaccagcctcaggtactggaataggatgagcccactgtgttccaagaggtttggaattgggcaatgttccaccttgattgtgcatgtcagcatctgatatttctttcagctcatctctatatagctttgccctgaactcgcgccaatccagattagtatggtggcatttctcagagttgttttctgatttgttgccatcagaagaattgttccctctagtaccatctccttcgggaatggaccgttcttcattgccagaagaagaggagttgccatgattcttcttccccgtggcgctgacaacaaatgggcgatacccaactttagagtaaggctttctcctcgaaacagtgatctcaaacactctggtccttcccaaatgggaggaaatgggtctgtggcaaaacgaatttgtgtggaaaaggttcttcgcatgaacagcacacagatccattctgacttttttgcttcctttgattgattgattttatcgtttctggaacagaacagctaagctaagaagcgagaagatttttagcgtaaaagaatgatagatagaaggatagaaaaggaaaataattttagaagaagaagatagtgagtggagcaacaacagaaggcgatcacaaagggagaaggaagaaagacactacgattatgaaaacgacgctttggggggggggcctacgtagctga

SEQ ID NO: 3486 - DNA, 1208 bp, Glycine max
tacggctgcgagaagacgacagaaggggacgatcgttaagtctcactctcaacaccttcgaaccctagcacagccccgtgccgtcaactgtcaaccaccctccgtccaccgcacgcgcacctcgccaccaacatccagcaactcgcaccagaacagcacctcccatcgttgacgcacaaagtagcaggccgtcgcactcgcgccctcccgtccacagtcgcagtcggaccagccaccagtgatgggaaagatgtgcaagaataagaaacaagctggtgggcatggacctccaagagagcaaactgatacacaggaacaagaaatggacataaggaagattatgaaagatgttgaaaattttagctactcacatatgtcatggaaagaacgcaaaaagattgaaaataggaatgttgtttctcttggtgggaaggcgaggactattgttgatgttctattttgcttgccatgtgctaatgcataaggatgctcaggaaacaaatttcttactgtttgtcatgtttcccatattgtgggaagccccaaaagaatcagagattacctttaagtgtggctcgactaatgatgaagaaacaaaaggagagggagcagaaaatgctccaagagcgtttgattcttggacaatttgggggaaagcttggtggtagcagtaaaagatctgctgggaagcacaagccaggaaacaggggtctgaaatcaagcgaaggtcattttagaaatggcatactcaatgtgaagcatttgttaaattcaacagcatcaagagatcgtgaaactggaaccaatatgtccaatacatggaaagggaaaggtggtaagaagaaaaatggcaacaagggtgctggtggtaagaagcaccgttcagcgcatccttgtgaataacgtgttttgggaatatggaggagtcctttttaatatgtatgacccttgggtaagcttttcagttttgacagagagtgaaatggatagaatagaaaacaggacaataatgtcttgtgtattctgataattataaaatttgaacaagaccttgtgtcttgttttgagtttttgtgcttatcaaacccactaggacattcggcgtagtacaatggaataatatatattcttgtcctgtttgaagtgtaataaaaaaaaaaaaaaaaacctttttccacaatatttcacgtaacatagcttgcgatttc

SEQ ID NO: 3487 - DNA, 2132 bp, Glycine max
tacggctgcgagagacgacagaaggggatcgcagaggcagagcataacaacacaagagtcgcatctcaagcttttgtctttctctacttttcttcttctttctgtgtatcgtatcgtattggtaggttgaaaaacaaagagtgtgtgttgttgttgtgtggtttggttttcacttttgttcatcgtttgcgagacacacaggagagaagagatggcgacgagggtggtggcggaacagaagccgaagacgaagattgtgtgcacgctggggcccgcatcgcgctctgtcccaatgatcgagaagcttctgcgggcgggcatgaacgtggctcgcttcaacttctcccatgggtcccacgagtaccaccaggaaaccctcgacaacctccgcgccgccatggagaacaccggtattctctgcgccgtcatgctcgacaccaaggggcctgagattcgaactgggtttctcaaggacagtaagcctatccaactgaaacaaggtaatgaaataaccatttccactgactatgacctaaagggtgatgagaagacgatttgtatgagctacaaaaagctgcctgaggatgtgaggcctgggatggtcatactctgcgcggatggcaccatatcatttacagttttatcatgtgacaaacaagcgggtttggttcaatgccgatgcgagaactctgccactcttggtgagaggaagaatgttaatttgcctggagtgatagtggatctcccaactttgacagacaaagacaaggaagatatcttggcctggggagttcccaataaaattgacatgattgctctttcttttgttcgaaaaggttctgacctggtggaagtcaggaaagttctgggaaaacatgccaagaacattatgctcatgtctaaggttgaaaaccaagaaggggttgcaaattttgatgaaatccttgcaaattcagatgcatttatggtggcacgtggtgaccttggaatggaaattccaatagagaagatatttcttgcacagaaagtgatgatttacaagtgcaacatccaaggaaaaccagttgtcactgcaacccagatgttggagtcaatgatcaaatctcccaggccaaccagggctgaagctactgatgttgccaatgcagttctggatggcacagactgtgtgatgcttagtggtgaaaccgctgctggagcctatccagaccttgctgttcgaacaatggctaaaatatgcattgaagcagagagcacccttgactatggagatgtgttcaaaaggattatggagcactcaccagtacccatgagcccattggagagtctagcttcttctgctgttagaacagccaactcggctagagcagctcttatcttggttttaactagaggagggagtactgcaaaattggtggctaaatacaggccaggcatgccaattctttctgtggttgttcccgagcttaagaccgatacctttgactgggcatgcagtgatgaggcccctgcaagacatagccttatattccgcgggttggttcccgtattgagtgcagcttctgctagagcttctcatgctgaaacaactgaagaagcaatagaattcgccatgcaacatgccaagtccaagggtctctgccacaacggggattcggttgtggcacttcatcgtgtgggcactgcttctgtcatcaagatcttgactgtgaaatgatcaccccattacagggaattcttctgctgtttttggcaaattttttagatggtgcaaaagaggtctcgttatacctcttcatatctacattggatgcaaacttcaatcaaaagcatttatcaggatgggttacctgtttttcacatatcttatattactgtttttttttttttttgttacatttgccttatcattgtggcgagcagccacctgctttcatttgttaagattttgtatgaggcttttggtgaaccaaaaaactagccacttctggattttgaattctacggtctaaagttgttttaattgagaagtgtatgccttttcgtagcattggcaaaaaaaaaaaaaaaaaaaaaaaaaaagaactcgagactagttctctctctccctcgtgccgaattcgatatcaagc

SEQ ID NO: 3488 - DNA, 2061 bp, Glycine max
aattcggctcgagagcatatcatattgattgcataataacaagagtcgcatcgcatcacaaatcttttttgtctctctctacttttttgctttctttcttcttctgtttatcgcatcgcgtattggttggtcgaaaaacaaagagtgtgtgttgtgtggtttggtttggtttttcacttttcttcatctttttgcgagaagacacacacacagagagagatggctacgacgaggattgaggcagagaagaagccgaagacgaagatcgtgtgcactctgggccccgcatcacggtcggtcccaatgatcgagaagcttctgcgagcaggcatgaacgtggcgcgcttcaacttctcccatgggtcccacgagtaccaccaggaaaccctcgacaacctccgcgccgccatggagaacaccggtattctctgcgccgtcatgctcgacaccaaggggcctgagattcgaactggttttctcaaggacggtaagcctatccaactgatacaaggtaatgaaataaccatttccactgactatgacctaaagggagatgagaagacgatttgtatgagctacaaaaagctgcctgaggatgtgaagcccgggatggtcatactctgtgcggatggcaccatatcatttacagttttatcatgtgacaaacaagcaggcttggttcaatgccgatgtgagaactctgccactcttggcgagaggaagaatgttaatttgcctggagtgatagtggatctcccaactttgacagacaaggacaaggaagatatcttggcctggggaattccgaataaaattgacatgattgctctttcttttgttcgaaaaggttctgacctggtggaagtcaggaaagttctgggaaaacatgctaagaacattatgctcatgtctaaggttgaaaaccaagaaggggttgcaaattttgatgaaatccttgcaaattcagatgcatttatggtggcacgtggtgaccttggaatggaaattccaatagagaagatatttctcgcacagaaagtgatgatttacaagtgcaacatccaaggaaaaccagttgtcactgcaacccagatgttggagtcaatgatcaaatctcccaggccaaccagggccgaagctactgatgttgccaatgcagttctggatggcacagactgtgtgatgcttagtggtgaaaccgctgctggagcctatccagaccttgctgttcaaacaatggctaaaatatgcattgaagcagagagcacccttgactatggtgatgtgttcaaaaggattatggagcactcaccggtacccatgagcccattagagagtctagcttcttctgctgttagaacagccaactcggctagagcggctcttatcttggttttaactagaggagggagtactgcaaaattggtggcgaaatacaggccagggatgccaattctttccgtggttgttcccgagctcaagactgatagctttgattgggcatgcagtgatgaggcccctgcgagacatagccttatattccgcgggttggttcccgtgttgagtgcagcttctgctagagcttctcatgctgaaacaacagaagaagcaatagaattcgccatgcaacatgccaagtccaagggtctctgccacaacggggattcagtggtggcactgcatcgtgtgggcactgcatctatcatcaagatcttgactgtgaaatgatcacccccattacaaggaattcttctgctgtttatggcaaattttttggatggtgcaaaagaggtctcgatatacctcttcatatctacattggatgcaaacttcaattaaaagcatttattaggatcggttacctgtttttcacatatcatatattactggttttttttttttttgttacatttgccttatcattgtggcgagtagccacttgttttcatttgttaagattttgtacgaggcttttggtgaaccaaaaaactagccacttctggattttgaattttgcggtctaaagttgttttaacttttaattgagcaaaaaaaaaaaaa

SEQ ID NO: 3489 - DNA, 1441 bp, Glycine max
ccaagacataatggaaccttactattatttaagaatgaaactacgctgatgcttccactagagaaaaaaagtcatgtaggtggggttgagtgaataatagttaataatttaaaattcacatcataatggaaccttagcatcgaaggacaaattatagaatgttgtgtgtgtataaattccaccaaagccaccccaccaaattcctcctcatcaaaccaagacatagcaaacgatccaaactcttttttcatttgcagcatcaaaatgagtggtagcaacgatggtagcggcagctggagctctaggtttttgaaggtggctagtgcagctgccgctacagccgccgttgccggcggtttatatgccattctttcatcctcaacctctgctagctctgagatggaagtgccgtttggcagcgcacggcgtgagagcaaagaacgtgacgatggtggctccgggtctcatcctcgcgagggtgccaccacggtcagtcgttggaagaaacctgagattggttgggtgaagctgaacgtggatggttcacgcgacccatacaaaagttcctccgctggttgtggtggtgttctgagggacgcatcagcaaagtggctccgtggctttgctaaaaaactgaaccctacttatgcagtgcaccagacagagttagaagccattctcacgggcttgaaggtggcttcagagatgaatgttaagaaactaattgtggagtcagacagtgactctgtggtgagcatggtggagaatggggttaagcccaatcaccctgactatggtgtcgtggaacttataaggacgaagcggcgtcgttttgactgggaagtgaggtttgtttctgtctccaacaaggcgaatcgtgtggctgataggctcgccaacgatgctcggaaattggcttgtgatgatgtttgtgaggagtatcttcatcccccggctaactgtaaccagttgctcttggaggatgagataggctgtgagagcttttagtccttttttttttttcttcttctttcaaaaataagaaaagaaaaattactatgacaaggtttttgaaggacaccatgggctacttaattaatttggcaatcatggaagattaagtgctttaatttgggtgggaattaagtatgaaattgaagccactgcttcttcaactagtttgatgcatgtatgatgtatctattattaggttgtcgatcttctgggaaatatgtgtatttatatctagtactatatatatggtatcttaatcaagtttgtattgattttcttgtttgttgagataacatatatgtaatatgctctcctttcagccagcttgaatgtgcacaagtgaacttgttacgctatataatgaaatgatgtattgctcgatcgaaaaaaaaaaaaaagaaaagactcgagtcctctcctcgctctc

SEQ ID NO: 3490 - DNA, 917 bp, Glycine max
taccgggagaagacgacagaaggggagggaaaacgcaaaagacaaaagaagggtgttccgtcgtggcggcgtggtggaacttcattcacagtgggtggcttgcgttttggaaaaacggtgtcgtgcggaaacagaggctacgtttacgactctcatcatatggacagcttacgccaggagaaagttcaaagatttgaagaatttgttgacaaacgcctgaaacctgatcttgttcatgctattgctcagcgggacaaggtatttgaacaacagaaaattttcactgatttgagaaaaaacattgaaaaccttgagaagaatagtgtaaccagtctaagaactttggtcaatattgggtctgaagtatacctgcaggcagaagtgccagatacacaacacatatttgtggatgtaggatttggattccatgtggagtttacttggtcagaagctctgaactacatagataaaagggaagaaaagatagccaggcagatagaggagtacacccagttgattgcatcaattaaagctcagattaagcttgtttgtgaagggattcgagaattactgcaacttccagctgagaaatccttaccagaacggatattttgatatttactgaatcaacgcatgtgaacagaacagagattgatatttatccagtaggaaagattgtatctctttctctgaccttaaaccaaagtacatgaagatatatcgaatgttgtctagttaccctttttctattttggtcttgtggcattgtgatgcctcaaagtttgtttttgttagccattaggtctaaacttgttagggaactttgtcaatatcatgcttttgagtttatgggaaatcatctataagaaaaaaaaaaaaaaaaaaaaaaaaaaaaaaaaaaaaaaaaaaaaaaaaaa

SEQ ID NO: 3491 - DNA, 2045 bp, Glycine max
acactcccaacacaccactcatcacagactctgcttcagatccccctcaccaaaaataaaacctgccaaatctcattacacacacagacacagtgcatgtgcatccataaacatcaagtaatgaggtaatctaaagtgggaaaaaatgggtgtgggtcggttcaaaccgacgctgaagaggaagagggttccgatgagggtctggttaagcttccaaaaatcaatgggtgtcctcgtgggtggaaaccatacttcctccaggttttgcactcgctaatccccctctcttccccccttcggcttccgatttttctctctcaatctttgttcatcaaagtgctgcatctctctcactctcttacttaactcgacaacttcagccacattattccatggatgccaaggtattcaaattccagatcctccaaggctccatcgctaagcgcgtggtcattcgctcaatactactcgcgtgcgccgtctcaattgtctccatctaccgcgcgcaatccctcttcgatttcggaaccctcgctcccatcgccacgtacttcgactgcgtttccggcttcgagggcgtcacctttcgccctggttcccacttgctccgaacccgcttctgggcctccgccaattgcgagaaagacgccaacttgaccctctccgtggtcaccgacctaactggtaacaatttactctacaccggagcgaaaagcctctgcgtcggagaaggctcctcaatggccgtcacggcaatgaaacagttaggtttctccagcgtcagcgccgtccaaacgcaccgtttcgtgcagaggaacgtcctgtacgaggataactccttcgatttcgtgttctccagagacctagacaaggtttctgtcccagcattgctggtgctcgaggttgagcgtgtccttaagccacgtggcattggtgcctttcttgtaggcaccactagttctcaccccaatgatttgataagagcagccacacccgtttcctctttgttaaggtcttccaatgttgtgcatgttggttctgtcaacgagcttaaccttgttgttttcaagaaacgagttggaaacgctacttcattttaccaacatggtaatttacccgctgattgtcccagtctcacattcactaaatccctcatagagttgatggagcctctcgtgagtgagaaacaaaaaccaccacctcttgagtttcacaagaggattccctatttgcctaaatttgtggatgtttccactaggaagaggttggtgtatattgacattggggtaggggagcttcttgatgccaatgttagtgattggttcctaccatcgtaccccattgatcagaaggatttcaatatttattttgttcactacaacacttcgattatgttgtcccatgtgaagcaacctggtattacctttgtttaccaccctggcttgtctggtattgataaggtcaatgctaagcttggtagtgatgatgatgatgacatggatcctttacttggggaggaggagaagtttgatttccttgcctggttcaaagaaactgtgcaatatgctgattttgtggtcctcaagatgaatgcaggcagtgttgaactcaagttcctctctgatatatttgagaatggagctatatgctatgttgatgagttgtttctcaagtgtcccgagaggggaggtgatgccagcaagggaagttgcatggatatttacaaggatctccgaagcaatggtgtctatgtgcatcaatggtggggagactgaactgcattgtacctttgatgattattgtggtgttagagaaacctgtgtatgtacaagtttctcttgtgtttgatgtatttggattctagtcgtccaactttgtctgtgttgttgttgtgctgtgtttgttgtctgtgaaagtgtgtaggatgctatgaacatccgagtgctttatggttgggcgcttaattctaaataaacaaccaatgtcgttgtcgtttgctaataaaattaatctgtgatgattgtgtcaaaaaaaaaaaaaaaaaa

SEQ ID NO: 3492 - DNA, 1094 bp, Glycine max
  misc_feature (12)..(12): n is a, c, g, or t
tcgagtcagctncgtaggccccccccctacgctcccgtctcgtcgacagttggggagcttctcagtcatttcaattgttccgagatcaaccttggatcaggtttagggaatggctgcaatcttagctcgaaaatcactccttgctcttcgtgcgcgccaattggctgtaagcggtcaagggctgcacagctcccaatactatggccttcggttaagtgcacactccttctctaccaaaagagaggatgaggaaagggagcaactcgcaaaggacatttcaaaggattggagttctgtctttgaacgtagcattaacactctctttctcactgaaatggttcgaggactaatgctgactctgaaatacttctttgaaacaaaagttacaatcaattatccatttgagaaaggccctttgagccctcgtttccgtggtgaacatgcactccggcgatatccaacaggggaggaacgttgtattgcttgcaaactttgtgaggctatatgtcctgcacaagcaatcacaattgaggctgaggagcgagaagatggcagccgcaggacaactcggtatgatattgacatgaccaagtgcatctattgtggattttgtcaagaggcatgccctgttgatgccattgtcgaaggaccaaactttgaatttgctactgagactcatgaggagcttttatatgacaaggagaagctgcttgaaaatggggaccgatgggagactgaaattgcagagaacctgagatctgaaagcctttatcgctgaaattttccatgtgatccttgcctgttgctttttccgtctaattgggcaatgataaataaaatgaccagcgcatgattttaaagaactgtatgcatacacgattgttacatcagttttttttttcttttgtcaatgtttgcgttgctgttaagtgtacaatattgatgacttttatctccttgagatcttgaacaaatgtggaaataattgaatttttcaacaaaaagatgcccttgaagcatactagcaactagtaagcttgtaggcttgtagccctaattgatccttagaaaatggaagcactgatgcagtgcag

SEQ ID NO: 3493 - DNA, 847 bp, Glycine max
aacacaccacaaactgttacaatgacacaaagcgttgtcgtagacttcaacaatctccccgaaggttgcatagcaaacattctctccttcacatctcctagggacgtgtgtagactctctttgctttcatccactttcagatccgccgctcaatccgacgctgtctggaacaagtttttgccttcagatttccacaccatactttcccaatcttcctctttatctcttccttctaagaaggacctctttctctatctctgccaaaaaccgctcctcatagacgatggtaaaaagagctttcaactggataaagtatacgggaagaaatgctacatgttatcagcgaggaatctcttcattgtatggggagacactcccaggtattggcgctggacttcgcttccagatgccaggttttctgaggtagctgagctaaggagtgtgtgctggttggaaatccggggctggatcaacacggggatgctgtccccggagacattgtatggggcgtaccttgtgttcaagccaaacccttctggattctacggcttcgattaccagttagtggaagtgtccatcggaatcgctggcggcgagaatcgcaagcgaaccgttttcttggacgccgaaagaggacggaggctaaggtaccagattgttcctcgccgtgccgggactgggatattcaaccgtgcacgtttccttgcccctgttgaggcaccccctgtagaagataacgatagtctcgatctccagcacccaaaggagagagcagatgaatggttggaggtggaattgggagagttcttcaacgatggacaagaggacaaggaattggaaatgggtg

SEQ ID NO: 3494 - DNA, 1772 bp, Glycine max
taaatattacatgcactatttactcatttttaatgtatgaaatatttaaatttagggattcagctacgtaggccccccccccccccaagaataattggagagttgctagttcatccatgtgatcaaacctcgcatggccatgttgatgttaccaatgcaatgcgcttcgctgttcatgtttcccatcacgattgagaaaccctaaccccaatccccccgaccaaaatggtgaagaagaaggtccccgattggctcaacagctctctctggtcctcatcatcgccgtcgtcccctccctcatccgctgtcgccagccccttcgaacagccacctccacctccaccgcgtcctccatcccccgccgtcgtcaccccctccgagccgccgcctcgtcctccgtcgcctcccgcagtccacgatcctctgccgacgcagagaatcgatgattcgccgagggaagatcacggcgacggctttcgttccgcgcacgacgtgtctcgccaggctcaattgctggccgagttgtcaaagaaggtggtggatatgagcgagttgcggagcctcgcgtgtcaaggtatacctgatgctgctgggatacgttctactgcgtggaagcttttgcttggatatcttccaccagatcgagggctttggtcagctgaattagccaagaagcggtcacagtacaaacaattcaaagaggagattttcatgaatccttcagaaatcacaaggaagatgttcaactcgacaaattgtgatactggtgatgccaactgtgcgagggcgttgctctctagatccgaaatcactcatggggagcatcctttgagtcttgggaagaccagcgtatggaatcagttcttccaggatacagagatcatcgaccaaattgaccgagatgtaaagcgcactcatcctgatatgcactttttctctggtgattcccaatttgcaaaatctaatcaggaggctttgaagaatatattaattatttttgcaaagttaaacccaggcgtacaatatgtgcaaggaatgaatgagatattggctcctctattctatgtgttaaaaaatgacccagatgaggaaaatgcagcctctgctgaagcagatgcattcttttgttttgttgagctattgagtgggtttcgagataactttgttcaacaactcgacaatagtgttgtgggaatccgttcaaccattacgaggttgtcccagcttttgagagaacatgatgaagagctgtggcgtcatcttgaggtcacttctaaggtcaatcctcaattctatgcatttaggtggattactctcctgctgactcaggaattcaattttgccgacagccttcacatttgggatactcttttaagcgatccagatggtccacaggaaactcttcttcgggtatgctgtgcaatgcttgttctcgttcgtaagcgcctccttgcgggtgatttcacttctaatctcaagttgctgcaaaattatcccaccacaaacattagtcatttgctctatgttgccaacaagtttcgtgtacagtcagtctaaatgtggcattttgctcttctatctctaatttcgctttcaaattcagtgcttgtaaatgactttaagtgtgagacccacagcagtgacggtttattaatttttttaatttataatttgcaaaaaaaaaaaaaaaaaaggaggggtcaatgtgagcttgggccttggtgaagtacgctcttataatagcaggacacttattttatttttttaaaaaa

SEQ ID NO: 3495 - DNA, 1446 bp, Glycine max
  misc_feature (836)..(836): n is a, c, g, or t
attctggccgcccgctttggataatttgcatccttcctttggtcttatagttattagttagaccttgcacagtaaataacaatgaagcggccatttagttcgagcggttatcacttttgtctaatgaatatgttcctgttgcttttggcagtaaggtcccaactgacaacagacttttataaatcatcatgtcctaacgtttccaaaatagtaaggagagaagttcaaaaagctctaatgaatgagattcgaatggctgcttctttgcttcgccttcactttcatgattgctttgtgaatggttgtgatggatcgatactactagatggtggtgatgatggagagaaatctgctgctcctaacctgaactctgctagaggatatgaggtggtagatacaatcaaaagttcagtggagagtgcatgcagtggggttgtctcctgtgctgatatattagccattgctgccagagattctgttttcctaagtggtggtcctttttggaaggttccgctaggacgaagagatggaacagtctcaaacggaacactggcaactgaggtgcttccagcgccatttgatccattgaataccatcatttcaaagtttactaatatgggccttaatctcactgacgttgtttctttatcaggtgcccatacaattggccgagcaaggtgtacactgtttagcaatagattattcaacttctcaggaacaggtgcaccagacagcacactagaaactggcatgctctctgacctgcaaagtttgtgtcctcaaaatggagatggaaatgttactacagtccttgatcggaattcatcggatctatntgacattcactacttcaagaacctgctcagtggaaaggggcttctcagttctgaccagattctattttctagtgatgaagctaattcaacaacaaaacctttagtccaaagctatagcaacgatagtggacaattctttggggactttgccaactctatgatcaagatggggaatataaatattaagactgggactgatggagagattaggaaaaactgcagagtgataaattctcagtaatatgataagaaacgctttgcaagatatggaataagcagaagatgcggtgtcttcctgttacattaggtaatttaggttggtgtttatatatgttactcaaaatggaatttgtaggtggaaatgtgcttttcagatgaatgtgagcaacttaacccaacaaaagataaattaaagatagtatcaacgattccctcgttttatgttatgtgcaccagtttttttctattcagattgttttcttaattccttggcaagttcacaaatttgtataaataataataaatgataagatctagtctatataatttgtatattgtatacactaaattttaagtgatggaacaaagaaaagttgatatattttaaggt

SEQ ID NO: 3496 - DNA, 651 bp, Glycine max
gctttttttttttttcaaaattcaaatcatatcattgaaattgtacagtgaaaagtcatacaaacttaaaacactcttcttataagttttgctactagggttataaaactaatgctcctgggaaaattttctaaagcgcctttatagtaagcatacataggcttaagctcttccactttgctttttagtcctggagtcacttgttgaaagcgctgacccagagatcttgttaacctcatacagcaatgcagccgagaacaggaaacatgtagtgatgcaaactcggtggacagtgcttgcagcaatcagagcaacagcttctgcaacaatgacagctccccaaccagttcttgcaccaattgtttcctgaaaatttccaatgaaagttaggagcacaagaaataggagagagctaacgaaccctccaagtatagtgtataattctgatgatgctagtttccctcggtacatttcttgaagtgagagaatgactgtgaagagaagaaaggaatatagcatggaactcccagaccccgccatggcctcagatcggagcagcggtttcagttcagatctcgagcaacacgcgatcgtcgttttaataaacgcacgagtcaaataccggagcccggtttgggaatccaatccttg

SEQ ID NO: 3497 - DNA, 2151 bp, Glycine max
gaattcggcacgagatttcctctgaaaattattcatagcatatttctaaccacactcaaaaggcttcccttcctgacttggatttcattacattgctaaactatattatttttattggtgaattgctacactatattctaaggacaattaaacatagactatatggggttgatggatgtggaccaaactcaattgttgtctaagatggtcatcggagatggacatggtgaagcatcaccatactttgatggatggaaggcttatgatgaaaacccctttcatcccaaagagaatcctaacggggttatccaaatgggtcttgctgagaatcagcttacttctgatttggttgaagattggatactgaataacccagaggcctccatttgcacaccagaaggaataaatgatttcagggccatagctaactttcaggattatcatggtctgcccgagttcagaaatgctgtggctaaattcatgggtagaacaagaggaaacagagtcacgtttgatcctgaccgtattgtcatgagcggtggagcaactggagcacacgaagtcactaccttttgtttggcagaccccggtgacgcatttttggtgcccattccttattatccaggttttgaccgggatttgaggtggagaacaggaattaaacttgttccagttatgtgcgatagctcaaacaatttcaagttgacaaagcaagcattggaagatgcgtatgagaaggccaaagaggataacattagagtaaagggcttgctcatcaccaatccttcaaacccattaggcacagtcatggacagaaacacactaagaaccgtgatgagcttcatcaacgagaagcgtatccaccttgtatctgatgaaatatactctgcaacagtttttagccaccccagtttcataagcattgctgagatactagaggaagacacagacatcgaatgtgaccgcaacctcgttcacattgtttatagtctttcaaaggatatggggttccctggcttcagagttggcatcatatactcttacaatgatgctgtggtccattgtgcacgcaaaatgtcaagctttggattggtgtcaacacagactcagtatcttttagcatcaatgctaaatgatgatgagtttgtggaaagttttctggtagagagtgcaaaaaggctggcacaaaggcatagagttttcactggggggttggccaaagttggcataaagtgcttgcaaagcaatgctggtctctttgtgtggatggatttaaggcaacttctcaagaagccaacgcttgactctgaaatggagctttggagagtgatcattgatgaggttaagatcaatgtttcacctggctcctctttccattgcactgagccagggtggtttagggtgtgctatgccaacatggatgatatggctgtgcaaattgcattgcaaagaattcgtaactttgtgcttcaaaacaaggagatcatggtgcctaacaagaaacattgttggcacagtaacttgaggttgagcctcaaaaccagaaggtttgatgatatcatgatgtcacctcactcccccatacctcagtcacctctggttaaagccacaatttgagttggcatatttctctgaaccctctagaagaagtaactgatatatgatgattatttggctctttgacttgttgttttggcaaggtacataaagtgcttgagtttgttatttttaacagcagtaacaggcaatgcctgatattgtttttgttaccaacatcgaagtctctttgccttgcgtcatagaacttgtgctactggaaacatgccccttcaatttttaggggcattttttttttcttttttcacttaccaaataatgggttcaaggtgaaaaaagtttataatgtttgtaaggttattggtttattagaagagtccagaagaagtctgtattcttatactgcaattgtaaggtcgatgatcaataaattgttaatagagggtcttcaatacccaccctcttttctttttgagacaaaaggaaatttgatattgcagtgacaaaaaaaaacaagcaagttttccattggccaaattttcagttattatttaaggacccgttgacgattcttgaatggaaaagaatagctcg

SEQ ID NO: 3498 - DNA, 1335 bp, Glycine max
tcagctacgtaggcccccccccccaaaacgtgattgtgagtagtagtgaaaaaggcacactcacacaaacgtcctcttccatattctctcttctctcttctcaaaaatctcatgccataagtttggtactactaaccttttagctgcttttgcttacaagctcctacattctctctccaggttgggaattagtgcctttggtgatcatcatgttccttcttagaaggcaaacccagaataaccaggagaatgattcctcatatcaagatacaaaggtggctgaactcaagacaggtcttgggcccctctctggtcgtcgattaaagtattgcacagatgcatgtctaaggagatatttagaagcaagaaactggaatgttgataaagctaagaaaatgctggaggaaacactcaagtggagggcaacttataagccagaggaaatccgttgggctgaaatagcacatgagggtgaaacaggcaaagtctccagagctaacttccatgatcgacttgggaggactgtgcttattatgaggccagggatgcagaacacaacatcggctgaagataatatcaggcatttagtctatctgttggaaaatgctatcctaaatctttctgaaggtcaagaacaaatgtcatggttgatagacttcacaggattatcacttagtacaaatatgtctgttaaaacatctcgtgatattattcacattttacaaaaccactatccagaaaggcttgctattgcttttatgtacaatccaccaagaatattccaggctttctggaaggccatcagattcttcctggatcccaagacagtccagaaggtgaagtttgtttatcctaacaataaggacagtgtggagctgataaaatcactcttccccacggaaaaccttccaagtgaatttggggggaaaacaagtctaaactatgaccatgaagagttctcgcgattgatgaccgaggatgatgtgaaaactgccaagttctggggacttgatgagaagcccttcaaccctcctaagaaggggcattcgggagcagaggtggcaccggaaccagtgcctgttgaggcagtagttagttagttgagcaagtttgcatgttgtagccacttataaactgaagtgactacataaccgaatcatgaaggaacaaacaatgtagtagtggctaatttaaggagccgaataagtggtattttgtatcgttcaacttttaaccatgtcatgtagccgaagcatctttatcacaatcgctgctacagtcctctccttttaggtgagcggacttcaattctgatttaaaaaaaaaaaaaaaaaa

SEQ ID NO: 3499 - DNA, 910 bp, Glycine max
  misc_feature (826)..(826): n is a, c, g, or t
tcagctacgtaggcccccccccccgtgagtttttattttcattcattttcaggtttagagagaccctaacacacttagcgtgatcaagatcaacaatggcggaaaacccttccgaaacggtgtcgtccagttcccaacctcctcctcctcctcctccttcttcttcttcttcttctcagaaatcgccccaagattcgccgcaggtccctgcattgtcgaattttatgccctttccgagtggatattattatcaaatgattcctggtatgtaccctgcgctagttccagggttgactttgccgcaacatgaggagcatgggaaccgcggagctggcatatatgctgttcccgttaacccgtatgacagacaagttactggacttccatacaacacactgattccgctgacttaccgcacacccaccagcaggccaagttctgaagctactgttgccagtgaaaatcagggacaagcaggacagcaacctcaacagcagcagcctgcacctcaaagacaagttgttgttaggagatttcaaattgcatttcaaattgatttgttgcttatgttgaagctggcagctgtgatctttttgtttaaccaagatggatcaaggcagaggcttattgtccttgtgttctttgctgctcttgtatatttgtaccaaactggagctttgacaccgattataagatggctttcacgaggtatgcagagagcagcagcacctcctcatccaccaagacctgcagccagggctgaacatgttcccgctcccaggccggagggtgacaatgctgctccagcaggtaggggtcaacctgnttggacattttatgcatgtgattttccatgtgtttcttttgcaaaacactagtgatagagctgatgtgatttatgatgtaatta

SEQ ID NO: 3500 - DNA, 1298 bp, Glycine max
actcaattttcatttcattcattttcaggtttagagagacccaaacactaacacactgagcgtgatcaagatcatcaacaatggcggaaaaccctctcgaaacggcgccgtcgagctcacaaccttcttcttctcagaattcgcctcaagattcaccgcaggtccctgcattttcgaattttatgccctttccgggtgggtattatcaaatgattcctggtatgtaccctgcgctagttccagggttgactctgccgcaacatgaggagaatgggaaccgcggagctggcatatatgctgttcctgttaacccgtatgacagacaaattactggacttacatacaacactctgattccgctgacttaccacacacccagtagcaggccaagttctgaagctgctgctgccagtgaaaatcaggggcaagcaggacagctacctcaacagcagcagcctgcacctcaaagacaagttgttgttaggagatttcaaattgcatttcaaattgatttgtttcttatgttgaagctggcagctgtgatctttttgtttaaccaagatggatcaaggcagaggcttatcgtccttgtgttctttgctgctcttgtatatttgtaccaaactggagctttgacaccgattataagatggctttcacgaggtatgcagagagcagcagcacctcctcatccaccaagacctgcagccagggctgaaaatgttcctgctcccaggccggagggtgacaatgctgctccagcagagggtcaacctgaagccgagaatgggaaccagcccgctaatgatgcagaccaggcagtcgagaatgaaaatgttgcagaacatggcaatgtcaatggtggtaatcagtggtggggcattgtgaaggagatccagatgattgtctttggatttatcacttcccttctccccgggttccacaaccatatggattgaactatattttgtagcttacaaggtttgtggatctgatatatggtctatatgggaccatgcctgagacatgggacggggtgttctgaaataaaaatgtatagcatcagaagttccaagcgtcataactaatacatacatagttaggtgccaactataatccagcggaagatatggtgcaactatagggtgccgtttttgtatcattaattggattgttgataaaacactttttttttggattccagagcccaggtttctacatagccaggggctttagattatttattttttccccattactgttttttttaattattattgcattgcaagcgcctgaaa

SEQ ID NO: 3501 - DNA, 945 bp, Glycine max
ttttttttttttttcccgatgaacattaatcaattatcattattcagcaaaaaaatctccacttttttgtttttgttcaatctcgaataccacaaactcaaaatcccaaacccgtgtgtgccatccacagatttcgcgaaaaataaaaaatatcacgcgctggtaccacctttccccaaaccatcaattccaatcctcccaatttccacaatcttcaaccttcaaattctgcttcacctttcattcatttcacttcagagagagagagaacaaaacagaatgggcgtcgtggtgatcgacggcagcaccgtgcgcgacttcgtgaacgacgaaaccgccttcaccaagagcgtggacgagcagttcacggcgctggacctcaacaacgacggcgtcctctcgcgctcggagctccgcacggccttcgagtccatgcgcctcatcgagacgcacttcggcatcgacgtttccacgccgccggagcagctcgcgaagctctacgactccatcttcgacaagttcgacggcgaccggagcggcgccgtcgaccgccgcgagttccgcgacgagatgaggaagatcatgctcgccatcgccgacggcctcggatcgttccccataaggatggtcctcgaggacgatcccaatagtcttcttcagaaagccgcggatcttgaagcctccaagacctgaaatccaaacggcgacgttttgagttcggttcggtaatagtaattgattgtgctttcgtgcgttcactttgtttttcttttcttaaataaaagggtttatgtagagaccgtgtttcgaaactgaggttccgttctgtgtataatgtaagggacactgttattaacttatcatgttgagtgttgagttaattatactttttttccctaaaataatttctaagtttaatttagtcttttttattaaaaaaaaaaa

SEQ ID NO: 3502 - DNA, 1900 bp, Glycine max
ccacgcgtccgggagactctgctgcgttggccccccccccctttgatacaaaatcttctgttagagtgatgttcaacaatatgcactataacttacctccttggtccatcagcatcctccctgattgcagaaatgtagtttttaatacagcaaaagttggagtgcaaacatctcagatgcaaatgttaccaacaaatactcgtatgttctcctgggagagttttgatgaagatatttcttctctcgatgacggctcttcaattacaaccactacttctggtctcttggaacaaataaatgttacacgggatacaagtgattatctttggtatataactagtgttgatataggttcatctgaatcctttctccgtggaggcaaactacccactctcattgttcaatctactggccatgctgtgcatgtttttatcaatggtcaactttctggttctgcctatggaacaagggaggataggagattcacctatactggcacagtaaacctccgtgctggaacaaacagaatagctctgctcagtgttgctgttggacttccaaatgtgggaggacatttcgagacttggaacacaggaatccttggtccagttgtactccgtggacttgaccaaggaaagttggacttatcttggcagaaatggacttatcaggttgggctgaaaggtgaggccatgaatcttgcatctccaaatggtatctcttctgtagagtggatgcagtctgcattagtttcagagaaaaatcaaccactgacttggcacaagacttattttgatgctccagatggagacgagccgttagcattggacatggagggtatgggtaaaggtcaaatatggattaatgggctgagcattggaagatactggactgctccggctgctggtatttgcaatggttgcagctatgctggcacattcagacctccaaagtgccaggttggttgtggccaaccaacccagcgatggtaccatgtacctcgatcttggttgaagccaaatcataatctgttggttgtttttgaggaacttgggggagatccttcaaaaatttcacttgtaaagagatcggtaagcagtatctgtgctgatgtgtctgagtaccacccaaatattaggaattggcacattgatagctacggaaaatcggaagagttccatcctccaaaagttcacttgcattgtagtcctagccaggccatctcttccattaaatttgcaagctttggaactcctttgggaacatgtgggaattatgagaagggagtttgtcattctcccacttcctatgccaccctagagaagaaatgtataggaaagccaagatgcacggttactgtatcaaacagtaactttgggcaagacccttgtcctaatgtgttgaagcggttatcagttgaagctgtttgctctccaaccaatcggaggggctgaatgattaaggaaggaagccacccttttacgtgtagtatgaagtgacttaacaagaaaaacgaaaggaccataatagtataggtaaagttaagtgtcatggttgtttttagggagaaagtaataatgtttatgatatgttggtgccgaaggcacgaggtttttagtttcatttagtgatgttgtgttgacgggaatgtataaaaattagtgattgtcggataggtgaatcttaatcagggagtccaaaattgggatccttggtggagtagttcccggccttttacgttttaactataggcacggggaagagagggaatttggtttgtgtgatgttttttcgttttactttgtggggttaaattaaactccaaatcaggttcaagttgggagcggatcctactgtaaccactctacgtttatttaaagcccattgttcaattctgtgc

SEQ ID NO: 3503 - DNA, 1620 bp, Glycine max
  misc_feature (1469)..(1469): n is a, c, g, or t
  misc_feature (1543)..(1543): n is a, c, g, or t
ccaacctctctaactctctctctctcatcccctgctattcttcttcatcactcttctgttctcttttctcccctataataatatttccaacacaacaacactcagcagacaagtagccagaacaagaaaatcctttgacacattgatcacttcctttaaggaaacaaacatggaagggggtcacatggggtggttcctcttctgttgttgtttttctctacttttttttcattcttctgggtcacccagaagaaacttgcccatcatagcctttgaggatggctacacccccttgtttggggaccataatttggccatccatagagatggcaaatcagttcacctttcacttgatgaaagaacaggttctggatttgtgtctcatgacctttaccttcacgggtatttcagtgcctcgatcaagctgcctgctgattacactgctggagttgtggttgcattttatatgtcaaatggtgaaatgttccagaacaaccatgatgagatagactttgagtttttggggaacattagaggcaaagactggaggattcagacaaatgtttatggcaatggaagcaccagcattggtagagaggaaagatatggcttatggtttgatcctgctgaggatttccatcagtacagtattctttggacagattctaagatcatattttatgtggataatgttcctattagggaagttaagagaacagaatctatgggaggagatttcccctcaaagccaatgaccatgtatgctaccatatgggatgcttctgattgggcaaccaatggaggcaaatacagggtaaattacaagtatgcaccctatgttgctgagttctctgacctgatcctgcatggttgtgcagttgatcccatagagcatgtggccaagtgtgaaagtgcccaaggttctgagaaagttccctctggtgtcaccccagtacaaataaccaaaatgagaaacttcaggttgaagcacatggcttactcttactgctatgacacagttagatacaaagtccctccaccagagtgtgtcatcaaccaccaagaagctgaaaggcttagaaaatttgatcccgtcactttcggcaacggccagcgccaccgtgggaaacgacaccaccatagtagtaaaggaagccaggaagagattactgcttcttcattttaatgtatggctccatatgcagattttgtcataaagaaaatattttcatatatgaatcagtttgatttacctgggttaacaaacaatatgtcttttgatcaatgatgttttcattcactgaaaaatgggtcattttttttgttttagtccctaacttttaaaccataagttctggtctccttcacttgtggttttagaagttagggacttaaaccaaataagacccattttaggcacctaaaacatcattaaacttaatatccttttttcatttatcctttcattntggtgtatagaggggtttggacatagaagtccttaatatgtttagtttatgatatggttcttgctggtgggttntttttatagtctttcatccctttaggttcccgggtatttcctcattgatttcttatgctattgtacaaattgaacct

SEQ ID NO: 3504 - DNA, 1317 bp, Glycine max
  misc_feature (750)..(750): n is a, c, g, or t
  misc_feature (764)..(764): n is a, c, g, or t
  misc_feature (903)..(907): n is a, c, g, or t
  misc_feature (922)..(926): n is a, c, g, or t
  misc_feature (928)..(932): n is a, c, g, or t
  misc_feature (980)..(984): n is a, c, g, or t
  misc_feature (998)..(1002): n is a, c, g, or t
  misc_feature (1038)..(1042): n is a, c, g, or t
  misc_feature (1063)..(1067): n is a, c, g, or t
  misc_feature (1164)..(1168): n is a, c, g, or t
ccacgcgtccgcaactcccaagtctcgccaataaaacgttatattccaacctctctctctcatcccctgctattcttcttcatcactcttctcttctctcttctcccctataataatataataatattaccaacacaacacaacactcacaaaaacagcagacaagtagccagaacaagaaatcctttgacacattaatcactttctttaaggaaactaattaacatgggaggaaggggtcacatggggtggttcctcttctgttgttgttcttcttctctcctttttttttgttgcttcttcttcttctgtgtcacccagaagaaacttgcccatcatagcctttgaggatggctacacacccttgtttggtgaccataatttggccatccatagagatggcaaatcagttcacctttcacttgatgaaagaacaggttctggatttgtgtctcatgacctttaccttcacgggtatttcagtgcctcgatcaagttgcctgccgattacactgctggagttgtggtcgcattttatatgtcaaatggtgacatgttccagaacaaccatgatgagatagactttgagtttttggggaacattagaggcaaagactggaggattcagaccaatgtttatggcaatggaagcaccagcattggtagagaggaaagatatggcttatggtttgatcctgctgaggatttccatcagtgcagggttctttggacagattctaagatcatatnttatgtggatgatngtcctattagggagaatcccacatgccatatttggttattacattttccttgttatggtaaaactagtttcttcaactgttctattattgccttttatactctaacaatcccttgctttgatggagtggtttgatggcnnnnngttactagaattgtnnnnncnnnnngttcaaaagattctctggttttcttttaccgtttactacatccacagnnnnnaaatcaaaaccagnnnnngcctgtaatgcattgattacttgctgatagtgaatnnnnnccagatatgaaatggcctaannnnnctaagttgtgtatatccttatggagaggaacccacatgatgaaattttggtggggtgtgtgacccacaagatgaattgttagttgttggagaactannnnngtctacctaatttcatgaattagcaatcaatattcattccttagttactatagctaccatacctagtgggtctcatgcgtcccttgcatataggagataggaagagattatgctgaatttccttttatgtcccaccttgtcacttagta

SEQ ID NO: 3505 - DNA, 1539 bp, Glycine max
ttctttaatggttatgttcttcaaagttgaaaagctccttgcgctctctctctctctccaccaaattgcattgcagctaaatttcgcagaactatccttctctctctctctcatccacgccccaaatcttagggttttcaccaaataaaacaaccccaattcctcgaactcttcgattcgattacccaaccccacacgctgattccacatcctccatgagatttggttgattggatcgtacgatggcggcgccgaggaatgtgacggcgacgagggacgaagagaagggcgaggacgatgattcgccctccgcgaagaagcccaaatcggagaggttcccgctgaacacgtgggaattcgccgtcgccgtcgccgtcttcttggtgttctccaccggcctcttctgcatttacctcaccatgccctcggccgcttacaccaacctcaaactcccccgcaccctctccgatcttcgcctcctcaaggaacatctttcgacgtatgcgagtaaccaccctgcgcagttcattcttgggtactgctccacctacatcttcatgcaaactttcatgattcctgggacaatcttcatgtccctcttggctggggcgctttttggagttgtacgaggaatcctattggttgttttcaacgccactgcgggtgcatcttcctgtttctttttgtctaagttaattgggaggcctttggtttcttggttgtggcctgaaaagctaaggttcttccaagctgagattgcgaagcgtagggataggctgctgaattacatgctttttctgaggataaccccgacattgccgaatctgttcatcaatttggcgtctcccatcgttgatgttcccttccatatattcttttcggcgacattgattgggctcgttccagcctcttatattactgtcagagctggccttgctcttggggatctaaagtcaattaaggatctatatgattttaagaccttatcagtacttttcctcattggttttgtttccatagctccaacacttttgaagcggaagcgagtatatgaatgaaggtttcctggctcagcttgcacaatcaagtttgtcaaaaggcaagttacgtgatctaattagatgatgaagacagtggatcagagaagataatatttaagaaagatatccatgaaaaaggaatgtattgttattaacttaaacagtggcatatgctccattttattttctgtggtggagcctaagtttttttgtttcccttttcattttttgatcgtgtggagagagtaaggttagacttagctgattggtgtacaatcaattcagctaaggttacgaggctttgttggagcattaaattatgtattggccttgatgtcatcaggaagattgtggtgattgtttagcggtgctgtatgtatgtgcttcgcaccaaataggatctgactttttaccctgtagtattgctttattcaattataagatattatcgtagaaaatttcaagtattacacttagttacaaaaaaaaaaaaaaaaaa

SEQ ID NO: 3506 - DNA, 1704 bp, Glycine max
gtttcattatgcgcgccatctagtctctctctacaatttcgattcttttcttccatatcttgaatgctccacgcattcattattcttcctctcctttacaccctttcgcctcttaacttttcgcttcagccttggattcattcattctcttccctctcttctttattttttaatataaactttactttcatagttttcatttttcttcaagggaagcaaaggccgcaaaacaaaacaacaaccaccaccacaaacaccgggggtgtacggaaaatcaaatcaaaccaattcaattcaattccccccacccctccaaaaaaaaaaaaaaacaaacaccgaaacccataatcgttaaaattagggcttcggtttggtgtttttagtccttttgatgggcaacatctcaagcggcggcaatccccgtcgccgacacagcggagcttcacggcggagccacccgccgccgccgccgcccgttacgccgcagcctgagatcgcggcgaatccattcgtgtaccatggtgctgctgcaccgtacccgaaccctcctctgcattaccctcagtaccattaccccggttactaccctccggtgccacccatgccttatcatcctcatcaacatcaacatcatcatcgacacatggacccggcgtggattcaggggcatttccctagtgggcccatgatgcctaaccctgcacctttcgtagagcatcagaaagccgttacaataaagaacgatgtcaacatcaggaaagagacccttaagcttgaacccgacgtagaaaattctggccacttccttgtttcgttttccttcgatgccaccgtttctggcagcatcaccatatatttctttgcaaaagaaggtgaaggctgcatcctcacaccaatgaaggaaaaccaacttgcaccagtgtctgtgcatttcgagcaaggccttggccagaagtttagacaggcagctggaactggtattgatttttcagtgtttgaagagtctgagttattgaaagtgggtgaaaaggatgtctaccctctagcagtaaaggcagacgcatcccctggtaatcatgatgagtcagatagatctccaacatctagtaacacaaactctcagattacgcaaacgatgtttgagaaggagaaaggagagttccgggtgaaagttgtcaagcagatcttgtgggtgaatggaatgaggtatgagctgcaggagatatatggtattagaaattcaacggagaatgaccaaggaaaatgtgttatttgcttgtcagagccccgagatacaattgtccttccctgccggcatatgtgtatgtgtagcggatgtgcaaaggattctaggttccagacagatagatgctcaatttgcagacaaccagttgagaggctgttggagatataggtagggtctgaggagtgaggaagatacactgttaactcctcaagctttatgtacagcccaactgttatacttcaacatttctccgtgtcttcttttcatggtgtcaccttacttttctgtattttccaataatcagaaaaacaaaagaaaatgtaatttatataggacttgcgtttcaacatgaacgacaggctggcattgcacataatttgtacaagacaatgcctccaattagcttgtttgtctgtgcttataaatggcttccattctatatgattaaaaaaaaaaaa

SEQ ID NO: 3507 - DNA, 2542 bp, Glycine max
ggatttgtgcacttgctgatagatgtgatcagaagggactgagtgtcaatgagcgtcttggcagaatggctgaaacactagaaaagatgatggaatcatgtacacaaaaggatacccaacaaatggcgggaagtaccgatgttgcaaaagtgtcaaattctagtatgactgaagaatctgatgttccttccccctaccttgcggcccccccccccagaggctcagaggcacatgcttgactgtttccctgaagccgacaattctgtttttatggatgacctaaaaggattaccacttatgtcatgtaaaactcgttttggtccaaagtctgaccaaggtatgacaacatcatctgcagggagcatgactcccaggtctccgttgatgacaccacggacaagtcagattgacttgctcttggcagggaagggtgcttattctgaacatgatgatctgccgcagatgaatgaacttgctgacatagcgcgctgtgtggcaaatgctcctttggacgatgatcgcacgacgtcatatttattatcttgtcttgatgatttgcgggttgttgtagatagaaggaaatttgatgcacttactgtggagacctttggaacacgtattgagaagctgattcgagagaagtatctgcagctcactgagatggtggatgttgaaaagatagatacagagagcactgttgatgatgatatcttggaagatgatgtggttcgcagcttgagaacaagcccaatccattcttcaagggatcgcacctctattgatgactttgagattataaaacctatcagtcgtggggcatttggaagggttttcttggctaaaaagagaacaactggtgatctttttgcaataaaggttctcaagaaggcagatatgatccgtaagaatgctgtggaaagtatattagcagaacgtgatatcttaattacagtacgcaacccttttgtggttcgattcttctattcttttacatgtcgcgagaacttatatcttgtcatggaatatcttaatggaggtgacctgtattcattattaaggaatttaggttgcttagatgaggaagtcgcccgtgtatatattgctgaagtggtgcttgcattagagtatttgcattcactgcgtgtggttcatcgtgacttgaagcccgacaatttattgatagcacatgatggtcacatcaagttaacagactttgggctttctaaagttggtctcatcaacagcacagatgatctgtctggtccagcagtgaatgggacatcactacttgaagaagatgaaactgatgtatttacatccgcggatcaaagggaaaggagggagaaacgttctgcagtgggcacacctgattacttagccccagagatacttttgggaactggacatgggtttactgccgattggtggtctgttggggtcattttatttgagttgcttgttggtattccacccttcaatgcagagcaccctcagattatatttgataatattcttaatcgtaagataccttggccagcagttcctgaagagatgagtcctgaagcactggatcttattgatcgattattgacagaagatcctaatcaaagactaggatccaaaggggcatcagaggtaaagcaacatgttttcttcaaggatataaactgggacacacttgccaggcagaaagctgcatttgttcctgcttctgagagtgctctagataccagttacttcactagtcgctactcatggaatacttctgatggttttgtatatccagcaagtgatgttgaggattctagtgatgctgatagcttaagtggcagcagtagttgtttgagcaatcgacaagatgaagtgggagatgaatgtgggggtcttaccgagtttgattctggcacatctgtcaattactcttttagtaatttctcctttaagaatctctcccagcttgcatcaatcaactatgatctcaccaagggatggaaagatgacccggcaacgaactctagtgcatagctgtatttattatcctgtgtcaaagttcagaatttggttttcgacctatgatccaagcaattttgggggcataaacacctttgtcatttgtataccttgtacatatttagaggttcaaagtggttcaggatgtactctttgcttgttagtttacagggcaacaatggggggtttcaatcttacggttattggtattcacaattgtgtatgaattgagaattgtaaatttaaaaaatgcagatcacagttgctcacattattctgtggtgtgctctttattggcaatgagaacacatccctttttgttcaggccactgtaatattatttacttacagaattgagatgctgctgtgaagtcttttctgaactccccttcaagcattttcgagactttttttaacaccttgcgtccttaatgatcactaaacgatgtataagctgatgtcattgacttgttccccgtgagtcctattggttttattaactttgctaaggaaatgttggttttgttaactt

SEQ ID NO: 3508 - DNA, 1181 bp, Glycine max
cggtcccctgttcccgcctcggcccgcgcgtccgggttctctcactttctgggtgcagcattttttttctgtttctccgagattccatcgcaaagagtcaagaatgtctaaagaagttattgctactcaatcacctgctccttttgagtatgagatcttggatagcgatgctgaagtccttagaactgttagagcctcatcgaatcacacgaatccatggattgaacctggaaggttgaaacttagacacagaattggccgaggcccctttggtgatgtctggttagcaactcatcatcagtcaactgaagattatgacgagtaccatgaagttgctgctaagatgttgcatccaatcaaagaggatcatgtgaagattgtattagagaagttcaatgaattgtattttaagtgccaaggagttgctagcgtttcctggctacatggaatttcagtcttaaatgggaggatatgcatcattatgaatttgtgtgagggttcaattggtgacaagatggcaggactcaaagaaggaaggatttcattgaatgatgtcttaaggtatggaatcaatctagctcaaggtgttcaggaacttcactctaaaggcagcttcatcctgaaccttaaaccttttaatgttcttctcaatgataatgatcaagcaattttgggagatgttggtattcctagccttttgcttggctcatcattcctgagctcagacatggctaagaggcttggaactccaaattacatggctccagagcaatgggaaccagaggtcagaggtcctatatcctttgaaacagattcttggggatttgggtgcaccattgtcgaaatgttgactggtaaccaaccttggtatggatgtcctgttcgcagaatataccagtcagttgttgaaaaacatgaaaaaccaaatattccaagtggccttccttcttcagttgagaatatcctcagtggatgctttgagtatgatttgaggaatcgcccgttaatggtagatattctgagtgtctttcaaaggtttgtaaatatttatatatttatttattttttaaaaattctcttgaaaatttctgtggctgtgtaagcttttgcttagtttcaaaaagttgtaattatcttgggtccggcatattttatttagttgcattcatttagtgaggctt

SEQ ID NO: 3509 - DNA, 772 bp, Glycine max
attgatttgatacctttttaggctgagcttgtgagaaagaagcttaagggagaaatgaccgaatgctattcacttctaaatcttcgatttccatcgtttcccgtcattgatttcggcgcaaaaatcttccccaaacgtttccccaaatccatttcattctcacacccttcatcgaagtttcaactttgtggaatttcccgagctatggaagtggtcgaaggaagtgaagagagtaaagggtcgtcatcccctctaatgaagctcttgttcgtggaaatgggtgtcggctacgatcaacatggacaggacataacggttgcagcaatgagggcttgcagggatgcaatctcttctaattcaatccctgctttccgcagaggttccattcctggtgtcagttttgatcagatgaaattgcagattaaactaggggttcctcattccctccagaattccttggatattgagaaagtgaagtcagtatttccctatggagaaattttgaatgttgaagttgtggatggtggtttgatatgctcaagtggggtacttgtagaagagatgggtgacaagaatgatgattgttacattgtgaatgctgctgtttatgtgggctattaactttcaggttttgcagagctttgctctgtttgttctcgtgttaatggatgattactacatgtttgtgctgtgtaataacataataacaaagttgtacattactacatttctctaaattctgttcttgctcggtcatttttgggttttaaag

SEQ ID NO: 3510 - DNA, 935 bp, Glycine max
accgcacaacaacaatccttccttcttccttctaattcttttcctttctcttctcacttctcacacaccacatatcttctttttttttttctttcccctcaaaatcaaaatcaatggaaggatcaggatccggtgtggttacagtgtacggcaacggtgcaatcaccgagaccaagaagtcccccttctccgttaaagtgggcctggcccagatgctccgcggcggcgtcatcatggacgtcgtcaacgcggaacaggcccgcatcgcggaggaggccggtgcctgcgcggtcatggcccttgagcgtgtccccgccgacatccgtgcccagggcggcgtggcccgcatgagcgacccgcagctcatcaaggacatcaagcgggccgtcaccatccccgtcatggccaaggcccgcatcggccacttcgtcgaggcccagatcctcgaggccatcggcatcgactacgtcgacgagagcgaggtcctcaccctcgccgacgacgccaaccacatcaacaaacacaacttccgcatccccttcgtctgtggctgccgcaacctcggcgaggccctccgccgtatccgcgagggcgccgccatgatccgcaccaagggcgaggccggcaccggcaacatcatcgaggccgttcgccacgtgcgttccgtcatgagcgacattagggttctccgcaacatggacgacgacgaggtcttcaccttcgccaagagcatcgctgcgccctacgacctcgtcatgcagaccaaacagctcggccgcctccccgtcgtccacttcgccgccggcggagtcgccacccccgccgacgccgcgctcatgatgcagctcggatgcgacggggttttccccgggcccgggggctttaagagggggaaccccccaaaccggggaggggacattgttcagggcgtggcc

SEQ ID NO: 3511 - DNA, 653 bp, Glycine max
ctttgttatgaaacacgaacacaaattttatcgttgggaacataccatttcgtgtgtaggggtccaacaattttacaataaaacaatttttcaccaaaacagggtagtattatgttcttgaagaaaatagatgatacagataatcctgttgggctagccatggctcgttatatattgtagtgtatattcactatgtgaaaattaaataatagatctgtctatagcgctgttcagtcgctaaagggaggcaaaacatctatacattaacaaaattgagatcgaaaacagcaaagctgtaaattttcagcatttatagttcatcttaagacaacattcaatttgctctgcacctgttctcttactttccactgcagatcgtttatttcctcatcagtgagagaacgttccatagacctatatgcaatcctatagcagtggctggtcattcctttcttgttggtgaagttgtctattaattgcacctcctctacaagatccccggctattcctttctaacaacttcacacagattgttttcagcaaatccctcactgatccagaaactcatcgtccttgtaacaaggaggatactttgaaaatggcttaaatttgactcccaactgacccttggaaaactgtatataaaatcaaaa

SEQ ID NO: 3512 - DNA, 1651 bp, Glycine max
gagaaagataacaatgagttgatgagggagtagaagaatgcgtgggtggttttgattggaaggggtgaaggctggcccaatgggagagatatgagtcctacttaaggcttctctcaccgcacaacaacaatcccttccttctcttctcacacaacaaacatatctcttcctcttctgtccctcaatggaaggatcaggatccggtgtggttacagtctacggcaacggcgccatcaccgagaccaagaagtcccccttctccgtcaaagtcggcctagcccagatgctccgcggcggcgtcatcatggacgtcgtcgacgccgagcaggcccgcatcgcggaggaggccggtgcctgcgcggtgatggccctggagcgtgtccccgccgacatccgggcccagggcggcgtggcccgcatgagcgatccgcagctcatcaaggatatcaagcgggccgtcacgatccccgtgatggccaaggcccgcatcggccacttcgtcgaagcccagatcctcgaagccatcggcatcgactacgtcgacgagagcgaggtcctcaccctcgccgacgacgccaaccacatcaacaaacacaacttccgcatccccttcgtctgtggctgccgcaacctcggcgaggccctccgccgcatccgcgagggcgccgccatgatccgcaccaagggcgaggccggcaccggcaacatcatcgaggccgttcgccacgtccgctccgtcatgagcgacattagggttctccgcaacatggacgacgacgaggtcttcaccttcgccaagaacatcgctgcgccttatgacctcgtcatgcagaccaagcagcttggccgcctccccgttgtccacttcgccgccggcggagtcgccacccccgccgacgccgcgctcatgatgcagctcggctgcgacggcgtcttcgtcggctccggcgttttcaagagcggcgatcccgcgaagcgcgccagggcgattgttcaggccgtgactcactacagcgaccctgagattttggcggaggttagctgcggattgggtgaagccatggttggtatcaatttgaccgatgacaaggttgagaggttcgccaatcgctctgaatgaaatgaataataattctcagatttgtttctctgtggcgcttcaatttggactattaagggttttagttgcttcttatatattataataaggttatgtttttagttttcggtgttttgaaccgtgttaattggattttagaaaaaccaaaaagaaaaaatagataggtagctatttgggcatgccttgtaatatgcctatacttgtttttacatattcagcgtcgtggtattgtgttgagttagtagtgcgttcgtggtaaacgagaatcgaatcattcttgtttttggatattcaatcctatttttgggtttaattttttttattggattcaaagtctgttgctttcagcttctcgttctagtttttgcattagttgaacgagttcgattcgaaattggcaatttttatgtccgctgaagtgaaaattggatgctgaaaaggaaggttactgttctgtgtatctgaatatcaattgtaactcaattcactttatttgtaatttttgctcatccttctgttaaaaaaaaaaaa

SEQ ID NO: 3513 - DNA, 1808 bp, Glycine max
gaaaacacaaacaaaagatttattgttggagaacataccatttcgtgtgtcggggtccagaaattttacaataaaatatttttttccccaaaacaggacagtagataatacagataatcctgttggactagccatggctcgttatgtattgtagggtatattcactatgtgaaaattaaataatacatctgtctatagcgctgttcagtcgctaaagggaggcaaaacatctatacattaacaaaaatgagattgaacacagcaaagctgtaaattttcaacatttatagctcatcttaagacaacattcaatttgctctgcacctgttctcttactttccactgcagatcgtttatttcctcatcagtgagtgaacgttccatagacctatatgcaatcctatagcagtggctggtcattcctttcttgttggtgaaattgtctattaattgcacctcctcgacaagatccccggctattcctctaacaacttcacacagattgttttcggtgaatgattcattgatccagaaactcatgtccttgtaacaaggaggatactttgaaaatggcttaaatttgactcccaactgacccttggaaaactgagaggtaaatcgctcatcatttgaccaaaagagacgaatatcaggtatgtcaaatagaaccatagctaacctctccaaccctaggccaaaagcccaagcaacattattaggtttcccatttctcttcagaatctcttgctctgtcactccacaccccaaaacttccaaccacttttccttgaaatatatttcaagttcaaacgatggattagtaaatgggaaataagtatccacccagcgcatttccacagcaccaaataaatgacgtgctagaccctcaaggcattgctttaagtctgttgctgcaaataatgtggcatccattccagatgcctcccattcttccggaacaaaaacccgaaagccttccatttgatggaagacaggataatgagttgaatcaattgaatccctacggtaaacatctccagtaacaaggaaatgggtgtattcacttctcaataattctgcctgatgagcacttgtgtggcacctcaaaacagtctgagggtctatgtagtaagtatcattatagctcctacttacatggtcttcaggaaccaagacatcatcaaaattctgcttcactgaaacaataggacaaagatcatcaaacttgttgaacttatttgaataatgtgtgtcaaaatactcataaattgcattcttcagtatcccaagagggtgttgatccctcctgtgaagatgcactccaagttttgaaaatatattgtctggcacattatttgttggatcatccctcaccacatcttctctgcttatgttgactccgccaagatccaatactgacaacactggctgcctccatttcttccgtgaaaaattgtgagtggagacagaagcagctgaagatgagaaaggtaaacacgacctaaagcttcttaggccactactttggcaaaagaaagaggccctggcaaatagtgtggcatgaacagaagagatcgccattgccatgcacccgagtagagaatcttaaccagctatatctgatgcactagacagaagacagaaacagattgcacaaggcaactctactcttgataagctcttatcctacagaatccggtgtctcaagttggaaatatggttgttgttgttgttgtgctaagtgtgtagagtagctagctcaagcctcaagctactatcggggggggggggggggcctacgtagctga

SEQ ID NO: 3514 - DNA, 1394 bp, Glycine max
aaaaaattgtttatatatcttcagctatgtaggccccccccccgctccgacaacagaggtgaaacaaaccaactacccacctatggcggcctctgttgtagtgtctacctctctgtctgtgtgtttcaactatggctatcatcgtcgtccatccatttccgctctctcttgtcattcgaattccatcaccaaaacaaacctaaaactcagttcgcaatgtttctccaactcgaattcggtagccccgatttattgccgcaagtttgttgctcgcacttcaattggagaaaacgagagcgagagcgagaaggagttagggttcgtgggggaggactctgcggtgtttgaattgggcaaacagaaagtatcttcgtggatttatttcaccgctattttgggagtcgttctctatgttcttaacgtcgcatggattgataattcaactggctacggcaaagcttttattgacgccgtttcaacgctttccgattctagcgaggtggtaatgttgatcctaattctcatatttgctggtgtccatagtggcttagctagcttccggaacactggtgagaaactcattggagaaagacctttccgtgtactttttgcagggatatcactacctttggctgtcagtactgttgtgtattttattaaccacagatatgatggacttcaactctggcagctccaggatgcccctgggcttcatcaacttctgtggctttcaaatttcatttctttctttttcctatatccttcaactttcaatcttttagaggttgcagctgttgacaagcctaaattgcatctatgggaaactgggatcataagaataaccaggcatccacagatggttgggcaggttatctggtgtcttgctcatacgatttggatcggaaattccgtggctgttgcagcttcaattggcttgattgcacatcatctatttggtgtctggaatggagacaggcgactggccataagatatggggaggattttgaattagttaagagtcgaacaagtgttgtcccttttgcagcaatcctcgatggccgacaagagttaccaaaagatttctacaaggagtttattcgactgccatacttgacagttactgcaataacgttaggtgcttactttgcacacccgcttatgcaggctgctagtttcaaccttcattggtaggttgaacacaacacatcctgtctcttttctgtaaaatctactgtttgtccatagacagagatgaagagattaaagaaaagaaaataatagaaagcaataaaagaaatgaattgaaaaactgatattaccatgcacatccaaaacaacagctgcaactttatgacgcccacacattaaattctttcaatatacgaatgttctc

SEQ ID NO: 3515 - DNA, 1047 bp, Glycine max
  misc_feature (932)..(932): n is a, c, g, or t
cccctgtattattcttgcttgcaattagcacattttttactaatttttataattaaagatttaactcttattataactcaccaattttgaatgttcagcataatttatccgactaattaacaagagacataatttatccatactcttattataaactctctctcacattattcttgattatgatgatggtatattgatttctaaagtgagtgggagagaatagagtatatactgggaatatgccttatggcacattacatggttggatccaagcataactaaccaagacagtcgattccaaatcctaatcaatctggttccagtttgagttgcgattatggcaaaccaggcagtgtattcggtgtgggcgattccaccggaagacgtgggcgccagatgcgctaacctcatgaccaccctccgatccgagttcggcgggccccacttccacccccacatcaccgtcgtcggagccatcaaactcaccccggaagacgccgtgaccaagctccgatcggcgtgccaagccctgaggcccttccacgtcaccgtggaccgcgtggccgccggcagcttcttctaccagtgcgtgtatctcctcctccgccccgaccctcacctcctcgaaaccagcgcacactgctgcacccacttcggttacaccaattccactccttacatgccacacttgagtcttctatacggagatttgagcgatgaagagaagcggaaggcgcaagagagggctaatgctatcgatgacacgctcggtggcttgacctttcagattacgcgccttgccttatacaaaacggacactgaagacaaaacgctcaaatcttgggagaaaattgctgaatgcactctcactccaaattagtaacttcttaacttcaatattagcaaaatccacaactctgatttaagttttntggttttctacactctctagctgtcttcttagtctttctgagtgctactgctatgtgcttactgcttaccaatttccaaactctatatataataatgtcaaataataaggcacca

SEQ ID NO: 3516 - DNA, 1637 bp, Glycine max
acattcacatgcaaatgcaatgtatgtatgtatatttattgttggccacctattttgccggccccggtccggttctctcatacggcgtcgttttcgggtgtgcgactattgtctcttctcttcccttcgtcggttaccataattctctctctctttcttcttctccctcttcttcacactgagttgactgagtcttcgtaactcgctctctactctctctgctactcatcgcattctctgcatttctcctccgatcacattttctctctcttcgtttgactatagctgacaaggatgtcggagaaagctcttagggatctcaatacaattcttggtactgaaaggaagaatgaggactccagtaaggcatgtttatccaagccttctgttgataatgctgatgaaaatattgaagaatggcaaaagaaaaagaacagttcctccttggtttctccagctgttaatggaaatcaggctgtgactgctaattccagtgcagaggttgtaaatgcagaagtagaatatattgaatctgagaacttgaatgatgtagacgatgctgatacttgtctcaagactctcttggctggacttgactcaaaggattgggtcctggtttgtgacacactgaataacgtacgtcgattgtctatatttcataaggaagcaatgcttgatgtgctgggggatgtgatcacatctattgcaaagtccctgaaaagtcctagaagtgctgtttgcaaaactgccattatgacatctgcagacattttcagtgcatataatgatcgtatactagattcattggaccctctcctagtacaacttcttctcaaggcttcacaagacaaacgctttgtatgtgaggcagctgaaaaagccttgatagcaatgactacttggatttcccctatttctttattgccaaaattgcaaccatgccttaagaataagaatcctcgtatccgtgcaaaggcatcaatgtgcttttctcgaagtgtttcacgactgggggaagaaggcataaagacatatgggattgacaaattgatccaagtagctgcatctcagttgagtgaccagctccctgagtccagggaagcagcccgaactctacttcttgagcttcaaaatgtgtatgagaaatcttctcatgatctcatgccagctactcctgtcaatagtgatcataataatgtcaatggtgattctgtgaatgaggattcagaggtgagatcttgggaaagcttctgtcagtcaaagctttctccactaagtgctcaagctgtacttcgtgtgaccagtatcgctcgggagggtcttgtttcataacacgcacatttttacttcacttagcggacttcatcgtttcctggtttgcttatcattttcttctgtaaatacagttcgacaattgagcccaagatttataatgtgtattctattattttccccctatttgtggttacctacattacttttgattaatactactactagataaatggaccgtgcatcgcactggaaaaattatgagtataatctttggtcttgtaactgtatttggatgattatggttacactaagtccatttttaatgaaaaatagtaaattaaaaattaaaaaaaaaaaaaaaa

SEQ ID NO: 3517 - DNA, 818 bp, Glycine max
  misc_feature (747)..(747): n is a, c, g, or t
  misc_feature (776)..(776): n is a, c, g, or t
  misc_feature (794)..(794): n is a, c, g, or t
cccacgcgtccgacggctgcgagaagacgacagaagggggcacttcaattgcaatcaaattagttcattctctttgcgcagttccctacctctcctttcaaggttcgtagatttcttctgtttttttttcttcttctttattgtttgttctacatcagcatgatgttgatttgattgtgttttctatcgtttcatcgattataaattttcataatcagaagattcagcttttattaatgcaagaacgtccttaattgatgattttataaccgtaaattaggtctaattagagtttttttcataaagattttcagatccgtttacaacaagccttaattgttgattctgtagtcgtagattaaggtttttttcatgaactacttcagatccgttaaacaacagccttatttgttgatacttcagtcgtttttcaagaaattgttcagatccgttgataaaagccttattcgttgattctgtatggtatttcaagagatattgctcaggtcctttagcaactaccttatttgttgattctgtggccatagattaggattttttttcacgaaattgcttcttgaaattacgtgatggattatgattctgatttatcttgtgattgttgactctacagatgcagatcttcgtcaagaccctcaccggaaagaccatcacccttgaggtggaaagctctgacaccatcgacaacgtcaaggccaagatccaggacaaggaaggaattccccncggatcagcaacgtctcatcttcgccggnaagcagctcgaggacggncgtaccctcgccgactacaacatc

SEQ ID NO: 3518 - DNA, 1327 bp, Glycine max
tcgacggctgcgagaggacccccgaagggagaggaacttaatggtaccagagtagagtagtgcggaagaaaagaaaaacgaaatccctcgctttgagaaatgggtgtattactcttccggtgggttctgccactgactctgttgctcacttgcgcgttaggtttccaatcggacgagcttctcctcgacgaccaagagttcggcatcgagggaggacgagcctccttcgattccgattcgcacccatctcccacctccaccttgaggaagagcttttctgactcctcctccgactccaagatccacttccctctccaacacgctttcggcgactccgatttctccgacgccggcaacttctccgctcgccttaagacttggagccacggcgcccagacgctgacgaagctgcggtttaagcgcgatcctttgactgacgttgagcagaagaagtttcaagagctgttgcaaggagatgatttctatacgattagattgccgtccaatgttttgagccctcccggccgggaatatattatttcttccgtgaaagcacgatgtcttccaggggatggattggaggagcattttgtaatacaaatggaaggtgttaacgtcttggctgtcagttatggtgccccaggggcttgcccttatcctcggcatctcaagcttcctgcaaagtggtctttcaagtcacacacagttctaaagagcagtgaacaggcaccgagagctccaatatttgctgaagaggcacttggcgggcaggagggagatggtgaggctgtacagccaatagaaaggtccttttgggctaaatactggatctacctgatccctcttggactcatagtaatgaatgccgtcactcaagctatgaatatgcctgaggaacaagctggcgggcaacctggtgctccaatacagcagcagccaggatctgcagtacagcgtggaccaagttctggtggtgtgcgtagaagatgataagtttgcttcctctacctcgcaagacattatttgagggcattggtaatcaatgtaatcttaggttgaccttttatgtagcattatttaataatcttaattgcatattagtagctctgtgcccatatgaaaagagattttaaaccgatttgcttgtaaactttgaaacagcgataagttttccagttagattgactaatgttatatattgaaaattaaattttgacccgaatattttgatttcctctgaaaaaaaaaaaaaaaaaaaaaaaaaaaaaaaaaaaaaaaaaaaaaaaaaaaaaaaaaaaaaaaaaaaaaaaaaaaaaaaaaaaaaaaa

SEQ ID NO: 3519 - DNA, 1365 bp, Glycine max
  misc_feature (15)..(15): n is a, c, g, or t
  misc_feature (1308)..(1308): n is a, c, g, or t
gcatgccacgccgcnaccgtaagcctccggtcttcgcgccaaagaaaagaaaaaacgaaatcaactattgacagcgggaataacatattaacatcaacaggcctcgctttgagaaatcagacggcggagagaatgggtttatcactcttacggtgggttctgccgctgactctgttgctcacctgcgccctaggtttccaatcggacgagcttctcctcgacgacgaagagttcggcatcgaaggaggacgaacctcctttgattccgattcgcatccaccttccaccgcctccacctcgaggaagaggctttccgactcctcctccgattccaagatccagttccctctccaacacgctttcggcgactccgatttctccgacgccggcaacttctccgctcgcctcaagacttggagccacggcgcccagacgctgacgaagctgcggtttaagcgtgatcttttgactgacgttgagcagaggaaatttaaagagctgttgcgagaagatgatttctataggattagactgccgtccaatgttttgagtcctcccggccgggaatatattatttcttcagtcaacgcacgaggtcttccaggggatggattggaggagcattttgtaatacaaatggaaggtgttaacatcttggctgtcagttatggtgccccaggggcttgcccttatccccgacaactgaagcttcctggaaagtggtctttcaagtcacacacagttctaaaaagcagtgaacaggcaccaagagctccaatatttactgaagaggcacttggcgggctggagggagacggtgaggctgtacagccaatagaaaggtccttttgggctaaatactggatgtacctgatcccgcttggactcatagtaatgaatgctgttactcaagctatgaatatgcccgaggaacaagctggcggacaacctggtgctccggcacagcagcaaccaggatctgcagtacagcgtggaccaagttctggtggtgtgcgtagaagatgataagttagcttcctctaccgcagaaggcattatttgagggcgttggtaatcaatgaaatcttaggttgaccttttagtagcagtatttgataattttaatttcatattaatagctctgtgcccaaatgaaaagaaattttaaactgaattgcttgtaaactttgaaacagcggtaagttttccggttagattgattaatgttattaatgttatatattgaaattttgacacgaatattattttggtttcctctgatattgcatgatgtttctactattatcnatgtgaagatcagaggatccgcgaataaaaaaaaacattacagcttaattaaaaaaa

SEQ ID NO: 3520 - DNA, 1010 bp, Glycine max
  misc_feature (1009)..(1009): n is a, c, g, or t
ccacccttacattctctttttctctctctacactcaccaatggacgactctcacaacaggaagcgacttcgccaccactccccaaagcacccccgactttgttctaactcctccgacactcacccacttgactcgccccagtttcaactctcccgcgtcgacccggaccttctcaacatgctcaatgatgccgagaacgtcacggagcgtgaccctaccatgcagggtcttgactctgttattaagagtttcgaggaagaaatactttctccgcttccgaacccgaatctagcgtccgaagcagaggtgtttaatccgaacctagggtacttgttggaagcatccgacgacgagctagggttgccgccggcggtagcgcccggcgaggatgcgacaaatccccaaacacttgattcgggccgggttggatctgacggagtggatctgactgggttcctagggtttgaagatgatatcgtgaactgcggagggtttgggttaactggttacgatgatgtggaaggtgacggtggtggttatgtgacgatagatggattgtttgactatgcggaacccggtgccgatattctgtggcgatcggagtcgttgcaggcgatgtagttggttggaaagattaattaattaattaattaattaacatttggctaatgaaggtgtacaaagagatatctaggaattacgtcccacagataacataagtgggttaagattagatgtgaatttattttagttcttggctaaagacttgttctttaatattcttttagcaaaaatgttgtttaaatgggaatctagaaatggttaaaattaaaatccttgctgtccttagtgaaactggagaatgatctataatagaaccagattttcaatccgtttatgtttttctttttgttttattttttgtaacgatccctgtgagtttctgtcataaatttgttgaaatatatgacaccatttgatgcatatgaaactcttaaattttactaanc

SEQ ID NO: 3521 - DNA, 963 bp, Glycine max
  misc_feature (743)..(743): n is a, c, g, or t
  misc_feature (784)..(784): n is a, c, g, or t
  misc_feature (801)..(801): n is a, c, g, or t
agagtagaatgcggctttttctgctacgcacccgcctttttttatctgctgccgttaatgaattaaataaaggcctatctacaccactatatataccctccaccctttatttctccctccactctttatttctcgttttctctctctacactcctttcagcacagcacaacacaacacaaaaccctttcccaaaaaaataaaaaataaaaaatggaggaatccaaattcggccaaaccgacaagcgaaagcgagttcgcgacgagtcggactcggccctcaactcgcccgactcgttaaagcatccccgagccgagtctaactcgttcgagtctctccgagttgactcggacgagtttgaactcgcccggctcgacccggttcttctcaacatgctgaatgacgcggagaatgtggcggagcgtgaacccaccgtgcttgactctgttattaagagtttcgaagaagaaatactttctccggttccgaacccgaacctagcatccgaggcagatgtgtttaagccgaacctagggtacttattggaagcatccgacgacgagctagggttgccgccgacggtggcgccaagcgaggatgtgttgaaacccgaaacagttgattcggatcgtgttggaccagaaggaatggatctgactgggtttttggggtttgaagatgatattcgtagctacgaaggttttgggtttgtggggtatgatgtgggagataacggtggtgggnttatgtgacgatagatggggtttgttttgactatgcggaancccggtgcccgtttttntgtgggcggtcggagtcgttgctggcgtgatgtagttgcttggggagattaattaattaattaattaattaacgttttggctaatgaaggtgtataaagagccacagataacgtaggtgggttagatgtgaagttattctaagattctgaaaatttgttgtt

SEQ ID NO: 3522 - DNA, 1412 bp, Glycine max
ttcagctacgtaggcccccccccccataaccttctcttctctaagcactttactttttttttcagccatggagtttcattgccttccaatatttctttatctcaatttgatgttgatgacagccaatgctgcgttaactcctagacattactgggaaacgatgcttccaagaactcccttgccgaaagcaatcacagagctactaagccttgaaagtaggtccatatttgaatatgccgggaatgatgaccagtcagaaagtaggtccatattaggatacgctggctataatcaagacgaggatgatgtgagcaaacacaatatacaaatcttcaacaggttgtttttcttggaagaggacctgcgtgctggcaaaatattcaacatgaagttcgtcaacaacacaaaagccacagtcccgttgctaccgcgccaaatttcgaaacaaataccgttctcagaagataaaaagaagcaagtgttggcgatgcttggcgtggaagcgaactcaagcaacgccaagatcatagcggagaccattggtctttgccaagagcctgcaacggagggagaaaggaaacactgcgcgacttcgttggagtccatggttgatttcgtcgtttccgcgctcgggaagaacgttggtgctttctcaacagagaaagaaagggaaactgagtctggaaagtttgtagtggtgaaaaatggggtgaggaagttgggagatgataaggttattgcctgtcatccaatgagttacccttatgttgtgtttgggtgtcatctagtgccaaggagtagcgggtatttggtgcgcttgaagggagaagatggggttcgagtgaaagcagttgttgcgtgccacagagacacgtcaaagtgggaccataatcatggggcattcaaagtgctcaatcttaagcctgggaatggtacagtatgccatgtcttcactgaggggaatcttctttggcttccaaattagattaattaccatatacatatttgtccttgttctatccttaaataagtggaatcacctgaagaattgtgcgtaatgagttgtttgtctttgtggaaattgttatctgtcttgcatcaccaaataggtatatataaaataacaggagcgtggtatttgttgcacaaaaatggatttcaaccgatcaaaaaaatatagcctttaccaattagaagggtttggctttgttagcaaataataaaaataaaatatcttgatggataaatggttgctaagttgattaagattgtggcagaataccaagtcaatgaatagtccatcacaagcatcaaaagaaaagataatgattccttgaaaatagaaagcactttgtgctttgaattcaaaatgcacactgcagagttgttggaggttacaagccagatctaat

SEQ ID NO: 3523 - DNA, 1970 bp, Glycine max
cccacgcgtccggtgaaagccgcgccagtttttttttttttttttttcagagcagggtcccctgatatctatatattcgcgtgctacgtaggccccccccgtccagaactaactacactggccttttgttctcgtgtcaatttctaaatccaccaccacaccctctcttctattctctattattattatctccacacccttcactctctctcactcttctctcgaatcttccaccgcaatggccaccgctgccgagaaactctccgctctcaaatccgccgtcgccggattgaacgaaatcagtgagaatgagaagaacggattcatcagcctcgtcggccgctatctcagtggcgaagcgcagcatgtggaatggagcaagatccagacgcctacggacgaagtggttgtgccttacgacactttggcgccaactcctgaaggttcttcggaggtgaagaatctattggacaagcttgtggtgttgaagctaaatggaggcttgggaacaactatgggttgcactggtcctaaatctgtaattgaagttcgtgatgggttgacatttctagatttaattgtcatccaaattgagaatctcaattccaaatatggaagcaatgttcctttgcttttgatgaattcattcaacactcatgatgacactcaaaagattgttgaaaaataccaaaactcaaatattgagattcatacttttaaccagagccagtatcctcgattggttgttgaggactttttgccattgccttccaaagggcatactgacaaggatggatggtaccctcctggccatggtgatgtcttcccatcattattgaacagtggcaaacttgatgcactattgtcacagggtaaagagtatgtgtttgttgccaattcggataacttgggagctatagttgacttgaaaatcttgaatcatttgatccaaaatcttgaatcatttgatccagaacaagaatgaatactgtatggaggtgactcccaaaacattggctgatgtaaagggtggcactttgatttcttacgaaggaagggttcagctcctggaaattgcacaagtccccgatgaacatgtcaatgagttcaagtcaatagagaagttcaaaattttcaacacaaataatttgtgggtgaacttaaacgcagttaaaaggcttgttgaagctgatgctcttaagatggaaattattcccaatccaaaggaagttgacggaataaaagttcttcagctggaaactgcagctggtgctgcaataaggttctttgacaaggctattgggattaatgttcctcgatcacgattccttcctgtgaaggcaacttcagatttgcttcttgtccagtctgacctctacactttggaagacggatttgtcattcggaacaaagctagggaaaatcctgaaaacccttctattgaactgggaccagaatttaagaaggttagcaacttcttgggccgcttcaagtcaattcctagtatcgttgagcttgacagtctaaaagtggctggtgatgtatggtttggagctggtgttatcctcaaggggaaagtcagcattgtatcaaagcccggtgtaaagctggaagttcccgacggtgttgccattgtagacaaggaaattaatggcccagaggacctgtgaggaagacagatgactttaactaaagaatgaattgtatcagaccgtatcttatctatctatatggtctagtgtttttactactcccatgtttgataggtaaagaaaataagaagtctttttgttgagaggatgtcttggtgtggatctttactccattgtcttggaattctgtttagaacagcaaaaaaatgacaagtttggtgataagtttcatgtcatttggtacaatagcattgtgtccccctgtcgaacaaatcaaggcctaagaaaaaagaagtgttaaaatcaataatccatccg

SEQ ID NO: 3524 - DNA, 1979 bp, Glycine max
gctcgatcgctcggaagatggtcacagaaacaaggggcttacacatcacagcacaaaatttcttaccttacataccggttgcgtgaaagacgcgccactcatccttttccgattgggcgagaggcatcagatcagagcagggtcccctgatatctacatattctcattattctgtccagaaactaactacactgacgtttttgttctcgtgtcaatttctaaatccaccaccacaccctctcttctcttctcttctctccactcaacacaacgtaaccttcttcttctctcgaatcttccaccgcaatgaccaccgccaccgagaagctctccgctctcaaatccgccgtcgccggattgaacgaaatcagtgagagtgagaagaacggattcatcagcctcgtcagccgctatctcagtggcgaagcgcagcatgtggaatggagcaagatccagacgcctacggacgaagtggttgtgccttacgacactttggcgccaactcctgatggttcttcggacgtgaagaatctattggacaagcttgtggtgttgaagctaaatggaggcttgggcacaactatgggttgcactggtcctaaatctgtaattgaagttcgtgatgggttgacatttctagatttaattgtgatccagattgagaatctcaattccaaatatggaagcaatgttcctttgcttttgatgaattcattcaacactcatgatgacactcaaaagattgttgaaaaataccaaaactccaatattgagattcatacttttaaccagagccagtatcctcgattggttgctgaggactttttgccattgccttccaaagggcatactgacaaggatggatggtaccctcctggccatggagatgtctttccatcattattgaacagtggcaaacttgatgcactattgtcacagggtaaagagtatgtatttgttgccaattcagataacttgggagctatagttgacttgaaaatcttaaatcatttgatccagaacaagaatgaatactgtatggaggtgactcccaaaacattggctgatgtaaagggtggcactttgatttcttacgaaggaagggttcagcttttggaaattgcacaagtcccagatgaacatgtcaatgagttcaagtcaatagagaagttcaaaattttcaacacaaataatttgtgggtgaacttaaatgcagttaaaaggcttgttgaagctgatgctcttaagatggaaattattcccaatccaaaggaagttgatggaataaaagttcttcagctggaaactgcagctggtgctgcaataaggttctttgacaaggctattgggattaatgttcctcgatcacgattccttcctgtgaaggcaacttcagatttgcttcttgtccagtctgacctctacactttggaagatggatttgtcattcggaacaaagctagggcaaatcctgaaaacccttctattgaacttgggccagaatttaagaaggttagcaacttcttgggccgcttcaagtcaattcccagtattgttgagcttgacagtctaaaagtggctggcaatgtatggtttggagctggtgttatcctcaagggaaaaatcagtatcgtggccaatcctggtgttaagctggaagttcccgatggtgctgtcatttcggataaggaaattaatggcccagaggacctcctgtgaggaagcccgctgagtttagaagtatcagactgtatactatctttatggtctcatgttttttccaattattactactcccaagtttgatgggcaaagaaaataagtccctttttgtttgtcttctgattcgatttagaacaagagagacagagacatgagttcttccccattatgtcattttgtataatcacattttttttcattaccacaagtactaagaagtgatataattaaaatcaaaggatttaaaattacacttt

SEQ ID NO: 3525 - DNA, 2079 bp, Glycine max
gggtcgacccacgcgtccgccgtgttttcatcatcacacaagagcgagcgcaacattattcgagtacgtagcttaacaatattttaagcaattgctgctacaatgatagcgcggtttcctttgttgccgttgctgttgctgggaattgtttttctagcatcagtttctgtctcattacaggtgaagccgccgagtcaccacgagtgcctccagagttgcgagagtgaaacggatccatacaagcggaaagcatgcaagcttagttgcaagttcgttcctgagcacggggagcaacaacatgaagaagaagaaagagaaagagaacatccacaaccacacccaccacacgaggagagaggacgtagagaaagaggacgccaggaaggtgagaaggaggaaaaggaacaagacgagcgtgaattacaaccacgtccatttccacgaccagaggagcatgaaggagaacagtggaaaggaaggcatcgtcatgaagacccggaagagagggcgagaatgagactgagggaagcagaaagaatagagagggaaagggaggaacagagggtgagggaggaggaagagaaactccggcgacgtgagaagaaggaacaacgggaagagaaagaagaagaaggtcaaggttcggaagactcacactcaaaaagacagaacaacccttttcacttcagctctaacaggttccaaacgctcttcaagaaccaacatggtcaccttcgcgtcctccagagattcgaccaacgctccccacaacttgagaaccttcgagactaccgtgttgtagagctcatggctaaacccaacaccctctttctcccccaccacgctgacgctgattttctcctccttgtccttagcgggagagccttaattaacttggtgaaacccgacgacagagacccctactaccttgaccgtggttatgcacaaagaatccctgcaggaaccactgtctatttggttaacccggacaagaagaaagatctcagagtgattaaactcgccatacccgttaacaaacctggcaattttgaggatttcttcctatctagcactcaagaccagcaatcctacttgcaaggcttcagcgagaatattctggaggcttccttcaataccaaattcgaggagataaacagggttttgtttggtggagaggggaggcggcaccagcaagagggagtgattttggaactatcaaaggaacagattcgggaactgagcaagcgtgccaaatctagttcaaggagtactaattccttcgattatgaaccattctacttgagaggctcccaaatctcttccaacaactttggaaagttctatgagatcacccctgagaagaacccccagcttcgggactttgatatcctcctcaatactgtggatatcaacgagggaggtcttcttctgccacactacaattcaaaggccatagtgatactaatggttactgaaggagaagcaaacattgaactcgttggcctaaaagaacagcaacagggagaggaaacaagggaagtgcgaaagtatagagccgagttgtctgaagacgatatatttgtaatcccagcagcttatccatttgtggtcaacgctacctcaaacctcaatttcgttgcttttggtatcaatgctgagaacaaccagaggaacttccttgcaggttcgaaagacaatgtgataagacagatacaaaaacaggtgaaggagcttgcgttccctgctgggtctgcacaagatatcgagaatctaataaagaaccagagggaatcctattttgctgatgctcagcctttgcaaaaggaggaagggaagaaagggtcctttgtcttttgaatatgtatgcttaggagactaggagttcacagcgagcgaggaaagtatagggatatgtaactagaataacttgagatccacctttctactactagtaaataaaataaataaatcgagcaagatggttttgtttactatctgctaagcaattttgataaaaaaaaaaaaaaaaaaaaaaataaaaaaaaaaaaatatatgacgttaaactataaaaaatttaa

SEQ ID NO: 3526 - DNA, 1360 bp, Glycine max
tcagctacgtaggccccccccccccgggtaatgctttcggaacatgtgctgatttaactatacttcatattgccagcttggatacacaaaaaaacaagaagagagacatttccgaggagtgattacattagaggaatgcaatattgacgagatttctgatgatgatgaagcctccacaaagagttccaaggataaaaagtcaaatggacctgattctggaaaagcatcaaaccttattttcaagattacaagcaaggtcccttacaagactgttatgaaagctcaaagtgcagttttgttaaaggctgagagtatggcagataaggttgagtggatcaacaagttaagaagtgttgcacaggctaaaggaggtcaagccattggtgaacctagttttcctatgcgacaaagcctttctgatggttctcttgatacgatggccagaaaacctgcagatccagaagaggagctcagatggatgtctcaagaagtgcgtggttatgttgaagctgttcttaacagcctcgctgcaaatgttccaaaagcagttgttctttgccaagtagagaaagccaaagaagacatgctcaaccagctatacagttccatcagcgctcaaagctctgcaaaaattgaggagctgctccaggaagaccacgatgtcaagaacaaaagggagagagttcagaaacagtcttcccttctttcaaaactcactaggcagcttggtgtccatgacaacagagcgtctgcagcatccaattggtctgataaagggagtgcagcagaaagcagcccaggaagctctggaccctcatcagttgatgattggaggtctgcatttgattctgctgccaatggtccaagcgacttgccgtctaggtatggttctggtggtcatagtagacgatacagtgacccatcccaaaatggtgatgtgagctcaggctcaaattctaacagtcgtcggacgccgactcggttgccccctgctcccccgcattctggttcaagatattaaatgacgccacatatggttttaatcaaaattatgcattcttgtcggatgaacactttcagttttttctacttatatcgagactgtcccacctccttttagactttagtcggaatgttttagttttgtagataaggaaagtattgctatcacattcatcttcaggtcatacgcagtatgcgtccaattttattcccttactgggtatgtgggggcattgttaggtgagatgattttgcctgcccaacattctttttcctcttacaaatgtaattgttttgtatgcaatgtgattatcagcatttccagaaatccgcattaatcgcgactgccttttgtttt

SEQ ID NO: 3527 - DNA, 3290 bp, Glycine max
cgggcccccacgcgtcgagttatcgagggatgcaatgcaatgcaacgcaaaaaggaagaagaaagttgcaaatcgcaatcgcaatcgcaatcacagagagagtgcagttggtttggtacggtgatttaatttgagtttggttaagagtctcctcgtagtgtagtcttctcatttgcattgcaccgaagaatcaaatcaaatcggtggccgtaaacctaagttggttcagatccgatggaggcaatcgaagaattggttcagctctccgattccatgcgccaagccgccgccgtcctcgccgacgaagatgtcgacaactacaagcgcccttccactttcctcaatgtcgttgcgctcggcaatgttggtgctggaaaatctgcttccttgaatagcctcattggacatcctgttttgccaactggtgagaatggtgctaccagggctcccattagcattgaattgaatagagacacctctttaagcagcaagtcaatcatcctgcaaattgacaataaaactcaacatgtttctgcaagtgcccttcgacattctctacaggatagactaagcaaaggttcatctggtaggagccgtgatgaaatatatctcaaactacgtaccagtactgcgcctccattgaaattgattgacttgcctggattggaccagcggatagtggatgacaaaatgatcagtgaatatgttgagcacaatgatgctattttgctgctagtagtccctgctgctcaggcgccagaaatttcaacatcacgagcccttagagtagcaaaggagtatgacgcagaatccaccagaactgttggcgttatcagtaaaattgatcaagcttcttcggaaccaaaagcccttgcagcggtgcaggctctcctattgaaccagggaccgcctaaaacctctgatattccatgggttgctttgatagggcaatctgtttctatagcttctgcacagtctgggagtggagcatccgaagaattcattggagactgcttggcgtgctgaaactgaaagttttgaaatcaatattgactggagcccctcaaagcaagctaggtagaattgctttggttgagtctcttgctggacagattcgcaatcgtatgaagcttaggcttccaactctcctcactggtcttcagggaaagtctcaaattgttcaggaagagttagtgaagtttggtgaacaaatggttagtagttctgaaggtacaagagctctagccttgcagttgtgccgtgaatttgaggacaaatttcttcaacatcttactggaggcgagggtaatggttggaaagttgttgccagttttgaagggaattttcctaacagaatcaagcaacttcctattgacagacacttggccataaacaatgtcaagaggattgtcctagaagcagatggatatcaaccttatctgatctctccagagaaaggtttgagatccttaattaaaggcgttcttgaactggcgaaggagccatcacgattgtgtgttgatgaggtacatcgcgtgcttgtggatcttgtttctgcttctgcaaatgcaacgcctggtcttggaagaatggaaaggcaacgccgagaagaggagcttaagaaccggtcatccaaaaagacacttgatgcagaacagtcaattctaaatagggcaactagtcctcaaacaagtcaacaaagtgggggaaacttaaaatcgatgaaagataaatccagtcagcaagacagggatacacaagagggatctggcttgaagactgctgggcctgaaggggagataaccgcaggatttttgttgaaaaaaagtggaaaaggtagtggttggagcagacgatggtttgttttaaatgagaagactggcaagcttggatacacaaaaaaacaagaagagagacatttccgaggagtgattacattagaggaatgcaatattgacgagattcctgatgatgatgaagcctccacaaagaattccaaggataaaaagtccaacggacctgattctgggaaagcatcaaaccttattttcaagataacaagcaaggtcccatacaagactgttatgaaatctgaaagtgcagttttgttaaaggctgagagtatggcagataaggttgagtggatcaacaagttaagaagtgttgcacaggctaaaggaggtcaagccattggtgaacctagttttcctatgcggcaaagcctttctgatgggtctcttgatacgatggccaggaaacctgcagatccagaggaggagctctgatggatgtctcaagaagtccgtggttatgttgaagctgttcttaacagccttgcagctaatgttccaaaagcagttgttctttgccaagtagagaaagccaaagaagacatgctgaaccagctatacagttccgtcagcgctcaaagctctgcaaaaattgaggagctgctccaggaagaccacaatgtcaagaacaaaagggagcgagttcagaaacagtctgcccttctttcaaaactcactaggcagcttggtgtccatgacaatagagcggctgcagcatccagttggtctgatagagggagtgcagcagaaagcagcccaagaagctctggaccctcatcaggtgatgattggaggtctgcatttgattctgctgccaatggtccaagcaacctgacgtctaggtatggttctggtggtcatagtagacgctacagtgacccatcccaaaatggtgatgtgagctcaggctcaaattccaacagtcgtcggacgccaactcggttgcccccggctcccccacaatctggttcaagatattagatgaagctacatatggttttaatcaaaattatgcactcatcggatggacgctttcagttttttctacttatatcgagactgtccctcctccttttagactttagtcggaatgttatagttttgtagataacgaaagtattgctatcgcattcatcttaaggtcatacgcagtctgcgtcctattttattcccttactgggtatgtgggggcattgttgggtgagatgattttgtgtcttcccaacattctttttctttacaaatgtaattgttttgtatgcaatgtgattatcagcatttacataaatgcgcattaatcgcgactgccttttgttttctctgctaccccattaaacactaaattgtttctggttagatatatgaacaagtttgcgattttaatggttagaattcaatattaaaaaaaaaaaaaaaaaaaaaataaaaaaaaaaaaaact

SEQ ID NO: 3528 - DNA, 2059 bp, Glycine max
  misc_feature (1)..(1): n is a, c, g, or t
ngattgcgaagtctgattaacattcattcatcgaaacacagagagaagaagaagaatgagcaccactcaagcttcctccaacaacaagaagaccaaacgcaatcacaagaaatccctctccctccccgcccgtaacggaatcacccctccggatgatggcggagaaagaaccgttaaaaagcttcggttgtcgaaggcgctcaccatccccgacggaaccaccgtctctgaggcctgcaggcgcatggctgctcgccgcatcgacgccgttttgctaactgattccaacgccctgctttccggaattctcactgacaaggatgtggctactagagtcgtcgccgaggggctgaagccggaggagacgacggtgtcgaaagtaatgacgcggaatcccatctttgtcacgtcggatacgctcgccattgatgcgcttcagaaaatgattcagggtagatttagacacctccctgttgtggaaaatggtgaagtcattgccatgctggatatcaccaaatgtctttatgatgccatatctagaatggagagcgctactcaacaggggagtgccgttgctgcagcagttgagggagtggaacttcagcgaactactccaaatactttcattgaaacattgagggagcgcgtgttcaaaccttccctgtcaactatagtcgatgaaaatacaaaggttgctattgcattagtatcagatcctgtgtacgtggcagcaaaaaagatgcgggagttacatgtaaatgcagctgtgattgtgatggaaaacaagattaaggggatacttacttcaaaggacatccttatgcgcgtggtggctcaaaatctttccccagagtcggctcttctggaaaaggtgatgactccaaatccagaatgtgcatctctagagacaacaattcttgatgcactgcatatgatgcataatgggaagttcttacatcttcccgtggtggacagagatggaaatgctattgcttgtttggatgttttgcagataactcatgctgcaatttctctggttgaaagtagtcctggagcatctaatgatgcggcaaacacagttatgcaaaaattttgggactcagcttttgctctagagccgccgcctgaagattttgacacccatagtgaagcctctggacggttgactttggatggggcagataccacaaagtctacatatcaatctgcaggttttggaaattcatttgcttttaaatttgatgatcacaatggccatgtgcatcgattctactgtggtgctgaacatcaagaacttctatctgctgtcatgcaaagaattggtgatattaatgatggagaacaccctacaatgctgtataaggacgatgatggtgataaaattattattgcgactgataacgatcttgtggctgccgtcagctatgctaggtctgcaggactgaaggctttaaagttggatttggagtttcccaattcaaccaaaccaacaaaactgcaacctggtacagccactatacagaaaaccagtacattgcgtctccgttctggtatttttgcaggtgttgttgttctaacgagcattagcgtattggtgtacttaaagcgctctagacagtaatatgtttgccagcttgaaaacaaaacatgctataatcttactctatgaatcccagagtttcgtcataaatcaaatgctcgttgacaaaggaaatgatggacacggaataggtggatgatgtggagtctctctaatcagccgtttttaattatctttttctttttgagtcactgatgtaattagaaccaaagatatagtcgtggcatgcaatactgaagtgtcaccatgttcttctcaattaaggtacttgtaattccatatatttatcaactttcatcacttacgacttttgcgtccagatattatcagttagatcaccatcaaggtcaagccatttgatgaaatcaattacaatattattaaagtaaatttttattatttaatgtaggaatagctgacatccttcattgtcatcttcacattttaaaaaaaaaaaaa

SEQ ID NO: 3529 - DNA, 1304 bp, Glycine max
  misc_feature (1231)..(1231): n is a, c, g, or t
  misc_feature (1233)..(1233): n is a, c, g, or t
  misc_feature (1240)..(1240): n is a, c, g, or t
  misc_feature (1242)..(1242): n is a, c, g, or t
  misc_feature (1244)..(1244): n is a, c, g, or t
  misc_feature (1248)..(1248): n is a, c, g, or t
  misc_feature (1258)..(1258): n is a, c, g, or t
  misc_feature (1267)..(1267): n is a, c, g, or t
  misc_feature (1290)..(1290): n is a, c, g, or t
accatccaagaatctagctagtcaccaaccaaacctctgcattattctcttctctcactctctctaagctctcttttagtcttactcacaaacacttttttcactgcttccattacgaacatatatttattatatggctcctgaacttgtccccaccgttgtgaaatccagtgctgcgttcacgaaacccgcgacccttccaaggcgtgcctacgtgacattcctcgccggaaacggtgactacgtgaaaggggtggttggcctcgccaaagggttgcgaaaggtgaaaaccgcgtacccgttggtggtggctgtcctccccgatgtgccggaggagcaccgtaagatcctggagtctcagggctgcatcgttcgcgagatcgaacccgtttacccacccgaaaaccaaacccagtttgccatggcttattacgtcatcaactactccaagctccgtatatgggagttttgtggagtacagcaagatgatatacttggacggagacattgaggtatatgagaacatagaccacctatttgacctacctgatggtaacttttacgctgtgatggattgtttctgcgagaagacatggagtcacacccctcagtacaaggtgggttactgccagcaatgcccggagaaggtgcggtggcccaccgaattgggtcagcccccttctctttacttcaacgctggcatgttcgtgttcgaacccaacatcgccacctatcatgacctattgaaaacggtgcaagtcaccactcccacctcgttcgctgaacaagatttcttgaacatgtacttcaaggacatttacaagccaatccctttaaattacaatcttgtcctcgccatgctgtggcgccacccggaaaacgttaaattagaccaagtcaaggttgttcactattgcgcagcggggtccaagccatggagatatacggggaaggaagagaatatgcagagggaggacataaagatgctggtgaagaaatggtgggatatctacaatgatgcttcgcttgactacaagccattgatgaatgcaagtgaagctccagcagcggatggtgttgacattgaacaattcgtgcaggctctatcagaggttggtcatgttcaatatgtcaccgcgccttcagcagcttaattaagagggcacattcaaatcacgacaaaaaacaaccaagtgaaaaaaaataaaaataaacacaagagttgtgaaangnaaagttngnanacgngatgggcggnggagtaggnggaagactttgcggtcaaaacangggaggtttctttc

SEQ ID NO: 3530 - DNA, 1691 bp, Glycine max
  misc_feature (7)..(7): n is a, c, g, or t
  misc_feature (17)..(17): n is a, c, g, or t
gtccggnaattcccggngtcgacccacgcgtccgggggtgagagtgtggacgggaacaggattgtgtttgttcttcgtttatcaaagatcatcaaacggggaatttagattttggagagaaaaaaaagaaagacgcactccctcctcctcctctgtctccgggttcaatttcaaacccataaattcggcttccaaattgagcggatttcagagattatatttttcttctactcttactttgcgaaaaaatggaagaggcaaaggcattgcaccagcaacagcaacagcagcagcagcaacaacaacaacaacaacaacttctgttacaacaacagcaacaacaacaacatcaacaacattatctgctcttacagcaattgcaaaagcagcagcagcaacatcaacaacaagctgccgccatttctcgtttcccttccaacattgacgctcacttgcgtcctatcagacccctcaatctccaacaaaaccctaaccctaaccctaacctcaatcccgctcccaaccctaaccctaatcccattctcaatttgcatcagaaccctaattccaaccatctaccaccgcagcagcaaccgccgcaacagcaacagcagcagcagcagaagattgttcgacccgggaaccagatggagctccagatggcgtaccaagacgcgtggcgggtctgccacccggacttcaagagacccttctcttctcttgaagatgcctgcgagaggttattgccttatcatgttgtggcagactatgaagaagaagaggatgataggattcttgattctgacactactggccagatgctttcacggtcccagcagtgggataataatattactgctaaaattgctgagttcactgcaacttttgagaaacaagcacttgccttcaacataataacccaaaagagaggtttgggggagttccggtctgaggagagactgatgattgagcaggcacttctccaagaagaaaaacgggctttctatgaattaagagcagaaatagagtccagggagaaggctggtcgtgaagcccatgaggctaaattacggatggcagcaatgtttcaagcagagcaggctcgggcagatttacagtctcatgctgaaatgatgtctcgagtgcccatgagagggagtgcactaggatcccaaggcaatgacattgtgattggccatgacatgggagagcaggatcaggcaggtaaccccggtgagatgattaatggatggggaaacaatacacagagagatgagaaggagccatctgaagatttcttgaatgatgaagccgaaaatggagacattgggacccaggatggctggcgtgaagttggtgaatttgatttgaatgccaggtgattctcgacagtgattgaatgaaacctttcgggagagtttttattacgtgtaagggattaatatccattttaaaaatcatcatcttgggtatcaatcattggcttgaagttagtatcttagattacttttcaagatcaaaatctatttcacaagggcgcaaggaaaactattgaaccagtactagattggatgaatatcaaagtttatgctcttacactagtgtagtgcacatggttggatcattaggtcctctcgagtgttatgtaagcacacaaattctgacaaatgtatctccttagttttcaagga

SEQ ID NO: 3531 - DNA, 1684 bp, Glycine max
tcgagtcagctacgtaggccccccccccaaatagtgcccaaaaagcctcatctcattctcaacctacacaaatacaatacacgcatagtttttcttcaaatctccccacatacaacaatgtccaccgatctctctgtcattctccctcgtgttctcattgtctctagacgaagcgttcgcaaaaacaagttcgttgatttcgttggtgaatatcacctagatcttatagtagggtatggcgcggtgcccgtgattgttcctcgtgtttccggggtgcacatgttgttggatagctttgagccaatccacggcgtgcttctgtgtgaaggtgaagacattgatccttcttggtacgaacaagatatcgcgggtctttcacaagaggaattggaagagattaaaaggcttcatgcaagtgacacggccattgacaaagagaaagactcaattgagttgagtctcgccaagctatgtctcgagaggaacattccctacttgggaatttgcaggggctcacagattcttaatgttgcatgtgggggtaccctttaccaggacatagggaaagagctttcaattaagtgtctcgatagccaaagggttatgcacataaactatgacgattatgatgggcataggcacgatgtggaagtggttgaaaacacccctttgcatcattggtttaaggattctttggaagaaggaaaaatgaatatttgtgttaatagctatcaccatcaaggggtcaagagattggcacaacgttttgtgccaatggtctttgcacctgatggcttgattgaagggttttatgacccagatgcttataatccagaggagggtaagttcattatgggattgcagtttcaccctgagcgtatgaggaagcctgattcggatgagtttgattacccaggatgcccctttgcttataaggaatttgtaaaagcagttgttgctcatcagaagaagctgaacagcttaacatccgtacaaaagcctattaagcttaataaggaaatggaaatcaaaaggaagattattgtgcgtagtttctcacttgccaaaaacctatacattgctggccgtggaactaattcccccaaagagactgaactcgaagctggagcagaatttcttgagtccaacacagccttgagtgtgcaacaagagaataggttaaagcaaatgggtgcaacggttaggaatgcaggctcctacatagagagactgaagctaaacgaggaaagagaaaaaatggcaagaaatgtgatggcgaaaatgaccgtggaacagttgtctgatctcttgtctttctatcacactatgggacaaatttgttcagaagtattggatattaagatacatggccttgtcaatgacttaggttcatgattttgttccttaatttcttggcctttggttgactatgcaacgtttgtttgttggtagttagatgcatgtgctcctttgtgggactcagtgattgttaggggaaagggctctctgtttgttccttttgtttgagtctgttactaaattccttacgacttgggtatatcaatcacctgtgtaaacaacagataaccactggcttttggaaaaagtttcaaaaggcaaatgttaatccgtgcagtgattaaggaaataaaattgatttttttataaaaaaaaaaaaaaaaaa

SEQ ID NO: 3532 - DNA, 2241 bp, Glycine max
ggcgtgagcgtgaggtaaaacataaacattacagtgtggcggtgagtctacgtcactcaccccttttctttgtttctttccctcttccgtttattaacactcataccgcaccctcttcttcttcctctctttctctcttcttcgtcgctggccttgcctttcaagatccaaacctcttcccaatgaggaacctctctttcttcttcttcttcttcttcaccttcttcgccgccgtcagatctgatccctcagatcaccgctacaaagaaggcgaccccgtccctctctacgccaacaaagttggccccttccacaaccctagcgaaacctaccgttacttcgaccttcccttttgtgaaccaggtgatttgaaagagaagaaggaggcgctcggggaggtgctgaatggggaccgtttggttagcgcgccatacaagctggagttccagcgcgacaaggagttggtttccgtgtgcgacaggaagctctccaaacaggacgtggctcggttcagatccgcggtgaggaaggactactacttccagatgtactacgacgaccttcctatttggggcttcatagggaaggttgacaaggaagggaaggaccccagtgattataggtacttcctgtataagcacattcacttcgacgtcttctacaacaaggacagggtcattgagatcaatgtgcgcaccgatcccaatgcgctggtggatctcaccgaggatgctgaggttcaggccgagtttttgtacacggttaagtggaaggagactaacacgccattcgagaagaggatggacaagtactcgcagtcttcatcgctgccgcatcatttggaaatccactggttctcgattatcaactcctgtgtgacggtgttgctcttgaccgggttcctcgccaccattttgatgagggtgctcaagaatgattttgtcaagtatgcacatgatgaggagtctgcagaggatcaggaagagactgggtggaaatatatccatggggatgtgtttaggttccccaagtttaagtctctgtttgcggctgcgcttggatctggcactcagttgtttacccttacggtgttcatattcatattggcgcttgttggtgtgttttatccatacaatcgaggggcgctgtttactgcacttgttgtcatatatgcacttacttcagggattgctggatacactgcaacttcattctattgtcagttggaaggaacaaactgggttaggaatctgctgttgactggatgccttttctgtggacctctgtttctgactttctgctttctgaacactgttgcaattgcttacaaagctactgctgccctcccatttgggacgattgtggttatagttctcatatggtcacttgttacgtctcctttgcttgtattgggaggcattgctgggaagaatagcaaggctgaatttcaagctcctgttcggacaactaaatatccaagggagattccacctctgccttggtatcgtggaacaattcctcagatggcgatggcaggatttttgcctttcagtgctatatacattgaactttactatatatttgccagtgtttggggccacagaatttacaccatctacagcatcctgttcattgtcttcatcattctcttgattgttactgctttcatcactgtggcattgacatacttccagcttgctgctgaggatcatgagtggtggtggagatcattcctatgtggtggttcaactgggttatttatctatacctactgtctgtattactactatgcacgctccgacatgtctggattcatgcagacctcatttttcttcggatacatggcctgtatatgctacggtttcttcttaatgcttggaactgttggattccgtgctgctttgctctttgtccgccacatttatcgatccattaagtgtgagtaggcattttgtcctctcaagtccactagagcaattgtcttcatttcatagggaattctgtagaaaaattatagtaattttgcagttcttttgtgtactataagggaagctgggttgggtgggtttctggcttccagagcaacttgttagatggcaaagggtgcttttggggataacgtctgtgtactaccatctctttaaccaaactcttgcaatactttttggtccttatgaacattcttcaacatgtcaattttcaaacggtgtcaacatttaagttttccatacccattattgc

SEQ ID NO: 3533 - DNA, 967 bp, Glycine max
gaagtgcgttagaacagaaaagaagtgcaaacaaggcgcacataataatagtacccttcttcttcgtttcttagctctccactcgcctattaaccctcaccggaatctctgattcgatcttggttttcccatatagcacaagacatagagccgtgtgaatttgcgatatgctgggtaattgtcgccaatacccaatctcttgggtactcctttaccaacccccaccgccgcattaattatttttctcttggaatcggacaaaggttccactgagactgaaactttttaaggccaaaaaaatgctcgattcggttcttctggcgcttttcttgccgtgccttggcatgagcggggtttttatcgtctacatgtgccttctatggtacgccactacccgccgcaaccaaccccccattgacggtcaaccggtgaagcccgtaactgataagggtctatccgctttggagttggagaagcttccaaaaatcaccggcaaagaactcgtcttgggcaccgaatgcgccgtctgcctcgacgagatcgagagcgagcaaccggctagagtggtccccggttgcaaccatggatttcatgtccaatgcgctgacacctggctctctaagcaccctatttgccccgtttgtaggaccaagctggacccgcaaatcttcacttcccaaagcccctgctgaacaatgaagcattcattattcaaggaatgaataagggaagccaaattttcaattagtaatttcataattatctttattgttttctttgtcagttctttatagtttcttgaacttccgttactaattattattattattattatgtgtcgtgtagtggttcagtggttgtggtgtgttatggcctggatgaatttagcagtagtacccgaaaattcagaagccatgtttaatttatgtgtttattgtttaaattttaaaataagggggttggaggg

SEQ ID NO: 3534 - DNA, 1429 bp, Glycine max
tcgagtcagctacgtaggccccccccaccaacaacaacaacatcaaatccacaacatagacctaaagcaaaagcactatggcatccttacaaatttcatctttgctttctaacaccttttgttcaacatcaccatcaagaataaaatcctctatccacatcccagaaaaactccctatacctttttccatagctccaaactcaaaaccaagtagaaagctgtttgaggaattaaacggtttctcgcacacaatccaaatactccaagacaactcatgcagcagcagcaacaacaacaacaacataacctcaaaagctaccattcaactttatgcaattctagaagccgtagacgatagagtggagatgcatcacaacataggcgagcaacgtgacaactggaacacccttctcttaaactcaatcaacatgctcactctcaccgcaaccgccatggcaggtgtcgccgccaccatcgccaccggtgacgcgccacttctggctctaaaactatcctccatgctcttattctccgcctccacggggatgctgatggtgatgaacaaaatccagccctcacaactggccgaggaacaaagaaacgctaggaggttgttcaagcaaattaagtcccacatcgaaacaacactagccattggaaaccctaccgaggaagatgtcaaggacgcaatggagaaggttttagcacttgacaaagcctacccacttcctttgttaggagccatgattgaaaaattccctaaaaaatttgagccagcagtttggtggccttcaaagagaaacaattccaaatatcatgaaacaaatcagcaacaaaaacatggtaagaacaatgggtggaatgaagggttagaaatggaaattagagatgttttgaaagtggtgaaggaaaaggacatgaaggactatgagaggttagggaacttagttttgaagatcaacaagagtttggccattgcagggcctttactcactggcgttgcggctgtgggatctgcatgtttgagccaagattcatcatggggagcaatagtgtcggttttgggaggggcattagcgaccgctgttaatgcttttgagcatggtggacaagtggggatggtgtccgaaatgtacagaaactgtggtggattcttccaactgctagagaattcgatccaagagactatggaggaagatgaagaacaaagggaaaatggagagttgtttgaaatgaagttggcgttgaaattgggaagaagtttgtcacaactcagagatcttgcaagaaaatcggcttattctcgggtagagggaataaccaccgatgaatttgctagcaagctcttctaattaattttttaaattgtaatctaattagctaacaattaatcaattcttttattcaattctaaaaaaaaaaaaaaaaa

SEQ ID NO: 3535 - DNA, 858 bp, Glycine max
tcagctacgtaggccccccccccgaattgaaacgagcgatttgtacgaggaagtggtgctgttgcattgcgtgaacaaattgaggtgtggtgtgcatgttcaacattgggcaccgatgatgggttcagctactgtgcaaatagcgacgtcaaaatttgttctttgcccgaatgcttcagcggcgaaggttgcgagtcccaagaagaatgccgtcatcaatttctcttccaacttcaaaggaagtgttaccaaaatccatgccattccccctaatggctctgtctctatctgctcttcgcgtgtgtctgtgtcaagtttaaaggcagatgagaacaagcgcagaagtaatcttgaatccctgttttgttatgataaggctattccagaagaaataattgagaaacctgttgggttatctttggaagagaaagctattggtaacaatacccgatgcactgattgccaggccaaaggtgctgtgctttgtgccacttgtgctggttctggtctatatgttgactccataatggaaagccagggcataattgttaaagttcgttgcttaggttgcggcggaacaggaaatataatgtgtgcagaatgtggtggacgaggtcatctgggacccaaatgatcaagtctgacttttttgaaatttgttgtatttgtacctccagtatgtaatattttcgttgatattgattgtaaccgttattattattattattattatttttgtaaatcaaggagtcgttatgactgaaacctaagatatttaccaaattctctgctattcctaatgcatgagctaaagctcacatagctgtcatatttattctcaaaaaaaaaaaaaaaaaa

SEQ ID NO: 3536 - DNA, 2096 bp, Glycine max
  misc_feature (1777)..(1777): n is a, c, g, or t
  misc_feature (1784)..(1784): n is a, c, g, or t
  misc_feature (1791)..(1792): n is a, c, g, or t
  misc_feature (1797)..(1797): n is a, c, g, or t
  misc_feature (1802)..(1802): n is a, c, g, or t
  misc_feature (1828)..(1828): n is a, c, g, or t
  misc_feature (1831)..(1831): n is a, c, g, or t
  misc_feature (1842)..(1842): n is a, c, g, or t
  misc_feature (1861)..(1861): n is a, c, g, or t
  misc_feature (1872)..(1872): n is a, c, g, or t
  misc_feature (1878)..(1878): n is a, c, g, or t
  misc_feature (1885)..(1885): n is a, c, g, or t
attttaaacttaccaccttcattacatcttacattcgcgtgattcctgaaaaatacaaaatttgaggaacatttgtctctcatcaatggctgccacgagaccggtgcagtgtttgttacgaagggtttgcagaggaagtaggactattggggttgccacagaagttaatgcttcttcttcttctcagaaaatcatcgacaaggaatatgaacacagtgctcacaattaccatcctcttccgattgtatttgctcaagcaaagggaacctctgtttgggatccagagggaaacaaatatcttgattttctatcaggttactctgctgttaatcagggacactgccatcctaaaattctgaaagcattgcaagaacaggcagaaaggttgactgtgagctctcgagccttctacaatgatcgcttcccagactttgctgagtatgtgacaaacatgtttggttatgatatggtacttcctatgaataccggtgctgaaggtgtggaaacagcactgaagttagcacgaaagtggggttacgaaaagaaaagaattcccaaagatgaggctattattgtctcatgttgtggctgcttccatggtcgtacactaggtgtcatatctttgagctgtgacaatgaagctacccgtggttttggtcctttattacctggcaatcttaaagttgattttggtgatgcagaagcccttgaacaaatttttaaagaaaaaggagagcacatagctgcatttattttagaacctgtccaaggtgaagctggggtgatatttcctccagatggttatttaaaagctgttagagatctttgctccaaatataatgtcttgatgattgctgatgaaattcaaactgggttagcaagaacggggaagatgctggcttgtgagtgggaagaagttcgcccagatgttctgatactagggaaagcattgggtggaggagttataccagttagtgcagttcttgcagacaaagatgtgatgctttgtatacaacctggacagcatggaagtacctttggtggaaatccaatggccagtgcagttgcaattgcctctctagaagtaataaaaaatgagagactcgttgagagatctgcccaaatgggagaggagcttactggtcagctgcttaagattcagcagcaatacccagactatgtgaaggaggtacggggaagaggattgttcattggagtggagtttaacagcaaaaaattgttcccagtatcaggctatgagctatgcaaaaaattgaagtatagaggagtccttgccaagccaacacatgatgcaattatccgctttactcccccactttgcataagtgtggatgagatccaacaaggttccaaggcactggctgatgttctggaaattgatctaccaaagttgcagaagacaaagccaatagatgctgctccagttgccactagtgcatgcgatcgttgtggtagagtcttgtattaaccataaaaagacacgtatgaattgcatgtgcctttagttttccttggaaaaaaatatatcacatgaagaatgttactccttatacatgaacagctggaaactatgttccaatattccatatatcatcataatataagttcatgatatatgtgataggtagctgtataaataaatatataggagttagaggactcattgtataactttcaatggttaatttgcgagataagatatatgattttattatggctagaacaaaaaaataaaaaaatgccattccatctaaanaaaaaanaaaaaannaaaanaaaanaaaaaaaaaaaaaaaaaaaatttccngcnccccggggaanccactaatttctaaaaggngccccccaccncggggnacccccnctttttgtccccttaagggagggtaaatttcaacttgggggaaaccagggcaaaacctgttcccgggggaaaattgtaaccccctcaaaattccacaaaaaaaacaacccgaaacaaaaaagggaaaacccgggggggccaaaggagggaccaacccccctttatttgggttgcgctcatggccccttttcaagtgggaaaacctgtcggg

SEQ ID NO: 3537 - DNA, 1981 bp, Glycine max
  misc_feature (1925)..(1925): n is a, c, g, or t
  misc_feature (1927)..(1930): n is a, c, g, or t
tcgagtcagctacgtaggcccccccccccccatctgagctttttttaaaaacaaaaactcaaggccagtgataacttcattccctcttcaggtcatggtccaaacctatttaatgtgtaccgtatggggtgaacctctctcccaaacctctcaatcatttatgcctgaattgatatatggagtaaatcggagtttgtcaaaggttagtgtttctcattacaaagcatactctgatgtccaatcctcatatctgtggtttctgatctctcttgtgcctagtttacgtttttgttatgtaagaggataaattatttttagttaggaagtgtagttttataagatggtaatccatttatcttttctgaccaatgttattttatggaaatatattcaattctcatttctcagttctcctttttcaagttttcataacaggcccgaatgcttctaaggtctctcgtgataattggagctatacttggattgttgttagggattattggaacatcggttccttggttatttcccaatatttttacacctgatcggatggtcatccaggaggtcagttcattttttcaaaatttagattacatatttgtgttgtctcgcctttcatttttaatcctttgcaacttgtttcaaaatgtgtggtgttattattaatcaatcattagaagttttacattttgtgtacaaagaagctcaaccagttaaaggactaagcaggccaggtcacacaattcttgactggttttcaaatcatcagttattaaagaggatgtaccgaactggttactgaaccagttcccagttgaactggtcagacaagctgatacccaacagagaaaacaaatggaaatgcatagatttttatgaattataatattttggattttagacaataggacacatgttaactgctgcatttgttatgacgcagatgcataaggtgctgattccatactttatagccctggctgtaacaccccctactgtcagccttgagggaacgttgctggtatgttcgtttcatcttctatacaaatgggaaagctagcatataataataaaattactatttcttctcccatacttactcttctaggatgtttaacattaactttctcaactcaactaaattatgttgttttaacggtaataaaattaaaccaatacagtactatgatattataaattatccaatcatatcggtaacatgcttaatttgacgaggatttagcttattccccaacagtccaactcattcaatagggaccagaatgtgtcataagtaaaaacttttatggtaactttgatgtatctttactcatgcaggctggacgggatctgaaatttataagtttgtcaatgagtggatgcttttgtgtgggttcactagtattatgggctttgagtagtagatacggtttgcttggctgctggttttccctcgcattatttcaatgggctcggttttcaatggccctccagcgccttctttctcccaaaggcatcttatactcggaagatacagaacagtataagctgctaaagctaaggactgcctagtttgatgaagtcatcacaccagttacaaggatagaagtatgttttaataaaaaaaaaaagaggatagtagtatgttggaccatctcagcttatgggttaagcgagttaagaccaggacaaccggctaaaaagtgagccatcgtttttataatttgtttagtccgcgagctgggttggctcataggttggagttcactttgatacttatatgtgtatgattgctataataattagcatgaaaaattaattcagattcttaattatattgggcgcaatttatatttgttaaaaaaaaaaaaaaaaaaaaaaaaaaaaaaaaaaaattaaaattaaaaaaaaaaaaaaaaaaaaanannnnaaaaaaaaaaaaaaaaaaaaaaaattaaaaaaaaaaaaagggggcgccccc

SEQ ID NO: 3538 - DNA, 1373 bp, Glycine max
cacggctgcgagagcgaaagcacaaaacggaaaaagaaaagacgaacggagactctcctctttgttcacagcaatgcagacgctacttctgccggcaacatgcgccggcagcttcacggcggttccgctctcagcctctgccgtcgccgcccctcgtctcccgcaaccatttctccgcccgaattccttgccctcattccctctcaatttgactctttcttcttcctcatttagtaactctatcgctcgtcaaccatggacgaagcttcccttcaccgcaagcgcttcttcgcaagtatctccggctttcactccctccaacgacgaatcagaaaaggccaaactcgagctggtggcgaagaggttggagaagacggcaaggtacttcaagcgtttgggtaacttagggttttggggccaactagtgtgcaccgtcgtggctgccgtcatactctcattctccgtcatcgtcaccggaaaagtgacatctccggccacgttttatgccacagcgggtggaatagttgctgccttcatttcagtgttttggtcctttggctatattcgtctctctgagaagcttcgaaaaacttcaaatgaccctaccaaggctcctcctcgtgctgatgtagtgaaaggcttgaaaaatggtataatgttgaacctgttggggatgggtgctgctattcttgggatgcaagccacggttggattgttagttgctaaggctctcacttcctcggcaaacccgtattatcagggaatttctcccggtagcaccccagtgctcgcattggatgtatttttggtgcaggcttcagcgaacactattctttctcatttccttgggcttgttttctcactggagttgctgcgatcagtcacattaccaccttcagatgcaactccatttcccaaatttgcgtaatatgtgcctcgagactagataatgaaatcacacacccaaaaattgtccctcgtctcttgtggttatttgcttaattaattgtgttcagctttttgatacagcgttttgaggccctcttcctaggcaattgacctcatcgtgtatttccaattttaaaagatcctgtgcaatattgctaataagcatgataactcctccgcaaatgaagatccttggacattggagttttcacttactttcatagcttgtctacggttagtgtcaatcagagaaatttcaaataattgtatattagacctgtcatgcaatctgcgggtttttgtttcttttcaaaatacttgccaacttgtttgacagtatgatgtggagtccttgtctgaggaaacagaattttttttgttagaattgtattttggccatgattttgtaaaaaaaaaaaaaaaaa

SEQ ID NO: 3539 - DNA, 1508 bp, Glycine max
tcagctacgtaggcccccccccgagaagaagaaaagaccgtcaaaagtcgaacggagacactactctttctttcaccctaacacaacaccggcaatgcagacgctacttctgccggcaacacgcgccggcagcttcacggcagttcctctgtcagcctccgccgtcgcctcccctccactccctcaaccatttctcagcccgaattccttcccctcactccttctcaatcgggctggttcatcttcctcttttagttcctccatcgctcgtcaaccatggaagaagcttcccttcaccgcaagcgcttcttcgcaagtgtctccggcattcactccctccaacgacgaatcagataaggccaaactcgagcaggtggcgaagagattggagaagacggcgagatacttcaaacgtttgggtaacttagggttttggggtcagctagtgtgcaccgtcgtggctgccgtcatactctcattctccgtcgtggtcaccggaaaagtgacatcgccggccacattttatgccacggcgggtggaatagttgctgccttcatttcagtgttttggtcctttggctatattcgtctctctgagaagcttcgaaaaacttcaaatgaccctaccaaggctcctcctcgtgctgatgtagtgaaaggcttgaaaaatggtataatgttgaacctgttggggatgggtgctgctattcttgggatgcaagccacggttggattgttagttgctaaggctctcacttcctcggcaaacccgtactatcagggaatttctcctggtagcaccccagtgctcgcattggatgtatttttggtgcaggcttcagcgaacactattctttctcatttccttgggcttgttttctcactggagttgttgcgatcagtcacattaccaccttcagaagcaactccatttcccaagtttgcataatatatgcctcgagactagtataatgaaatcacacccaaaaattgtccctcgtttcctgtggttgtttgcttaattaattgtgttcagcgttttgatacaacgttttgaggccctcttcctaggcaattggcctcatcgtgtatttccaattttaaaagaacctgtacaatattgctaataagaatgataactgctcaacaaatgaagatccttgggcagatgattacaatggcaggggtagatcgcattgtcttcactcagctttggagttttcacttactttcatagcttgtctacggtaagtgtcaacaggagaaatttcaaaacgcaactttgaaataattgtatattatacctgtcatgcaatctgcgggtttttgtttcttttcaaaatacatgccggcttgtttgacagtatgatgtggagtccttgtctgaggaaacagattttttttgttagggttactttttgcccatgattttgtatttgcatcactctttattatgcatcagaatctcgtacagtattggtttgggttcaaaaaaaaaaaaaaaaaaa

SEQ ID NO: 3540 - DNA, 1282 bp, Glycine max
tcgagtcagctacgtaggcccccccccccgttcatagacatagttgttacaggctggacggtgtaacagtctgtgtctgtgtgtgtgttcagtttaacaaatggatcaagctgtccactgatctgtaaccgtggtggactcgacaagacaacaacaatattcagaacattaacaagaccacaccacaccatgagcgtcatcgacattctcaccagagttgattccatttgcaaaaagtacgacaaatacgacgtccaaagccaaagggactccaatctctcctccgacgatgcattcgccaaactctacgcctccgtcgacgccgacattgaggccttacttcagaaagcagataccgcttccaaggagaaaagtaaggcatccactgtggcgatcaatgccgagattcgtcgaaccaaggctaggttgttggaggaggttcccaagttgcagagattggctatgaaaaaggtaaaggggctttcatcacaagaatttgctgcccgtaatgatttggctcttgcattgccggataggattcaagctatcccagatgggacccctgcagcatccaaacaaagtggaagttgggcagcttcagcctcacgtcctggaattaaatttgattcagatgggaaattcgatgatgaatacttccaacaaactgaagaatcaagtggattcaggaaagagtacgaaatgcgtaaaatgaaacaggatcaaggtttggatatgatcgcagaaggattggatactttgaaaaacatggcacatgatatgaatgaggaactggatagacaagttccactgatggacgagattgatactaaggtggacagggcatcttctgaccttaaaaataccaatgttagacttagagatacagtgaaccagcttcgatccagtcgaaacttttgtattgatattgttttgttgattataattttgggaattgctgcttatttgtacaacgtgctaaagaaatgatacggcatagaagaccattagatcaatttgtatggcttatcagtatttcttgtattttcttggtaatatcgtggtgtgactcgtgtctgcttctttttaaaacaatatttttggacttgttcctgcaacttgagagatgcacttgtcctttatcaacagatctatatgtcgccgtattatgtcaaacagtgtagatttgtatttatacttgtgtaatatactaattcaatgtttgccttgaggatatttcaagtaatctattttcatttagagcggaagaaaaaaaaaaaaaaaa

SEQ ID NO: 3541 - DNA, 2003 bp, Glycine max
ctcgagcgctttttcgtcgttcacttcagaatcctctagcagcgggaaaaaaaataaataataaacagcgaagttacgaagattctgtagagaagaagagcaatggcgtccaacgattccgattcgcagatgaagatcgtacatggcgatgctggttacatacttgaagacgttcctcacttcgccgactatattccaaatcttcctacatatccgaatccgcttcgatccaatcctgcttactcggttgttaagcagtatttcgtgcacatggacgacactgttcctcagaaggttgttgttcacaaggatagtccaagaggtgtacattttcgacgtgcagggcctcggcaaaaggtatactttaaatcggatgaagtgcatgcatgcattgtcacgtgtggtggactctgccctggcctcaacactgtcataagggaaattgtctgtggtctttcctacatgtatggtgttaacaaagtccttggcatagatggtggttatagaggcttttattccaaaaacaccattactttaacacctaaggtggtcaatgatatccataagcgtgggggtacgattcttgggacatcacgaggggggcatgatactggcaagatagttgacagcatccaggatcgaggaattaatcaggtttatattattggaggagatggaacacagagaggagcgactgtgatttacgaggaagttagacggcggggtctgaaagtagcaattgctggaattcctaaaaccatagacaatgacatcccggttattgacaaatcttttggttttgatactgcggttgaggaggctcaacgtgccattaatgcagctcatgttgaagctgaaagtattgagaatggcattggtgttgtaaagctaatgggacgttacagtggttttattgcaatgtatgccactcttgctagcagagatgtggactgttgcttgattccagagtcacccttctaccttgaaggaaagggtggactttttgaatttattgagaaaaggctgaaagaaaatggacatatggtcatagtcatagccgagggagcaggacaagatcttcttacagaaagcatgcaagccatggatcagaaggatgcttctggaaacaaattacttcaagatgttggtttatggatatctcacaagattaaggatcactttgcaaggaaggataaaatgcccatcaatcttaaatatatagatccaacttacatgattcgggcaattccaagcaatgcatcagacaatgtctactgtacacttcttgctcagagtgcagtccatggtgcaatggcagggtatactggatttacagttggactggtcaatggcagacagacttatattccattcattagaatcaatgagaggcagaacaaggttgtgattactgacagaatgtgggcaagactcctttcttcaaccaaccagcctagctttttgagccccaaagatttagaagaagccaagaaagcagaacaacctccgactgaattgttggaaggaaacaattgcaatgatgttggtgatgccgggaaagaagaacaacctcccaaagatgaacaagaatcaggaaatcacgcagacaatggtatcaagacagaaaattagatttagacttgttcatctacaagactacaattgtatttggtgacatgttttatcattttgactcaagccctacaaccttcaaagcctggagtgttgggagctgttctttttgtccttttaatgttttgcaagttggtacgtctttctttataaagacctaccgtcttgcgtgattgttgttgtactcagaagattgttgaatgttaacctaggtcatattaagattggaacggaattatttgacgtgcttgaaggtactgtatctggttattgttgttctgtgttttggtagtgacttgagtttttatacgcagttttgctggaacgaggtataaataaacaattttctagtaactttttcttttcccttt

SEQ ID NO: 3542 - DNA, 1994 bp, Glycine max
atttcccttcctttacacgggagatagatagtgcaagaagcgtaatctccaagttctcatctttttgttccctttttgttcagagacatacatagtcccgccccagaagaacaaattgctacaacctattttgatttgagatctgtctgtctctttggtttcagttcagggtcaaagtgaggaatgcaaagaaaatggggaggagaggaagtagttggttttctactgtgaagaaagctctaagccctgagccaaaggagaagaacgatcagaattcaagtagatcaaagaagaaatggtttgggaagcaaaaattgcagacttcagaatcaacctcacaaacggataatgcaccacctcttcctccacctgagattattttaactcatgttgagagtgaaatcagccatgagcgtattgaagttgcaactgcagtggatgctgtggaacctgttcctgctgttcagatggcagctgctgaagttcaagccaccacaactgttcagtttaacagtaaaccaacagaagaagtggctgcaatcaggattcaaaaagcttttcggggatacttggcaagaagagaattgcgcgcgttaagggggctggtcaggttgagatcgctgatggaagggccagtggtgaaacgtcaagccattagtactctccgttctatgcagacttttgctcatttgcaaactcagattcgttctaggaggctcaggatgttagaggagaatcaagaactacaaaaacagctcttacagaagcacgcaaaagagctagagagcattcggcttggggaggaatgggatgacagcatacaatcaaaagaacaagttgaagccaagttactgagcaagtatgaagctgctatgagaagagaaagagcaatggcttattcattctctcatcagcaaaactggaagaatgcatcaagatctgtaaacccaatgttcatggatccaaccaatccagcctggggttggagttggttggaacgatggatggcagcccggccctgggagagccatagcctgatggagaaagagaagaacgacaataaatctctaagaagttctagccgtggcattaccagtgctgaaatcagcaaatcatttgctaagtttcagctcaattctgagaagcattctccaacagccagccaaaatccaggctcacctaactttgagtcccattcaaatcctcccaagccatcttctcctgcagttgctaggaaactgaagaaagcaagtcctaaggacatcttggctatagacgatggcactaagagcatggttagtgtgcagtcagagcggccacggaggcactccattgctggatcaatagtgggagatgatgaaagccttgcaagctctccatctattccaagttacatggtgccaactaaatctgcaaaagctaagtccaggatgcaaagtccatttgctgcagaaaacggaaccccagataaagggtcctctgggactgcaaagaaacgtctttctttcccagcttcgcctgctaggccaaggaggcactcaggtccaccaaaggtagagagcagcttcaatgctgaaatcactgtgggaaatggtgtggctggttgattatatagccacagaaaatatgatgcaatgcaagcatttgaaatgtcatgacaaagttaagacaaaaagttcatttgaattgttcccttatttatttatttattatgtgtatctcaatcttttcatttcttggaggctattggtttgagggtgaaaactgttttaccttctacattttatctatttgtattctcatgtatctactcacaatttgcactgagaagttgaaaggtgtgattcatgatagtattatggacaaaagaacaagtcagctgtcagaagcctttcggagcttccccagtatctctgttactattgattcttatgtgatataaaatgtatatttaatttcataaaaaaaaacaacaaacgggcgggcccagccag

SEQ ID NO: 3543 - DNA, 1881 bp, Glycine max
  misc_feature (317)..(321): n is a, c, g, or t
ctgcagatcaaggcacaaatgcgacttggattgctgttttggggagtgatggcttcatcactttctcgaacctcaacgatggagggtcaaatgctgcttctccaacaacaataccccaagattcttgtgctacaccggaaccttgtgatgcatacaccatatgcacaggtgaccaaagaaggtgtagttgcccttctgttattcctagttgcaaacctggttttgattctccctgtggtggtgactcagaaaagtccattcagttggttaaagctgatgatgggcttgattactttgcgcttcaattccttcaaccnnnnncgaaaaccgatttggctggttgccaatcttcttgccgcggaaactgctcgtgccttgctttgttcttccacagaagttcaggggactgtttccttttggacagtgtaggtagctttcagaaacctgattctgattctggttatgtttcttacattaaggtctcgacagatggaggcgctggcacgggttctgggggcggcggaggtgtccataagcacaccatagttgttgtggtcattgtcataatagccttggttgtcatttgtggtctggtctttgggggagttagataccacagaagaaagcaaaggttgcctgagtctcctagagaaggttcagaagaggacaatttcttggagaatttgactggcatgccaatccgttacagctacaaggaccttgaggcggccactaataacttctctgtgaagcttgggcaagggggttttgggtcagtgtacaaaggagttctacccgatgggactcagttagcagtgaagaagttggaaggtattggacaagggaagaaagagttcagggctgaagttagcatcattggtagcattcatcatcttcatttggttaggcttaagggattctgtgctgatggaactcataggctccttgcttatgagtacttgtctaatggctccttggataaatggatattcaagaaaaacaaaggtgagtttctgttggattgggatactaggttcaatatagctctgggaacagcaaaaggacttgcttaccttcatgaagattgcgactctaagattgttcattgtgacatcaagccggaaaacgtgcttctggatgaccacttcatggccaaggtttcggatttcggactggctaagctcatgaaccgagaacaaagccatgttttcacaacactgaggggcaccaggggatatcttgcaccggagtggataacaaactatgccatatcagagaaaagtgatgtctatagctatggtatggtgctactagagatcattgggggaaggaaaaactatgatcccagtaagtcttcagagaagtcccatttcccaacttatgcttataagatgatggaagaagggaagctgagagatatttttgactcggagttgaaaattgatgagaatgatgataggtttcaatgtgctataaaagttgcattgtggtgcatacaggaagacatgtcaatgaggccatctatgaccagagttgtccaaatgttggagggtatttgtattgttcctaacccaccaaccagttcttcgttgggttctcgcctttatgccactgtgttcaaatcctccagtgaaggggccacctcttctggtccctcagactgtaacagtgatgcttatctctccgcggttcgcctttcagggcctagataacaatacctgtctcttttgtttattttctgtgtgttgtattgttgagtaaattagtttgtgtaatacagcagagctactctggattgtgtgggctttgcatgcttccagctcttgtacattttgttcaagttcctcaaattttgtaatataaatagctattcataatcca

SEQ ID NO: 3544 - DNA, 1706 bp, Glycine max
tcagctacgtaggcccccccccccaatatacttgtaattcataggcagatatctaccgagagggttaaacacttagcatctgctgagggtaccttggtagacaccacactacccataatatggtcgaaaacaacaacccaagggtttttggttcttctatgtttctatgtttgcttgtgttgatgatttggaacaagattgttgttgttgttccacaagccgaggctcgagcattttttgtttttggtgattcgctagttgacaatggcaacaataactacctattcaccactgctcgtgccgactcatatccttatggcgttgactatcccactcacagggccactggccgtttctccaatggcctcaatatcccggacattatcagcgagaaaattgggtcagaacccacattgccgtatctaagtcgcgagctcgatggagagaggctactcgttggtgccaattttgcttctgcggggataggaattctcaatgacactggaattcagtttataaacataattcgaatcaccagacaattacagtactttgagcagtatcaacaaagggtgagcgcactaattggaccagagcagactcaacgactggtcaaccaagcactagtcctcataaccttaggtggcaatgattttgttaacaactattacctggtgccattctctgcaagatcacgccaatttgcacttccaaactatgttgtataccttatttccgagtatcgcaaaattcttgtgaggctttatgaattgggagcaaggcgagttttggtgacaggaacgggacctttaggttgcgtgccggcagaattggcgcagcgtagcagaaatggggagtgtgcagcagagctgcaacaagcttctgctttgttcaacccgcaactcgttcagttggtgaatcaactcaactctgaaattggttccgatgtcttcatttcagccaatgctttccaatccaatatggattttattagtaacccacaagcgtacggttttatcacatcaaaagttgcatgctgtggtcaaggaccttacaatgggattggactgtgtactccggcgtctaacttgtgcccaaacagagatgtgtatgcgttttgggaccccttccatccaagtgagagagcaaacagattgattgtggacacattcatgatcggagactccaaatacatgcacccaatgaatctcagtaccatgttgcttttggattcaacttcaaggacctagctaattattatcttcttcctgttagggtcgtggcatacattctgcactagattttgtgttatacattgattgtttaagctatattgttacaaattatttgaaaccactggatttcgtatgattttttctctctctaatctctgctttgagggaggaaaatagagaaaggaaagtccattgtgtgattgaatgtcccaattgtaacttgtgaggcatgtattgttcgggtgaactgggtcagataatttgtgggtagaggctaagcccaaaatcagtttgggcttgaagctttaagtgtgataaatttaggtatccgagatgtattagtaatttacaacaaaaattattccatgcaaaccttagcttaaatccatattgtcaaaaaaaaaaaaaaaacaaatttgtcatagtaaatgattcaaaattgaaaaactccaccaaaaaaaaaaagggcgg

SEQ ID NO: 3545 - DNA, 573 bp, Glycine max
aatatatactagtaatttatagaggcagatatatctaccgagggttaaacatttagcatatttgctgagggggtacctttgtagacactacatactatccataatatggtcgaaaacaatccagcaagggtttttggttcttctatgtttctatgtttgcttgtgttgatcacttggaacaacattgttgttgttgttccacaagctgaggctcgagcattctttgtttttggtgattcgctagttgacaatggcaacaataactacctattcaccactgctcgtgccgactcatatccttatggaattgactatcccactcacagggccactggccgtttctctaatggcctcaatatcccggacattatcagtgagaaaattgggtcagaacccacactgccgtatctaagtcgcgagctcgatggagagaggctactcgttggtgccaattttgcttctgctgggataggaattctcaatgacactggaattcagtttataaacataatccgaatcagcaggcaattacagtactttgagcagtatcaacaaaaggtgagtgcactaatt

SEQ ID NO: 3546 - DNA, 665 bp, Glycine max
cgattgggtaccgggccccccctcgggtcactacctaagccccctaggttaaggttttactgagaagaagatggagcaggaacacccaaaccttgaaagcttcttatcatgggcagcacagcttggaatatcagactcaacaacacgcaccaaccaacctcagcactctctttcctcatgtttgggttcttctctatctgtctctcattttcctcacactggcgggagaggtttgggtgctgtgagagaccttaggaggggagagattgttctcagagttccaaaatctgctttaatgacaagagagactgttatggaagataaaaagctctgtgatgctgtcaatagacactcttctctctcctcagctcagatattgattgtttgcttgttgtatgaaatgggtaaaggaaagacttcaaggtggcatccttacctcatgcatttgccacacacttatgacgtactagccatgtttggtgaatttgagaagcatgctctgcaagttcagtttctattagaaattttagtttatcttgttaggtggatgaggcaatgtgggtcacagaaaaagccatgcttaaagccaaatcagagtggaaagaagctcattctctgatgcaagatctcatgtttaagcctcagttttttacatttaaggcttg

SEQ ID NO: 3547 - DNA, 932 bp, Glycine max
ggatgcacccctacgtcggctcggaattcggctcgagagttgtcggcgcggttgcaattgtattgcagtagtgaaatggctggttcaattggaagcggagggaacacaagcacgggtgtggagtggcacgtgcgacctccaaaccctaagaaccccatcgtcttcttcgatgtcaccatcggtaacattcccgccggtcgaatcaagatggaactcttcgccgatattgcccccaaaactgccgagaatttcaggcagttctgcactggggagtacaggaaagcaggactgcctgttggttacaagggttgtcaatttcatagagttattaaggatttcatgattcaggctggtgattttgtaaagggagatggtagtggatgtgtttccatctatggactcaagtttgatgatgaaaactttacagccaaacacactggtcctggccttctgtcgatggcaaatagcggacaaaataccaatggctgtcagttctttataacatgtgcaaaatgtgactggcttgacaacaagcatgttgtctttgggagagtgcttggagatggtcttttggttgtcaggaagattgagaacgtggcaaccggacccaataaccggccaaaattagcttgtgtcattgctgaatgtggtgaaatgtaaattttaacccaacttggctaacaaacaatagttctcttagcaaagttgattgaatcctcagcagcaactgcacctcctatactgatgtgggctttctacacatatttctgtggcttgaaactaaatattcttgtcatgggatttttttttcaacgagacagttgagtagctcaactaattgaataatcatgcttgggaatgacagaatgataatactataatgcatcttttttgcccaaaatcatccaatgcacgtgtgctaatatattgtc

SEQ ID NO: 3548 - DNA, 2749 bp, Glycine max
aaggaatagctcattctcctgagtacacttttatgcctagaggaatgtttcttttgcaatggaatggatgagaatgctgttggcacctgtgctgaacttatatctgctccaattgatgcttcctttgctgatgatgcccccctcctaccttctggatttcgcatcattcctcttgaatctggaaaggaagcttccagccccaatcgcacacttgaccttgcatctgcccttgacgttggtcccagtggaaaccgagcttcaaatggatgtgctaattccagctgtatgagatctgtgatgacaatagcatttgaatttgcatttgaaagccatatgcaagagcatgtaacatctatggcacgccaatatgttcggagcattatatcatcagtccaaagggtagcattagcactttctccttctcatttgagttcacatgcagggcttaggtcaccattgggtactcctgaagcacaaacccttgctcattggatctgcaacagttataggtttgtcaaatttactgtctttgcatactgaggttgaggatcatgcaatgcattttaccctgtgcgataggctgatagcattgttattcttgatttttataagagagccaaaattaatatgctctcattaaataaagaaactaacttaatgataggtttggtgagtgccatgcagagtgaaatttcctctctcctgattgtcagttcttgtcttctaaacaaatcccacctcctttatgtttgcatatttgcatagaataatcttaccagcgcagatgctgagttctttaagatgcatgggcagcatggcaccaagttttgaaggagccgattacttctaagtttctaactggctggcactggaagtgatgcacatactcataaattggagactcttgtgtcatcattcatcaaatactctgacagggattaatcgagagacttcgatctaaaattcaagacctgcatatgaattagattgacatttttttcgtctttcatgaactcacagtactcacaaatttgtgaacctcagctacgtaggccccccccccctttttttaaaatgctgttaataaaatccattgttgctttggttcaagctataatggagcatagggtttattttctaatgtagtgatcaattctgcctttttgggcttctcttctccttaaaaggaaaacttagcccaaacaatttcttaagctcttgaatatatatatatatatatatatatatatatatatatatatatatattagagaaaaaaaaaaaaacagacctgcaatagaaagcgaactgaaggagttttacctttaaagtgaagagaagctcaaaaaagttgacttaagtgctagcaaattcagttttgtggttttatggaggtattagcagttcagttttgtgcaattacttattacttctagtttgtaagttccagctgagaactctgaagttactgtaattgttctgtacctcctctttttcaatgtcatggataggttgccgaaactgatattttaaaatcagctattgtctgactatttagttttttaggtgctacttgggtgtggagctacttaaatctaataacgaggggaatgaatctttgctcaagtccttgtggcatcactctgatgcaatattgtgctgcactctaaaggtatgcttgaaatttaattcaatttcatagcgcatgtatctatttcgtgcttataaaaaatatatatatctattttgtgctctgtccataatgcaattcaaattctctaactcataaaggttttactctgaaatagagggtatcattgtatcaacatgggctatatagcctgagtagtagcctagtaaaatatgtgagatgaatttgtattatgctggcctaagttaaatttgccctgacctggtccaagaaaaatttcccccaacctcaactatagacccatttctgggtagtattctgcaaagagctttactggtcacttgtcagcgtttcaagtctattattcattcctcttccaactacagtgcatataagttgtataacccaacatggatgacatgttattctgtactgtctaattttgttctaacagtggaaatggcttgaaaacagtttcaactctaatcatggtattctatctggttcgagggcacattctttttaacttttgtttatgcaggcattgccagtgttcactttctcgaaccaggccgggcttgacatgctagagaccaccctagttgcattacaagatataactttagagaaaatatttgatgatcatggacgaaaaattctcttttcagagtttccacagattatacaacagggttttgcatgtcttcaaggtggtatttgtctttcaagcatggggcgacctgtctcgtacgaaagagttgttgcttggaaggtgctgaatgaagaagagaatgctcattgtatttgctttatgtttgtgaactggtcttttgtttgacatcttgttctgagtacacttgggcttattgtatcttagtgtaagataaggatttactccaagacactcgtgctttgttggttgatgttttactgtatttgcactaaatacttggattgcacattaaatgactatttatttcttagtctatgtaacttgtttccttattcaacatccagctaatatttatgcattattaagaagtgttgcagcttcttatgtgggaaaaaaaaaaaaaaaagaaaaaaaaaaaaaaaaaa

SEQ ID NO: 3549 - DNA, 2852 bp, Glycine max
  misc_feature (1162)..(1162): n is a, c, g, or t
  misc_feature (1185)..(1185): n is a, c, g, or t
ggcagatcggtgaagcggcggagcaaatggttgcagagattccatacatgactcgatcttagtttagttaggagcagcggtggaaagcctaatagaacaagtatgtcctgcaaggatggtagcagaaacggaatcggaatcggaatggataacgggaagtacgtgcgttacacgcctgagcaggttgaagccctagagaggctctatcacgattgccccaaacctagttccattcgccgcctgcaactcattcgcgagtgccccactctctcccacattgatcccaagcaaatcaaggtttggttccagaacagaagatgtagagagaagcagaggaaggagtcgtcgcggctgcaagctgtaaataggaagttgactgccatgaacaagctgctcatggaggagattgataggttgcagaagcaggtctctcaactcgtctatgaaaatggctattttcgtcaacataccacccaaaatactaagcagcaggcaatcaaagacacaagctgtgaatcagctgtgaggagtggtcagcagcacaatttgacaactcaacatcccccacgggatgcaagtcctgcagggcttttgtccattgcagaagagactttagaagaatttctttctaaggctactgggactgctgttgagtgggtccaaatgcctacggctgcgagaagacgacagaaggggggaatcgttgctatttctcacagttgcactggagtagcagcaagagcttgtggtttagtgggactagaacccactagggttgcagaaatcctcaaagatcggcctttgtggtttcaggattgccgagctgttgatgttctcaatgtgctgcccacagcaaatggtggaaccattgagctgctttatatgcagctatatgcaccaaccacattggctcctgctcgagacttctggttgttgcgctacacttctgttttagaagatggcagcttagtgatctgtgagaggtcacttaaaaatactcaaaatggtccaagcatgcctcctgtgcagcattttgttagagcagagatgctgcctagtgggtacctgatcagaccatgtgaaggaggcggttccatcatccacattgttgatcatatgaatttagagccatggagtgtgccagaagtgctacgtccactgngacgagtcatctaaagtactgtnctcagaagacaactatggcggccctacgtcatttaaggcagatttcacatgaagtttctccgtccaacgtcagtgggtggggtagaagaccatcagcactacgagctcttagccaaagattgagccggggtttcaatgaggcactcaatgggtttactgatgagggatggacaacaattggcaatgatggtgtagatgatgttactattctcgtgaattcatcccctgacaagtggctcgggctgaatctttcctttgccaatggatttccgtctgtcagtaatgcagtgctatgtgccaaagcatcgatgctattacagaatgtgcaccctgccattctccttaggttcctgcgggagcatagatcagaatgggcagacaacaatatggatgcttacacagctgctgctattaaagttggcccttgcagcttttcaggatctcgtgttggaaactatggaggtcaagttatactccccctagcacacacaattgagcatgaagagtttttggaagtcattaaattggaaggagttgctcattctcctgatggacacaatatggcccagagaaatgtttcttttgcaactttgcagtggaatggatgagaatgctgttggcacctgtgctgaacttatatctgctccaattgatgcttcctttgctgatgatgccccccttttaccttctggatttcgcatcattcctcttgaatctggaaaggaagcttccagccccaatcgcacccttgaccttgcatcttcccttgacgttggtcccagtggaaaccgagcttcagatgaatgtgctggaaattccagctatatgagatctgtgatgacaatagcatttgaatttgcatttgaaagccatatgcaagagcatgtagcagctatggcacgtcaatatgttcggagcattatatcatcggttcaaagggtaggattagcactttctccttctcatttgagttcacatgcagggcttaggtcaccattgggtactcctgaagcacaaacccttgctcattggatctgcaacagttataggtgctacttgggtgtggagctacttaaatctaataacgaggggaatgaatctttgctcaagtccttgtggcatcactcagatgcaatattgtgctgcactctaaaggcattgccagtgttcactttctcgaaccaggctgggcttgacatgctggagaccacccttgttgcattacaagatacacctttagagaaaatatttgatgatcatggacgaaaaatacttttttcagagtttccccagattattcaacagggttttgtatgtcttcaaggtggtatttgtctttcaagcatggggcgacctgtctcgtacgaaagagttgttgcttggaaggtgctgaatgaagaagagaatgctcattgtatgtgctttatgtttatgaactggtcttttgtttgacattttgttctgagtacagtagtgcttattgtaatctaaagtgttagataaagatttactcgacacttgagctttgttggttggacttcactgtatttgcgctaaatacttggattgcacattttatgactatttatgtgttattagcttagtatgtaacttgtttccttattcaaaaaaaagaaaaaaaaaaatgcaatcttaagaagtgttgc

SEQ ID NO: 3550 - DNA, 3035 bp, Glycine max
acagtggcggatttgggtacagagtgaggaagcagtgagcaaaagaaaagctgaaaacagcgcaccagttctgagctgctcgagccgctcgagccgctctccctcgtcttctcactttcacacatccatccatgtcttgaaacgatgcttcgcagatcaagcatagtcgattccaattcgcgcaagctcatggacggagatcgctgatacggcgaaccagatcgttgcacgagattcgtcacgtgacactcgatcttagttaggactagtgctagaaagcagaagctacttggttcttttgaaggtttgatttggatgtggaaataatgtcctgcaaggatggtagcagaaacggaatcggaatggataacgggaagtatgtccgttacacgcctgagcaggttgaagccctagaaaggctctatcacgattgccccaaacctagttccattcgccgccagcagctcattcgcgagtgccccattctctccaacatcgaacccaagcaaatcaaggtttggttccagaacagaagatgtagagagaagcagagaaaggagtcgtcgcggctccaagctgtcaataggaagctgactgctatgaacaagctgctgatggaagagaatgataggttgcagaagcaggtgtctcaactcgtctatgaaaatggctattttcgtcaacacacccagattactacgcaggcaaccaaagacacaaactgtgaatcagttgtgacgagtggtcagcagcacaatttgataactcaacatcccccacgggatgcaagtcctgcagggcttttgtccattgcagaagagactttagcagaatttctttctaaggctactgggactgctgttgagtgggtccaaatgcctggaatgaagcctggtccggattccattggaatcgttgctatttctcatggttgcactggtgtggcagctagagcctgtggtctagtgggactagaacccactagggttgcagaaatcctcaaagatcagcctttgtggtttcgcgattgccgagctgttgatgttctcaatgtgctgcccacagcaagtggtggaaccattgagctgctttatatgcagctatatgcaccaaccacattggctcctgctcgagacttctggttgttgcgctacacttctgttttagaagatggaagcctagtgatctgcgagaggtctcttaaaaatactcaaaatggtccaagcatgcctcccgtgcagcattttgttagagctgagatgctgcctagtgggtacctgatcagaccttgtgaaggaggtggttcgatcatccacattgttgatcatatggatttagagccatggagtgtgccagaggtgctacgtccactgtacgaatcatcaacagtactggctcagaagacaactatggcggccctacgtcatctaaggcagatttcacatgaagtttctcagtccaacgtcactgggtggggtagacgaccggcagcactacgagctcttagccaaagattgagcaggggttttaatgaggcactcaatgggtttactgatgagggatggacaacaattggcaatgatggtgtagatgatgttactattctagtgaattcatcccctgacaagttaatgggtctgaatctttcctttgccaatggatttccgtctgttagtaatgcagtgctatgtgccaaagcatcgatgctattacagaatgtgccccctgccattctcctaaggttcctgagggagcatagatcagaatgggcagacaacaatatggatgcttacacagctgctgctattaaagtcggcccttgcagcctatcaggatctcgtgttggaaactatggaggtcaagttatactccccctagcacacacaattgagcatgaggagtttttggaagtcattaaattggaaggaatagctcattctcctgaagacacaataatgcctagagaaatgtttcttttgcaactctgcagtggaatggatgagaatgctgttggcacctgtgctgaacttatatctgctccaattgatgcttcctttgctgatgatgcccccctcctaccttctggatttcgcatcattcctcttgaatctggaaaggaagcttccagccccaatcgcacacttgaccttgcatctgcccttgacgttggtcccagtggaaaccgagcttcaaatggatgtgctaattccagctgtatgagatctgtgatgacaatagcatttgaatttgcatttgaaagccatatgcaagagcatgtagcatctatggcacgccaatatgttcggagcattatatcatcagtccaaagggtagcattagcactttctccttctcatttgagttcacatgcagggcttaggtcaccattgggtactcctgaagcgcaaacccttgctcattggatctgcaacagttataggtgctacttgggtgtggagctacttaaatctaacaacgaggggaatgaatctttgctcaagtccttgtggcatcactcagatgcaatattgtgctgcactctaaaggcattgccagtgttcactttctcgaaccaggctgggcttgacatgcttgagaccaccctagttgcattacaagatataactttagagaaaatatttgatgatcatggacgaaaaattctcttttcagagtttccacagattatccaacagggttttgcatgtcttcaaggtggcatttgtctttcaagcatggggcgacctgtctcatatgaaagagttgttgcttggaaggtgctgaatgaagaagagaatgctcattgtatttgctttatgtttgtgaactggtcttttgtttgacatcttgttctgagtacacttgggcttattgtatccaagtgttagataaagttttactctaagactcttgtgtgctttgttggttggtgttttactgtatttgcactaaatacttggattgcactttaaatgactatttgtgttattattagcttatgtaacttgtttccttattcaaaaaaaaaaaaaaaa

SEQ ID NO: 3551 - DNA, 1365 bp, Glycine max
gaggatccaaacgccttattcttaaagcgacaccacatagtattatagtgagtagtgtgccttctctctctctctctctctctctctctctctctctgtgtgttgcgttttgtgaaatcttattcgacatggcgtcacgggacaacaagaaggcgtcgagcagccgagccggcagaattcgcaccctctccgatctgaaccgtccctccgccgattccgacagcgactccgatggccctcaggagtactacaccggcggcgaaaagagtggaatgcttgtccaggatccttcaaagggaaatgatgtggatgaaattttcaatcaagctaggcaacttggggctgttgaaaggcctcttgatcagcttcaggagcctccaaggtcaactagctttactggaactggcaggttactctcgggggaaactacacgatctactaataatcagcaacctgaggctgttgttcataacattgttttctggagtaatggtttcactgtaaatgatggaccattgaggagtttggacgatcctgaaaatgcctcatttttagagagcataaaaaaatctgagtgtcccaaagagcttgagcctgaagataggaggtcatctgttaatgttaatctcatacggaggaatgagaactatcgtgaacccgaaaagcagcatgttgcatttcagggagtgggaagaactcttggaagcagctctacatcaatggctcctgaccctcctgctgcctcaacacctcccaacacagcaccaactccttctgctggcctggtagttgatcaatcattgccatcaacctcaatacaactcaggttggctgacggaacccgcttgatatcacattttaattaccaccacacaatcagcgacattcgtgccttcattgatgcatctagacctgggggtcggcagaattatcaacttcagttgatgggtttccccccaaagattctagctgatgaaactcagactatagagcaggcaggactggcaaattcagttgtcatacagaaattttagcaaattgctgcttcatgcgattagtcattgctggctaaatgctgcatggaagggatccagttttattaggggcttctagacgtgaggtactgttatttacaaaaacagataggaaacccccctaatgttggggggacattttcttttgttgctcaaagtttaccaagtatttgctttaggaccagttggatggcttagctttggacctatttcatgttatgatgattgtgttgtgtgtcctctttctggctgggcctagtgactgaacttgataatatattgaacacttcactgaaatgcaggatagccgtaagtcacacgtcagtttttg

SEQ ID NO: 3552 - DNA, 864 bp, Glycine max
catagctattgacacagcacgatgacgatgaagataatggtagcgataaagcgagtggtggactacgccgtgaaaatcagggtgaaggcagacaagacaggggtggtgagccagaacgtgaaaatgtcgatgaaccccttctgcgagatcgctctcgaagaagcccttcgcatcagagagtctggcttggcctccgaggttgtcgccgtcaccatgggaccctctcaatctctcgacactctccgaaccggccttgccatgggagccgacagaggcatccacgtcgactcctctgcttccctctaccctctctctgttgccaaaattttgagaaaactcgtcgagattgagaaacccgctcttctcatccttggcaaacaggccattgatgacgattgcaatcaaactggccagatgatagcaggactcctcaactggcctcaaggcacttttgcttctaaggtggtccttgacaaagagaaacaggttgccacagtggacagagaggttgacgatggtattgaaaccgtgtgtctgaacttaccagcagtaataaccaccgatctgaggctgaaccaaccaaggtatgctactcttcccaacataatgaaagcaaagtcgaaacccataaaaaaattcactccggaggagttgaatgtagaaatcaaatctgatttggagatagttcaagtcacagaacctcccaagagaaaagcaggggttattctttcttctgtggatgagctgattgacaaactaaaacatgaagctaatgtcatctaattattctcttctgtgaataatattgtaccaacattctgattttgatcaaatgactcaatgaattaaataatgttccttttt

SEQ ID NO: 3553 - DNA, 629 bp, Glycine max
attgaacccggtttcaaactttcggaccccatccctttcgtttcgtcgccacttccgaacgcgtttctctctgcctcttcacattctcgccgtcgctgctaagttcatttaggttcgcggcaaaaaatgataaagaggaggttctacaagctcgatcacggtgatagagaggccttggatccgtcttcttcttcttcttcggactccgagattgaagccgaagccgaagtcgatgcctctgaagaagaatcagaggaagatgtaacagcagaagtgaaaccgaatgatgatgaagctggttcaacttcttctgggtatgcaagtgaggatggttctgccagtgatgttgatgtcaactcagcaggtctgttatttagtgaagatgatgctggagctataaatgaaagacaagtgcttattaacagggagttgctgattaaatgtgatactgaaaagtctaatgtcttggctgaaaagaaatcccttacccgacagatacgccatcctgtgtcttaaaatgcaaatcagtatttaagtgcaagatatgtccccgaattatctgtttgtctgaggagactttgggggatcatctgggatgggagagacatgctggatctgggggactactt

SEQ ID NO: 3554 - DNA, 845 bp, Glycine max
  misc_feature (805)..(805): n is a, c, g, or t
  misc_feature (808)..(808): n is a, c, g, or t
  misc_feature (829)..(829): n is a, c, g, or t
gagcacttcttagctctcaatcatcaactatttaaaacaatggtcagaggctaacttctccactagttttctgtgtagagagctctttggacaacaccctctaaaccaatctatcaagtcctgattaatctggtgagcatggagctttgttggctcacaaccatccatggttcttgaagaagcttggagagaaaggggtgtgagaggagagggtgctcactcctcacactccctcacttaaaacagtttgttttggcttagctttggcttctctgatcaacaagggatgtgttctaacattctttcttgagtggcggaagcagatacacattctccgacggaggagaggcttggctacagcctggcaaaccggcaagtcacaaaaaaggcaatggactccattggggtctctatggctatgtagtgctcatgtagttcttcttgctgtagaatgtaataataaacaaagttggtcttccttttgagaagttaccagcttttgctgtccaaaattactcaatttgcagctgactagaattcctttctctcttcagtttctgcagatgagtaggtaggcaatttgtgatcactcccttcccttttcatgtcttctgtgttcccttttccatgcttgtttgtgttgttagttatgaccttatgaggaaataaaagaatagtacaattctagtccctcagtttaggattgtattctattgaactttattagaaaagtttccagagtcctttctaaggttggagtgaataatgttcatgatccctcaccctttccctttatactgctgcnatntctgattttgctaacacttgnaattgttcaggggact

SEQ ID NO: 3555 - DNA, 972 bp, Glycine max
tcagctacgtaggcccccccccttgttcgcgctttcaccatcttctccgttcctcatttcgcaaagccacaattgtcaccattcccaaccctaaccctaacccttctcaaacgatggtagtttctctcggtcctgggaaattctacggcaccagcctcccccgacctcggatctacaccgacgtcaagttcaacgaccaccgcgtcgacccacccgttcccgtcaacgacccactcatgtcctgggcccaagaggcccactggtccatgggcggcctcagcttcaagcgcctccgtctccagggcaaaattgaaggcaatgtcgaaaggcttcgctcccagcgcgagaagttccaggctcaaagcccaagcccaagcccaccggcacgcgccgacctccgcagatccaaaagagctgcttcccctctgactccaccggctccggtcatggcgaaacggcgaagatacatggatcttatccaagaggaagaagaggaagaagaagaaggggttgtggttcggaggaccagtgttcggaagagcggcttggtgaagaagcttggggatgattttgacagggttgccctggaaaacgatgagtccaatacggtgtcgtcgttgaagacgactcgtggtcggaaattggttaagaatggtgaacttgggaacaaaacggtggttgaagtagctgaaaaatcaaacaccaaaggaaagaagagtgcaagtgaagccgagaagagccctggggttagaacttcttccagattggctaaacgtgtgtccaatcaaacgtcttgtaattagatgtttgataaaattgtggttttccttttccttttattattgtccaattagccattctgtgtatgtttcaagatttagggtttgttcaacaattggtattttgcagtaagtcatacatgaatgaatgaaagcagatggcattatattttgcaacggttaaaaaaaaaaa

SEQ ID NO: 3556 - DNA, 2203 bp, Glycine max
  misc_feature (1999)..(1999): n is a, c, g, or t
cgacccagcgccctctgcgtttttgacaccgtgtttgttgttgtgtgtgttttccgcggaaaatcaaaatgggtatcattgaaaagatcaaagaaattgaagccgagatggctcggacccagaaaaacaaagccacagagtatcatctcgggcagctcaaggcaaaaatagcaaaactgaggacacaattattggagcctccaaaaggttctagtggaggtggagaaggatttgaagttacaaaatttggtcatggacgtgttgcactgattggatttccaagtgtggggaagtctactcttttgacaatgttaacgggcacacattctgaagctgcatcttatgagtttactactttgacctgtattcctgggattatacactataatgatactaaaattcagttactcgatcttcctggaattattgaaggtgcttctgaaggcaagggacgtggaagacaggttattgctgttgctaaatcttctgacatagtattgatggttcttgatgcttccaaaagtgagggtcataggcaaatattgaccaaagagctggaagctgtgggtttgcggttaaacaagagaccacctcagatatattttaaaaagaaaaagacagggggcatttcattcaacagcactttgcctttgactcatgtggatgagaagctttgttatcagattctgcacgagtacaagattcacaatgcagagatccttttccgtgaggatgctacagtggatgatctcatagatgtcattgaaggaaaccgaaaatacatgaagtgtgtatatgtctacaacaagatagatgttattggtattgatgatgtggacagattagcccgtcaaccaaattctgttgtcattagctgcaatttgaagctgaacttagacagactgcttgcaaggatgtgggatgaaatgggtctggttagagtttacacaaaaccacaaggccagcagcctgattttggtgatcctgtggttctttctgctgatagaggtggctgcactgtagaagacttctgcaaccatatacacagaagtttggtgaaggatgtgaagtatgttctggtctggggtactagtgcaaggcactacccgcagcactgtggtcttagtcacaatcttcatgacgaggatgttgttcagattgtgaagaaaaaggaaaaggaagagggaggaaggggacgatttaaatcacattccaatgctcctgccaggatatctgacagagagaagaaggcaccactgaagacataattatatgacacagcctgtgatttcatcattgatttttgcctagtggatgggaaaaatgactataggtgatgatacatccaaaggcaaaggttcttatcttgattgctcatgcaacataggattgaaaattcctcctgagcactaagtggggcacctatatttttttgtcacccaagtgttgtaacatcccctccccctcttttgaataatagtttttatcagttatgaagtgtgcatctatgatttgaagagaagcagaaagtaaaggaaacgggtactgcatcttgaaaattgtgtgtattttgaccaattcagggtgaaaaatggatttgctcccttggcaaaacttgaataaagttgagccgaaagatctcaattcaggataaatttatgaggaattgaggtatctttgttagaaaatggttaattgggagagatacatgtatttgatatcctgtccaaggaagagaccgcaatcctacgagccttgtcaaatggtaattcaacatagatggtacattgtggaaccaaggcaattttgaagcagctttggtgataattaattcaaccagcaaaaaaacatgaatcatgcttattgactggttaaattcattatcattaagctgcttatagcaaacaatttccataatgtatatatagcctggtgtgtgccactgcaatttgacatcctttgtcccaagacctcacagtagtttatagaacaataacgnggccaataacagcaatactttttttctttggaaaaaattaatttgtttagcatattactacttgatcgaaatcaatcaagtgttccaactacaatttctagttctgaattattagcaccatctagaacattaagtatctattgtaaagttacaaaaatattttttttatattttttagtgaaaaatatatgttacaataaaaaa

SEQ ID NO: 3557 - DNA, 957 bp, Glycine max
  misc_feature (942)..(942): n is a, c, g, or t
catgggaattttattggtatgtgtgaaaataccagggattctttacatgacacaaataaaaaaaaagaaacccatttattcttgtaattgcatttgatgattagtagtgaagagtttggttgttttagttattgttgtatcatgtgttagcctgttggattgtatggaagtgttgagcaaaggggtgcatcgtgctatggtaccggttgatgggcaggcagagaacgtggctgcagctggggtggaacttgtagagtctgcttccagctaccaaatgctgactcagatggatgtgcttaggttcttgcatgatcgtgctggtgaagctgatcgtgaactgcagagcattctctctcgttctgttcaagatttgggggccgtcactgaacagatttatgccatcactgaccgcacaaaactcgtggatgccattaagtgcttaaaggccgctatgttaaatgctgttcctattgttagagcctctgatgtcgatcaagatgatcacaagcagcacataaatggcagatgcaggaagcttatcggtacattttcttcaactgatttgaggggatgccacatagccacgctgaaatcatggttgggaataagtgcactagcattcactgaagatgttgcatcgagtcctttgtacacagaatccgaatcggacccccagattaatagaagggagcttgggacttgctttgccgaatcacccttgtctgaggttattgaaaaggcagtgactaggcatgttcatcgagtttggatggtggatcatcagggtttgctcgttggggttgtttcacttacagatgtaattagagttataagacattctctgctatcatctgattcagatgatctgtaacaaactcatcagttggagccttgctcagtctgagcattttcgaaaattagtaaaatagctctgttgctacnaaaaaaaaaaaaaaa

SEQ ID NO: 3558 - DNA, 2312 bp, Glycine max
actgtcaccgtccgataccgctgatcctcgcaatctccactatgtcttcccctcatccttcttctttcttcctctccgattggccggttcggcggctcgtttccgatctgattggctcgtctttagtgcgaaattcctccttctgaaaattcttcgttcatcgcgctccgaatcttcctctcttgttattccgaaaccgatttggcggcgccacttttcgcacgtgtgctcaaatcgttgcacttttttttttggatccgcaacgagaattccagatctctgaaacgcaccgtttttggcggttatggaggatcgggacgcgaagcggatggcgacgaggttatcggatgtggttctggactgcgtgatgccgtacatacacgactccaaggaccgcgacgccgtgtcgcaggtgtgccgccggttgtacgagctcgactcgctcacgcgtaagcacgtgacaatcgcactgtgttacaccaccacgccggaccgtttaagcgcggccgggtcccgcacctggaagtcgttaaacctgaagggaaagccgcgcgcggcgatgttcaacctgagaccggaggattggggaggtttcgtcacgccgggggtcagagagatctctcagtacttcgattgcttgaagtcgcttcactttcggcgtatgattgtaagggattcggatcttcaagttctagctcgttcgcgcggacacatacttcaagcactcaagctggataagtgctctggattctccaccgatggcctctactatatcggtcgttattgcaggaacttaagagtcttgtttttagaggaaagctcacttgttgagaatgatggtgactggctccatgagcttgctttgaataatacagttcttgagacactgaatttttacttgactgatattgccaacgtcagaatccaggaccttgaacttatagccagaaattgccccaacttaaactctgtgaaaattactgattgtgaagtattagatctggtgaacttctttcgatatgcatctgctctagaagaattttgtggaggttcctacaacgaggaatccgagaaggactctgctatatcatggcccccccccataagtcgtttgggtttgacatatattacaaagaatgaaatgcccatagtgttcccttatgcggccttactgaaaaaattagatcttctttatgcaatgctggatacagaggaccattgtacgttaatccaaaggtgccccaacttggaagtccttgagtcaaggaatgtgattggagacagaggattagaagtgcttgctcgctgttgtaggaggcttaaaaggattaggattgaacggggtgatgatgatcaaggaatggaggatgaagaaggtgttgtttcccagagaggactaattgctttgtcacatggctgtccagaactcgaatacttggccgtctacgtatccgacattacaaatgcatctctagaacacattggtactcacttgaaaaacctttgtgattttcgccttgtcttgctagaccgcgaagagaaaataactgatttgccacttgacaacggagtgagggctctactgaggggttgtgacaagctcagaagatttgctctatatctcagacctgggggattgactgatgttgggctaggttacatagggcaatacagccccaacgtgagatggatgcttcttggttatgtgggagagactgatgcagggcttttggaattctctaagggttgccccagtcttcagaaacttgagatgaggggatgttcctttttcagtgagtatgcactagctattgctgcaactcaactgaattctctcaggtacctatgggtgcaagggtatggtgcatctgcatctggacgcgatcttctggcaatggctcgcccctattggaacattgagctgattccttctagaagcgtggttgttagcaatcagcaagaagagcctgtagttgtcgagcacctggctcatattcttgcatattactctcttgctggcccaagaacagattttccagataccgtaatacctttggatcctggaacatatgttgacacctaaacttgtacataccatttttctttttcttccaaatcttgtttgttagtggtggcagtgttttagtttagagggtttcaattttctctgcaattcctagacaatagtcttgtaataagctcgtgttctttgcttccgatcaactcttgcagcaggttgtttttttcccctgaagatgctcaattttgtgaatataaagcatggattgtttctagaaaaaaaaaaaaaaaaa

SEQ ID NO: 3559 - DNA, 1210 bp, Glycine max
agcggggggtggggctcgagcgacagcagcttttccatcacacatggctccccaagctccaacaggacagctgtcacagggcaccaacttcccccatcatggaggatctactgctcacactgctccgcatttgtcttcttattctccaactcatcaagcatcacagtttaacagccagagctttattggacaacaagggaatgcagccccctatagctcaccaattaccaatcaatcatttgcttctaatgcttcacaatccaattctttagtttctcaaccatccaaggacaagtttgagactaaatcaacagtttgggcagatacactaagcaggggattggttaatttgaatatatctggacctaaaacaaatccattagcagatattggggttgactttgaagccattaataggaaggaaaagagaatggagaagcccactaccacagctgtaacatcaactgtaactatgggtaaagctatgggatcgggttcaggtatgggtcggtctggtgctggttctctaaggcctcctcaaaacccaatgatgggttctggcatgggcaatggtcctggtgttggtatgggtatgggaggctatggaggaggcatgaatgcatcaatgggtatgggaatgggggggatggggggaatgggtatgggacaaggataccagatgcaacccccaactggattgcctcccggctccaacatgccaggtaattataataactccatgatgggttcaggtagttatggtcagcagccatatggtagttatggtcagcaaccatatggcggctaccgatgagatagaacattatgcctagatagcaaggtgaagtacattactgattgttttgctacaagttgagaaagagaaatgccaatacagtgctactagtagtagtctgtattttgaatttatagcggtgtatcattaaagctgcagtttgctgtaaagtgacccagtgtgatgtatgtgtatttcttgttataaatatgctgttaccattctttttgggtcaccctttctgtaggtgctttgagcatcaatgttgtgtaccagtgactggatataataaccttgcttgggttattgctttctttgcttgttcctcatttttttaacaccaacaggtggtttgatattaatataatttttccattgtacttttaggatcggaaaaaaaaaaaaaaaaaaaaa

SEQ ID NO: 3560 - DNA, 902 bp, Glycine max
aaggcacactcccttatttaagcaacatcccaatttcatttcagttacccaaaaatggcatcaaaactgaccctgattgcgttggttgttgcggccctgtgcgccgttgatctaacccagagagcatcatcatcatcatcatcccctcacgcgccagcgccctccgtggactgctccaacctggttctcaccatggccgattgcttgtccttcgtcaccaacggcagcaccgtcacaaagccagagggcacatgctgctctggtttgaagtctgttctcaaaaccgctccggcgtgtctctgcgaggctttcaagagcagcgctcaattcggcgtcgttttgaatgtcaccaaggcaaccactctccctgctgcctgcaaagtctctgctccttctgccaccaactgtggattgtctgagacgcctgctgctgctcctgctggaggcctctctccacaagcttctccatctccccaacaagcagcagatgcttctactaatggtcctgtaaatgaggtatctccagcaccagcaccagcaccagctcaagggaacacagcatcagcattattcccaatttcagctatctccttgtttgttgccatattggtagccacattctcaggcttctgagaggagtttcgttccattttaaagtgtagagagatgacatgagggattattattattttgatgttttctttgggttttaccattggagagctcttcttcattctatgtttgacttaaaacttaaaaagtagataacattcattctgggagtgactcgaatctattttgaggttgtacccgcattttcattatatataagtctatttatttatataactatttgagttgccatattatattaaaaaaaaaaaaactcgagtcttgttctc

SEQ ID NO: 3561 - DNA, 2801 bp, Glycine max
aagaaaacgataaatcctgcggcgggacagtaccaactgacgcacatcattccctctctcttcggatcttaccgccgacgctcagggcggtgccaccgtcacttcgatctccctctcatactgagaaggtaaagtcgttaaccatggccgaaggctctggtataaagagttgtgaaactttggctctttctggaggttgaagaagcttgtgttatcaggtgacatctccgatgtagcagcagttccgttgagtgaaatctgtgttgtagagtaagctgttgtcatgtgagaacttttaagagttttttcgattttacagaatttaatatgattgtttatggaaaaaactcttctctgcgacatcaagcgccggcattcgacattggtgcttgcttgacagagaaactctctgccactgccaccttcgctgctggcattcaagtttgcctcttctctttttccttacatgtatcctgatttggacacctgtttacatgatgagatggcggttgcaacctttaaaggacctcctagtgagtgttgtgggaatgggaaaatggaaagaaagccttctgggaggagacgtgtgtttgttcagactgaaactgggtgtgttttgggaatggaattagatagaagggacaatgcccatactgtgaaaaggaaattgcaggttgccttcaatgtcccaactgaggcaagctcacttatatgtggggacatggtcttgaagaatgacctaagtgtggttagaaatgattctccacttctactcactaggacctttttacataggagttcatctaccccttgcctttcacctactggcagggatcttctgcagagggatcagagtggaccaattgaggttataggttgctcagatatgttttcaggaaccaaacagctggttaaggatattatgaaggcaataaaagttggcattgaacctatccccattcagagtggattaggaggtgcatattattttaggaacagcaatggtgaaaatgctgctattgtgaaaccaactgatgaggagccttatgcaccaaacaatcctaaaggttttgttggcaaagcccttggacaaccaggactgaaacgttcagtgagggttggggagacaggtttcagagaagttgcagcttaccttcttgaccatgatcattttgccaatgtgccctctactgcccttgtaaaggtcacacattctatttttaatgttggccccccccccaatggtagtatgcatcataacaaaaagcaaataagcaagattgcatctctgcagcagtttattcctcatgattttgatgcaagtgatcatggaacttctagtttccctgttgctgctgttcataggattgggattttggatgtacgaattttaaacacagacagacatgcaggaaatcttctggtcagaaagcttgaagggtttggaaggtttgatcaagtggagctttttcccattgatcatggtctttgtctccctgaaactttggaagatccttattttgaatggatctattggcctcaggcatcaattcctttctcagatgatgagctcgactatatatatcacctagacccatttcgtgattcagaaatgcttagaatggagcttcccatgattcgagaagcatgcttgcgggttttggttctctgtactatcttcctcaaggaagccgcagcttttggtctttgcctagcagagattggtgacatgatgagtagggaatttcagggtctcgatgaagagccaagtgagcttgagcttatctgtattgaagcaaagaaactgttagatcaggaagaattattttcctttgaagctgaggtaggagacaaagatgtgactcagtttcagttagattgtgaggatcaggatttggatttcactacaaacatagaagagaaactgactgtaatgccaccatttcaagttggagcaagaaatggaaacattagaaacacactttctagactagaggaaagcatgatggaggacgaggctgagagtgaaggggagttacccgtaggtggtggtgaatacaatggtcctgtgttaaatggggtgcctaatgtttcaaagctttctgtgtctctgcaaaacacgagaactagtgaaaaaagttggcagcagatgggtgtaaagcaaaagagtgactttttggctgggacatcatctggaaacacaactgtgaatgagttacctgcaagctcaagtttcgtgaagctaacagatatggatgaagagaggtggaatcagtttcttgagaatttccaaaggttgttgatcccagattttgttaattacaaacgaggaaatgtgagcaagaagcagaggcagaggcttggaacttcatgccagttttagggggaccataaatgaaatgtgaagtgaaccaataaatattagaggcttgtacaatgtgtcatacggcacacatggaactatatataaataaataaatacagaggctttatattcgcaacactgaggaggagggagtattcaggagtaaatagtaaatgaagattatcaggtagtaaggtcttgcatcagcaaatagagggagagcttattcaccagtagaagtgaagactatgtcctgatttactccttttaattttactcgctttatgttcactggttagtatgttgaataattcagagtagatgccaaaataaatttgtatatacctatgttttcctgaagatataaataatacttgtagtgtggtttgttagtcgcctttaaattcttctgtttttatcttttggtgaaaaaaaa

SEQ ID NO: 3562 - DNA, 1815 bp, Glycine max
  misc_feature (1776)..(1777): n is a, c, g, or t
cgcccgcaggaccggtccggattccggcacgcgtcacgcctcagctacgtaggcccccccccccgagcacttgtttgtgttaggtactctaaatcttgagttgagcctgcgcaaaaaccctaaaccctgtgaatgaagaagacgaagaagagtggcgaagaaaatgggggcaagctcaagttcaagggcgcggagaggtcagcttacttcgcacgcagagaggcagcgaaggttttgaaagtgattctcgaaggagacgccaaacgccgcgctctagcctccatcaaatccctcatttatcaaccttccgttagaaacaagaaggccacattcgctctcatttgtcaaaccctaaaacatcttcccattatcaaggatgtcttggaagctgcttctattctcaacaccaagtggaagaggcaacgagaattgatttatatcattgtctatgatatccttttaggccaggcggtttcactagttggtgatgctgagaagtaccttatgcgccaccaagatgccctgcgttcaaccctcaaacagcttttgttacagagaaatgtcaagacagttaaacagttgattgctctgcatcaagttcctgatatttctgtacctcgatatgttcgtgtgaatacacttaaactggacgttgattctgccttgcttgaacttcagaaaaactactcggttcaaaaggatcatttactgcctgacttgctgatactcccaccaggaacagatttacatgatcatcctcttgtcaagaatggcagtatctttctgcaaggtaaggcaagttccatggcagcaccagcccttagccctgaaccaggctgggaggttcttgatgcatgtgcagcaccaggaaacaaaactgttcaccttgctgcccttatgaagagaaagggtaagattattgcatgtgagctacaaaaagaaaggattaaacgtttgaaagacactataaagctatctggtgcttctaacatacaagtcctcaatgatgatttcttgaacctaaatcccaaggatccttcatactccaaggtgaaagctattcttttggatccttcctgctctggttctgggactgctgcttcaagactagatcatctactcccatctaaagcagcaggtcaggatgctgatatggaaagattgaacaagcttgcaactttccagagaaaggctcttcagcatgctttactttttccagctgttgaaagaattgtttatagtacatgttcaatcaaccaaattgagaatgaagatgtcatcaaatctgttctgcccatagccgaatcaaatggatttcagttggcaaagccattccctgggtgggaatgccgtggtcttccagtgtttgaaggctctgaatgcttggttcggacagatcctgctaaacatggcgagggtttcttcattgctttgtttactaggaaagatgctaacttttcagggcgatcaaataaaaatgaaactagaatttccgacagcactgccgaaattaaaaacgcgcgaagaaagaagaaacgtgtaccgtttgttagcacaaacccattcaaaacgtggttatatgatagtaaaattgttaagtcttggcggtcgaattgaaggtataaaagaggtggctaaagacataatattgtactttactctattgatgtccgtgtaaaacccatttagaaaatggattaacttgattttttgttcccatttttaaataattttcattacattcgttcccaaaaaaaaaaaaaaaaaaaaaaaaanngacgcggccgctgaaaggatcaagcttacggagcggca

SEQ ID NO: 3563 - DNA, 2806 bp, Glycine max
  misc_feature (732)..(732): n is a, c, g, or t
aagccatgaaaacgctaccgaaagtccaaaacagacaaagtgcgcaaacctggtgacagcactctttagaggtgacgtgttcgttagcaattgccactgtgttgtttcgttcgtgttcatagcaataagctaagcacagcaaagaaaccaaatcaaatcaaaagaagaatcagaagaaagaagatgggaatggcggtggcgagtgacgatttgctgagcaagaaagctgcggcgatgagagcgtctctggagagaagccaagccatcacagacgacgtcgtctcgattctcggctccttcgatcaccgcctctccgccctcgaagccgccatgcgccccacccagatcagaacacattctattcggaaagcccatgagaatattgataggactttgaagtctgcagaggccatattggctcactttgatcaatattatcaggcagaagcaaaaatagttaaaggaccacatgaagatgtgaagaactatcttgaagcaattgatcagctgagaagaaacattagattttttggtaataagaagggttttaagaatgatgatgatgttgtcatccgtgccaacaatttgataagcgaagctatttctaagctagaagatgaatttaagcggctattatcatcttacagcaaacctgtggaacctgagtgccccggtcgtccccgcccccgctcaatgcgaccttcagcagcatcaccaggtcgtgatggtgantcctaatgggaaagaatcattcttctaatttccattctgagttacataaaaataatgctgatgctgttcaatacacacttcctgcttcttattccaccaagaattttgccactgctcaataatttaacccagcaaatggttcaagctggtcaccaacaacagttgctcaaaacatacagagatacccgttctaaagtattggaagaaagccttcaaaagcttggtgttgagaaactcagcaaagatgatgttcaaaagctacaatgggaggttttggaagccaaaattggaaactggattcatttcatgcgtattgctgtcaaattgttgtttgctgctgaacggaaagtttgtgatcagatatttgaaggatttgactcacttagtgatcagtgttttgctgaagtaactacaaacagtatttccatgctacttagttttggagaagcaattgccaaaagcaagagatcacctgaaaagttatttgtacttttggacatgtacgaaatattgcaagagattcatgcagagattgaaatactctttaaaggcagagcttgcactaaaataagagaagctgtaatgggtttggcaatacagcttgcacaaacagcccaggagacctttggagattttgaagaagcagttgagaaagatgctacaaagactgcagtaactgatggaactgtccatcctttgacaagctatgtgattaactatgtgaagtttttatttgactatcgatctaccttacaccaacttttccaaggaattgaaggtgattcttcacagctagcatctgtgacaatgcggatattgcaagctctccaaaccaatttagatgggaaatcaaagcactatagagaccctgctttgacacatctatttctcatgaacaatattcattatattgtcagatcggttcggaggtctgaagcgaaggacttgttgggggacgattggatacaacgacataggaagattgtgcaacagcatgccaatcaatacaaaagaaatgcttgggcaaagattcttcagtccctctctattcagggcctcatctcatcaagtggtggtggtggtggtagtactgctagtggcgatgcagggagtagtggtgcttcaagagcaattgttaaagacaggtttaagacattcaatactatgtttgaggaacttcatcagaaacaatctcagtggacagtaccagacacagagttgcgtgagtctcttattcttgcagttgctgaagtcttgctgcctgcctacagatcatttgtgaaacgttttgggccactagtggagaatgtaaagagtactcagaggtacgtcaaatacactgctgaagatctagagcgaatcttaggtgagttttttgaaggaaaaaacatgaatgataataagcggtaatcggagccatgttggaggtaggctagtttgcctctacatcatggtatttagagatcaataggatctagattttacatttagcacatatggaatttttaatgtcttagtttatctcttttgagatgcatatatatgtaataagggattggtgccccatcaaacatggtgaggtcaaaggtcataaagttcaaagtaaaggagaggggatagaagtaatctgttattgtatttattgatagaataaagagatatgtaacaagtgatacacaaactatatttatagaagcgatgagcatgggagctactggaatgggatctatataagtaaacataatcagaaatgctagctaagtataggcagttgcaataaataagccacctaacaaactaacccatgccaaatccatgagctactatgcaactatgatcttgtcactacatgtttgatttcacatttaaggttctctgacgcgcgtcaaccggaagcgaaaattatagcttctgcaacgtttatttgtatttgatgcagtttcattagataacgtgtatataatgccaataagttaggttggaaactaatggggacttgaacttattacttgttagatgaaagacgtatattgtactacttctgactccttgatatttgaattgccatttattt

SEQ ID NO: 3564 - DNA, 1142 bp, Glycine max
ataccatatacaattgtagcaccgatcgaaaagtttccttgacaatctaattctgcaaaaatggcaagcaataaggagtctaagttcccagcacagagccagaaaactcagccaggaaaagaacatgtaatgaatccactcccacaagccacaaatcctgatcacaaggccgccaataaactccagggaaaggtggcgttggtgacaggaggtgactcaggaattggcagagcggtttgcctgtgtttcgcaaaagagggtgcaaccgtggcctttacatacgtaaagggccatgaggacagggataaagatgatactctgaagatgctgcttgaagctaagacaagtggtgcagacaatccattggcaatagcagcggatattggctttgatgagaactgcaaacaggtcattgaccttgttgtcaaagaatatggccgccttgatgttctggtcaacaatgcagctgagcagcatttgacaaactctgttgaggaaatcacacaacagcagcttgagagagtcttcggaaccaacatcttttctcagttctttttggtcaagcatgctctgaagcacatgaaagaagggagctgcatcataaactctacttcagttaatgcatacaatgggaatccagaagcgttggactacactgctaccaagggagcaattgtggccttcaccagaggtctttctcagcagctagcgagtaggggaattagggtgaatggtgtggcacctggcccagtttggacgccaatacaaccagcttcaaagcctgctgagatgattcagaacttggggtgtgaggtgccaatgaaccgcgtggctcagccttgtgagattgcaccatgttatttgttcttggcaacttgtcaggactcttcctactttactggccaagtcctccatccaaatggtgggatggtcgtcaacgcttaagctatagtgtgccttcacctatttcctattgaactggtttttctagcttacccctcctgaataagcagtgttacgttcggatgcatattttacgttgaaatacattgtgtttgtagcatatatgccttgagatgaataaacctttacgtgagttatttatcttccaaaagaaaaaaaaaaaaaaaaaaaaaggacgg

SEQ ID NO: 3565 - DNA, 937 bp, Glycine max
aaaaaaataagaaatcaatctcttaaaacacaatgaagaaccaatattggatcatacactaatttattttaatatctttttatttgtataaatttcaaaataaaacctaaaatcagctgttaatggatatagcataaagtataatcctgattggtgaagtgtgagagagggagcagcataaggcagttaggcactcttgcagcggatctcagctcgaacgaaacgaaaccttggttcctttctctctgtcctcactcgagtgcgcgtctatgccaaagagagtgagtgagtagggtttcaaattccaatcggaagaaatcggaatcggaaaaaatgggaggtggcggcggcgatcacggccatggacacggacacggtgatttcaggaacaaggtctggagtatgagcggtggcccttactgtcgcccaaagcactggaagcgcaacaccgccattgccatgttcggcgttgtcctcatctgcatccccatcgctatgaaatccgctgaactcgagcaacgaccacatcaccctgttcgccccatcccttctcaactctggtgcaagaactttggaactaaagactataatgataatgatccatgattcatcaattgcatcactggtgttcacatcatgtcaagcaacatttatttgttaaatgctgagaatatgaacagctttaaagagttgctgttgttgatgttatgcaagacttggatctaggatcatcatgtagtgacatacttttgttttcttgcctttttggcaatggacatccattttagaaacgatgaaattaaataagtgcttatttctgattttttttttttttatttgcgagcttgttgaaaccgaaattactggttactataataatggtaattgtgctttttatcagtttagctaaaaaaaaaaaaaaaaaaaaaccaccaaa

SEQ ID NO: 3566 - DNA, 821 bp, Glycine max
catcttcagcttctgctgtttgcttgagagcagaaactcttgcttccaaggataaatcatacccctgacgaattttactcagttcttgctttgcaacatcaagttctgtaattacagatgcaaaattattaccggcagtttctaactcttctttccaagcatgattggttccatcaggatcaccacatttttcttctttaagctgttttgcttgactttttgaagcttccgttgcctgaattgctgattctctggattcactgagaactttaagcttttgtgagagatcctcaaccactcttttagccttttcaagctccaccaggacttgagctttggtagtttctgcattctttagttgttcctttaattttttcagatctttctgggctaagtgaagttgtctctcctttgcccaaacactctcagcaaaataagatttggccttcttaatgggagcattgggaggtgtttcaccagagaaagcaccttcaccaaatagagaaacagcatctttaacagattgaaaaggtggactggtgtcaatctctccaaccactggttttgttggatttggagagttagcagcactttgcctgattttggctaccatagtgtcttttatttaaataataataccggcctttgaagccaacctttcaaaggggtgcttgttgaaaattttcaagagggcatggaaagtgttgcattgaattgcagagtgaaatcgcggggaagaatcttcacaaacttgtgaggagggaaagaaagagaaagaaacaaagagagatgagttcccacgcgtaagcccacgcgtccgg

SEQ ID NO: 3567 - DNA, 1789 bp, Glycine max
ggaattcggcacgaggttttactttcaggtttcagccacagctgctgtttatattcacttcttcaaccctcatttctggttaaatcagtactcactctctacccgtttcctgataatccctaatttgatccaaatgactcacttgtaatttcttataaaaaaaaattcaattctaatcacttcaatcaaccccaatatcttgaacacgaatgtcagacatggatccgtccaaaaaagtggccgatagatatctgaagcgtgaagtccttggtgaaggtacctatggagttgtgtacaaagctattgatacccatacagggcagacggttgcaattaagaaaattcggcttggcaaacagaaagaaggggtaaattttacagctcttagagaaattaagctgctaaaagagctcaaagatccaaacattgttgaattgattgatgcattcccacataaagggaatttgcatcttgtttttgaattcatggagacggacctagaagccgtcatacgagaccgaaatatttttctttcaccatctgatacaaaatcctacctgcaaatgacactaaaaggtcttgcttattgccacaagaaatgggttttgcatagggacatgaagccaaataatttattgataggatctaatggacagctgaaacttgcagattttggtttagcacggatgtttggaagcccagatagaaggttcactcatcaggtttttgctcggtggtatagagctcctgagctattatttggtgccaagcaatatggtcctggagttgatgtttgggctgcaggctgtatatttgctgaacttcttcttcgtcgaccttttttgcagggtacaagtgacattgatcaattaggaaagattttttcagcatttggcactccaacggcttctcagtggcctgatatggtatacctgcctgattatgtcgaataccaatatgttcctgccccccctctgcgttctttatttccgatggtaactgatgatgctttagatctgttgtcaaagatgtttacatatgatccaaaagctagaatttcagtgcagcaggcactagagcataggtacttttcttctgctcctctgccttcggatccagacaagctccctagacctgctcccaagagggaatctaggacttctgatttcaatttacaggagggtcctactgtattatcacctccaaggaagtctaggagagtgatgccaggacgtgatgggtttgaaggaagttctctgcaagcagataaggttgatgccagttttggtgatttcaactgatgataatacagtgctgacagatcatatttgaaacgaaaattagatctagaatttcaacagccagaatgaatattctgtggccgacacattcatacaaacttatggagggcaaaatacatttgaagaaaagtggtgaatcctcaaaggcttgctagtatgtcattctctatccctgtttctcagtgtgaagctacaacaaatatgtaactgaagaagtcactgaagattagttgcagttcagataccttaagtaacttctatagaaaaaaaattaaaaacttatatcacacactcactctggtccccccttgtacatttttgttctgtacgttttcagagaactagtatactcgagttcatggaaaacatggagtgtgaggacattttctcgagccgttcctgtatatggcgcttgaaaaaaaaaactttaggggaccttccgaaaaaaaaaaaaaaaaaaaaaaaaaaaaagcggccgctctagagga

SEQ ID NO: 3568 - DNA, 1383 bp, Glycine max
ccacgcgtccgatccgtaggtatgtgcctttccttttcagctacgtaggcccccccccctcttttaatttccacaattcatgattctggtggctttgtttgagttagacacccaataaaatcaagtaatcttttaggttgccatgtggtggaatctgtaattcgggtaatgcccctgtcgagatttgctgccggtgcattcagtgtggtcacaatttgtttagtagccatattgcttcttctgggcttcgtgtgcattgcatactcatattactttcggtcacgcatccatcatgatcagttcagctattttagtggtccctggatcatcagaatcgcgttcatactgattgcaatctggtggggtcttggtgagattattcggttaagtctgctaaggcgcggccttcacttgcagtggcaatggcaggaggaaagtatatgcaaatggtacattgtatcaaatctggggtttgcagaaccgtgtctcttcctcacaattgtctttctcctccgtgcacccttacacttacagactggcggcattatcaatacaaaatggaatgtgaagacggccggatacattctgctttactgcttcccactttttgttcttcaactgtttgttatttttgttggaggagagttcaagtcatcatcatcatcgtcatgtacttaccctttactaagcactcttctccttggcctttttgcccttattctgacctcgtacctcttctggcttggaagccggattttgaaattagttattaataagggtttgcagaagagggtatacacattggtactctcagtctcaggcttccttccattaagggttgttttccttggtttgtccgtattatctggacctgaggattttatgtttgaggcctttgctttcttggctttccttgcccttgcgtcttgtgctggggtgtgcatgtgcatgcttgtgtaccgtccacttgcagattgtttagcgctcgatattaatgataccacgtctcttataaaaggagatagggatgccacgtttcttcaactaagcctcttctctcccactccaaaccgatttctttcttttctggtaaagtaaatcacaaagccttttattcttcttttcacactcctaattctaggcataactctttttctttgcaatttgtagccagtcctttcctgtaccatctccacactttttcttttaccggtttctatttgaaatcattgaatacattttgcttaattaaaataaactttaaaaaatgtcatttcttaactttagtttcttcatttattttgcaaatttggttttgtattattttaattatgtaattttgatttattcgttaacatttaaaatttagtcaaaaaaaaaaaa

SEQ ID NO: 3569 - DNA, 1526 bp, Glycine max
  misc_feature (1469)..(1469): n is a, c, g, or t
  misc_feature (1475)..(1476): n is a, c, g, or t
  misc_feature (1482)..(1482): n is a, c, g, or t
aaaggaacaaattactattttagtgacaaaatcaattggattttgaaaaatctgccttaaaaatgatttgtaccaaaatttatgatccttaaccacggagaacacttttttacattgtaaatttgtaattgcatggaaatgaaactttgaaaattatccttataaaataattatttaatttataatttataaaagtaaaaaataattttaatttgaaaagtataatatgaacacgacagggtttctttccgaagagaagagaagagagatctgagagaagcagagctgaagaggtgaagtgaagatgatgtccggaaaatatacgtcgattgacgcgcagcagcttcagggatctgttcctgccgttccagattcacgacccgccaccgtcaatttcgcagattcaaatcttcagacttttcctccttctggagctcagggcaagatcaccgctgcttccgggcctcctcgtgacgctgatgattcattttcaaaacctgtatctggttctgatgaaccgcagcagggtggttggtttcagacttttacaattgctgcttacaaaccatactttgatgttgacacttcagatgttctagagaggattatcgactcactatttccatttagaggatctttcaatgaaaaaactgctaccaaccctgatttgtatggtccattctggatttgcactaccttgatatttgtagcggcatctattggcacctttgtgacatacatagcgcacaagctaaagagcaaagaatgggattatgacataaatctggtgacttggtctgctggtttgttttatggctatgttaccattgttcctctttgcctgtatgtaatcctcaaatatttctctgcaccggctggccttgtgcaactattctgtctgtatgggtattccctgtttgtctttattccagccctgtgtatgtccgttgtgccactggatatatttagatgggtggttgcaggtgtggcagggttcatgtcagcaacatttgtggcactgaacctccgggcacatatcaaatcagcaggtgaaaggtggttcttgattgttgctggcatttttctgttgcagctggctctagctgtggtactaaagctttacctcttcactgtatcagtttaagaggaaactggacagtatggatgaaatatatacagaatgaaggtatagctttttggcattgtaggttttcatggatacaatttgtagctgaagcatgattcacagattaaaccatcgtgtattcattcttttgttgcaatatagaggcgaataacttgtgatcatcataaaagcacttgtctttgacgttgttaatgcaagttataatgcaggcttctgtgattcttttgttacaaaaaaaaaaaaaaaataaaaaaaaaaaaaaaaaaaaaaaaaaaaaaaaaaaaaaaaaaaaaaaaaaaaaaaaaaaaagaaaaaaaaaaanaaaaannaaaaanaaaaggtttctcaaaaccgccaaccccaagggggggcccggaac

SEQ ID NO: 3570 - DNA, 1454 bp, Glycine max
tcagctacgtaggcccccccccccccccgaccaccttcaaacacgtctctatagtctctcctatgcgttaagtactcgccacaccagaaagaaagaaagaaactctgcatgtctgacacaaatcgcttctctctcactgtgtgatctaagacacgacaaaggacaaacgcatcctccgtttctctctctctctctctctctctctctcttccttgctgaatgaacatggttttttctctgtccattggctcttctgctgcattgcccctcagatgcacctccaagctcacttctttcagggttgcttctgctgatgccgatggcttcccttcatttctccccagagaacttcacaccattcaagacccttttgccagaaaattcgccttgcgcattcagaggctacccgtgcctgttaggttctcagaaaatcccatcatgagtagttgtgtgaaaccactggtgcagaccaaggaaaccccagttgttcttctacatggttttgacagctcatgtctagaatggagatatgtattaccattgcttgaggaatctggtattgagacatgggccattgacattcttggtttgggggttttctctgatttaggaaaacttcctccctgtgatgtggtatccaagcgtgatcacttctaccagttttggaagtcttacattagaaggccaattatattggttggaccaagccttggctctgctgttgccgttgactttgcggtcaattatccagaagctgtggagaagcttgttctgattggtgctagtgtatattctgagggaactggaaagctagcaaccttacccagagcagtagcctatgccggggttaatttattgaagagccttccgttacgcttatatgccacctatttgaccttcacaaaaatttccttcagcaccagccttgattggactaatgtgggccgtttgcattgtttcttgccttggtgggatgatgctactgtggattttatgacaagtggtggttacaatgtttctccattgataggaaaggtaaaacagaaaacactgataatatggggtgaaaatgaccgcatcatcagcaataagtttgcagtgcgactccactgtgaattacctgatgcaattatacgccaaataccaaattgtggacatcttcctcatctggaaagaccagattctactatcaaactaattgttgaatttgtgcaaagagagagcaagacattaagtcaatgtgttgcacaagtatgaagattgaaaatcagttggtgatatatagaactaattaagaatgctccttccctatttagaggaagatagaagcactgttgctgcagtagccttatattgttaatatcatatgtctcttatattatatactgatattgactcttttaaatgttaaatgagtttcactttaaaaaaaaaaaaaaaaaaagagaaagaag

SEQ ID NO: 3571 - DNA, 1126 bp, Glycine max
gcaaaacatgggaaattcgatgaggtgatcgataccctacgatatgtagatatgaggaatttcagtattttacccgatgtttactcgttgaccatatcttgttttggaagagaaggacagcttgagttgatcggcgacgtggccccccccccccccccaagaggtatccatatctgttctagaactgctaatgctttccttttgtattgtagtatttttggttctttgaaagagatggagaatgcgtatggccgccttaaaaaatctagatttctgatagagaagggagcgattcgcgctgtggcctctgcgtatataaaggagagaaaattctacgaattgggtgagttcctaagagatgtgggtctacataggaaaaacgtaggaaaccttttgtggaaccttatgttactttcttatgctgccaatttcaagatgaaaagcttgcagcgagaatttgtcagaatggttgaatctgggttccgtcctgatattacgaccttcaatattcgtgctctggccttctcaaggatggctttgttctgggacctccatcttagcattgaacatatggaacatgagaaggtcatgcctgatctagtgacttttgggtgtgtagttgatgcatacttggatagaaggcttggaagaaacttggattttgctctaaacaaaatgaacttggatgattctccgcgattattaacagatccttttgtgtatcaggccttaggtaaaggggactttcaaatgagttctgaagcattttttgagttcaagacacagaggaaatggacttaccgtgttttgatacagaagtatctcaagaaacattatcgaaggaaccatatattttggaactactaatacatagttccattcaaattctaggcaagtagttaattggaatactcttttactgaattgctagcaaaacagtgctgcattcactatgtagttgactcgaaacgatacttgatctaaaagtttttgatttcgtttataaaagttttttttataagagatttaaaaaagtttgtctttaaaatcgtatttgcatcgtcatattaataaacgatacttgatctttcaaaaagatttgcaaaattatttgaaacataattct

SEQ ID NO: 3572 - DNA, 1278 bp, Glycine max
gcacgagctagtctcggccgcccctttttttttttgtttggatacaacgcagacgataatttacctttctcgcaaacggaagaaaaatagaaatgcctgtagaaaaatattaaactacacttttttacattgcattgcaattctaaacaaacccctcaatttccgaacgtgggtggacctaacattttccatttttaatgaacaaacacaaagcaaagcctccaaaatatgacttattcaacccttcccaatgtcgtcataactaatagattttttttttcttacacacgctcgaaataggttcgtatcaacggcccacgacggacggtcctgatcaactcaccctaatcgcttcgatcatcatatcaacggtgcagattaaatcctccgtagcttctcgcctttgatcacgggattcgcccgtgctatctcctctctccccaccgccttgaaatcgaagccacacgcgtgtttctcggggtaccggtgagtcccacaaaacgtggttccgcacctgcacttaaacccagtcaatcccacgcgcttcctacacgcgccgcaccggttcgcctgaaccggtgcggccacatctggcgaactcaccaccgacggttgagggagggattcaaccggcgccggaagagaatccacggcggaggcaacggcgacggtggcggaggaagatccagaaagagcggtttcgattgtggatttagttttggcttgttcttcttccttcaaacggatgtctctgtagcatttggaacagagattcattgtggcggggctaccgaagaagccgcagttgttggagcagagtctgtgaccttcgggagcttggcatcggtgttcttcggccatgtttggatctgtaagaagagaaaaaaaaaatctatagcagcgtgaggttgttgttgatgacgaatatttcaagcgtttgtatgattccttcaaaattcgaggaataattgaaaaactgatgaatctctcgcgttaggctttttggaattattacgtataaatagaaagaaagaaaaatagagattggaaattcaacaaaggcgtgccgaaaataggggaattttgtttgtacaacgaaattgcaagaatatgtttcttttttctttttttttataaaaaaaaaaaaaacgagaaaaataaagggttattgggatgagaggtctccctattttcctgcacgccggtctttttatttcttacgccacccgcgctcgtctcgcctccgctatcccggccagctccgacgagacgaggaaa

SEQ ID NO: 3573 - DNA, 1786 bp, Glycine max
acatacataatacatcattttataattagtatagataaaaaacatcaaaatatacaagttagaaccgattaacacaacaacaaacatgctctttagctataaagagtagattgcgtttaacattcgctcccgaaactagatgacaatcgttaaagtccaactactagtatgttcggttttacatatgaaaatgtaattttctatatctcgaatataattttaaggaagcaagaaactactagtaatgaatatacagtagctttcatatcccaaatgtcatttttccattcacaaaagctaatacctcaactgggagaccccaattgggccttgagttcatccactctcacaccttttgggtcccacggaagaaacagtgcacagcggccacagccttccttccagaatagttttgatttatccccacacatttataatgagccaatgtataatgtgatcacaacttcccactatcggatttagaaattatattcgaggcgtctacttgattttttacctatattcatttttcaaccaaaaatccaaacaccaccaaaaagaaagagtttttgtgtgttcgtctggatacaatgccgacgataatttccctttctggcaaacgcgccacccactagaaaaatagaaatgccgtagaaaaataatcaaactaaacttttttacatttcatttcaattctaaacccctcaatttccgaacgtgggtggacctaacatttttccacttttaatgcacaaacacaaaccaaagccaccaaaatatgacttattcaacccttcccaatgtcgtcataataatagatttttttttttttacacgctcgaaatcggttcgtatcaacggtccacgacgaacggtcctgatcaactcaccctaatcgcttcgatcatccaacggcgcagattaaatcctccgtagcttctcgcctttgatcacgggattcgcccgtgctatctcctctctccccaccgccttgaaatcgaagccacacgcgtgtttctcggggtacctgtggctcccacaaaacgttgttccgcacctgcacttgaaccctgtcaaccccacgcgcttcctacacgcgccgcaccggttcgcctgaaccggtgcggctatatccggcgaaatcagcaccggtggttgagggagggattcaaccggcgccgaaggggattccacggaggaggcaacgacggcggttgcggtgacggtggcggaggaagatcctgaaagagcggtttcgattgtggatttggttttggcttgttcttcttccttcaaacggatgtctctgtagcatttggaacagagattcatggtggcggggctaccaaagaaaccgcagttgttggagcagagtctgtgaccttcgggagcttggcatcggtgttcttcggccatgtctggatctgtgtgtgtgtgtgtgtgagagagagagagagggagagagagagagagaatatctataacagcgtgaggttgttgatgatgaatatttcaagcagtttggatgattccttcaaaataattcgaggaataattgaaaagctgatgaatctctcgcgttaggctttttggaattatcacgtataaatagaagaagaaaaaaaatcacagattggaaattcaacaacggcgtgccgaaaataggggaattttgtttctacgacgaaattgctacaatatttttttccataaaaaaaaaacgaaaaaaataaaggggtattgggatgaggggaggaggcgaaagggttagtacctgatttataat

SEQ ID NO: 3574 - DNA, 871 bp, Glycine max
  misc_feature (198)..(198): n is a, c, g, or t
cttcgttagtttttgccttttatccaggggtttcccccgtgttatttcttttttcccccccgctttgaaatcgaagcccccccgtgtttttgggggtactgtggtcccacaaaaagttgttccgcacttgcccttgaacccgtcacccccacgcctttcctacacccccccccccccggtttcgcttgaacccggtgncggctaacttccggcggaaatcagcaccggtggttgagggagggattcaaccggcgccggaggggatcccacggaggaggcaacgacggcggttgcggtgacggtggcggaggaagatccggaaagagcggtttcgattgtggatttggttttggcttgttcttcttccttcaaacggatgtctctgtagcatttggaacagagattcatggtggcggggctaccaaagaaaccgcagttgttggagcagagtctgtgaccttcgggagcttggcatcggtgttcttcggccatgtttggatctgtgtgtgtgtgtgtgtgtgtgtgtgtgtgtgtgtgagagagagagagagagagagagaatatctataacagcgtgaggttgttgatgatgaatatttcaagcagtttggatgattccttcaaaataattcgaggaataattgaaaagctgatgaatctctcgcgttaggctttttggaattatcacgtataaatagaagaagaaaaaaatcacagattggaaattcaacaacggcgtgccgaaaataggggaattttgtttctacgacgaaattgctacaatatttttttccataaaaaaaaaacgaaaaaaataaaggggtattgggatgaggggagaaggagaaagagttagtacctgatttataat

SEQ ID NO: 3575 - DNA, 890 bp, Glycine max
tatgatacctaaaatacgagcaattaatgttcgaactaagtagatccgatccgatgtataaataagttgcagctacgtagggccccccggggaacttcaagggcaaaaaaagttgtgctgtgccgcctcttccgtaggcagcagcaatggcctcaaatcccaaaactttgacctttgaggaggtagctaagcacaacaacaaaaaggattgctggattattatcaatggaaaggtgtatgatatcacaccatttttggatgagcatccaggaggtgatgaagttttgctgacgtcaacagggaaggatgccaccattgattttgaagatgtgggccacagtgattctgctatagaaatgatggaaaaatacttcattgggaaggttgacacttccactcttccacccaaagttagccatagtctgccacaacctacacaaacacatggcgctggcaatcaatcttctggatttgttgtaaagatcttgcaattcctgttgccattgttgatactgggcctcgcatttgccctgcagtattatggccaaaagaagcatgctagcacctcatgaaagaggaagttgagctagagccgaagtttcagtaggtttcttaattcattgcctacttcaatgcagtatcaaagtggtaatagactttagtcaatgttgtgtctctgtgtcattaaaattcgttaccccaccccacaccatgcaggcccttgatgctttgtggtgtctttgctcagtcatgctagctgttcatttagacaaatgatttttgatttaatctctcatgtttgaatattttgaaatggattttattaaatcaattgattgatccctatgttttttggtcaaaaaaaaaaaaaaaaaggcccctaagggcgg

SEQ ID NO: 3576 - DNA, 936 bp, Glycine max
gtaaaattagaacgcatatttaaatattaacttgcttttagaaaatactcttatttatatggctcgagaaaatgatggagtacgtaaagtatgagcaattaatgttcgagctatctagatcggatccgatgtgaaacaataatttgtgaggtagacagacagaggcggcagcaaataagaatggcttcaaatcccaaacctttgacttttgaggaggtggctaatcacaacaacaaaaaggattgctggattattatcaatggaaaggtgtatgatatcacgccatttctggatgagcatcctggaggagatgaagttttggtaacgtcaacagggaaggatgccaccattgattttgaagatgtgggccacagtgattctgccatagaaatgatggaaaaatacttcgtcgggaaggttgacacttccactcttccagcgaaagttaaccatagtctgccacaacctacacaagcaggtggcgctggcaatcaatcttctggatttgttgtaaagatcttgcaattcctgttgccattcttgatattgggccttgcctttgccctgcagtactatggcaaaaagaagcatgctagcacctcatgaaatatgaagttgagctagagccgaagtttcattaggtttgttaattcattgcctacttcaatgcagtattaaagtggtaatagactttagtcaatgttgtgtgtctgtcatttaaactcgttaccccacccttcaccatgcaggcccttgatgcactgtggtgtctttgctcagtcatgctagctgttcatttagacaaatgaatgattttttttttatttaatctctcatgtttgaatattttgaaatggattttattaaatcaattgattgatccctatgtttttgggtccaaaaaaaaaaaaaaaaaaaaaaaaaaaaaaagggcgg

SEQ ID NO: 3577 - DNA, 1117 bp, Glycine max
gagagagagagagaactagtctcgagtttttttttttttttttttttaaaatattaaactacacttttttacattgcattgcaattctaaacaaacccctcaatttccgaacgtgggtggacctaacattttccatttttaatgaacaaacacaaagcaaagcctccaaaatatgacttattcaacccttcccaatgtcgtcataactaatagattttttttttcttacacacgctcgaaataggttcgtatcaacggcccacgacggacggtcctgatcaactcaccctaatcgcttcgatcatcatatcaacggtgcagattaaatcctccgtagcttctcgcctttgatcacgggattcgcccgtgctatctcctctctccccaccgccttgaaatcgaagccacacgcgtgtttctcggggtaccggtgagtcccacaaaacgtggttccgcacctgcacttaaacccagtcaatcccacgcgcttcctacacgcgccgcaccggttcgcctgaaccggtgcggccacatctggcgaactcaccaccgacggttgagggagggattcaaccggcgccggaagagaatccacggcggaggcaacggcgacggtggcggaggaagatccagaaagagcggtttcgattgtggatttagttttggcttgttcttcttccttcaaacggatgtctctgtagcatttggaacagagattcattgtggcggggctaccgaagaagccgcagttgttggagcagagtctgtgaccttcgggagcttggcatcggtgttcttcggccatgtttggatctgtaagaagagaaaaaaaaaatctgatttataacaaggagtggttgtgggattgtgaagaagataagaccaagagtggaaagaggaaagaagaaagaatcttaacggagaatgattaacagagtcggaactcggaaaggatataagagtgagaaagagagagagaaagaaaaaaataagaggaagccaccgcgaaaggagacaaatgggcggtcgccagtttcaacttctcattcttaagaggataattaattaatgggatggaaagttaatcgagacttggaggagacaattatgcgaaatt

SEQ ID NO: 3578 - DNA, 1220 bp, Glycine max
  misc_feature (1198)..(1198): n is a, c, g, or t
  misc_feature (1220)..(1220): n is a, c, g, or t
ggggttttcttcaaagggatttaattggggtaacgcaggggttttcccattcaggccgttgtaaaacgccggccaggaaatgttatacgcctccctatggggcgatttggttcccgggccccccttggagtcaagtacgtaggtagcccccccccgcggcattctaagttctaacattgcattattcacttcaaagttcaattctttctctgtcgtcgctctttcttcaacttcaagcttaattcctcatgtctttcagaggcctcagccggccaaatgccacatcaggcatgggtgttgctgatcacagcaaaaacaccttcatggaattgaagcagaagaaggttcatcgttatgtgatctttaaggtcgatgagaagaaaagggaggttgtggttgagaagactggtggcccggctgagagctatgacgattttgctgcatctttgccggagaatgattgcagatatgctgtctttgactatgatttcgtcacttctgagaactgtcaaaagagcaaaatcttcttcattgcatggtccccttcaacatctcggatccgtgccaagatgctctatgccactactaaagacaggtttagacgagagctagatggtgtccattatgaaattcaggctactgaccccacagaaatggatcttgaagtactgagagaccgtgcacattgaaatgtttaagcactgaattcattttcttatcagaatctactaggttttaaagttttacttttaatgaattacctcttcatgctttgtcatcaatagaacccatcttgccacaggaatatacctccactaatatgaatctgaaggctgatgggtttaaagcttttggcagttattgttgtaaatcccagtgtgctggacttgtattgtgtatgagcgtgactctatggatcctgatagatttcttggataaaaaagtcccttcttctaactttggcaaggtatctaaaaaacttcaaaacttgcattatcgaaaaaaaaaaaaaaaaaaaatcctgcaacccggggtatcactatttctagagcgccgcacccgcgtggacctccgcttttgtccctttaggagggtaattcgagcttgccgaacatgccaaactggttctggggaaatggtatccgttcaaatccaccaaatacgacggaagcttaaaggaaagctggggcgctagganggctaccccctaattgcggggn

SEQ ID NO: 3579 - DNA, 926 bp, Glycine max
cggccgctcaggcggcgggcgggatgcttattccttcaatgcgccattctttctctgtcgtcgctctttcttcaacttcaagcttaattcctcatgtctttcagaggcctcagccggccaaatgccacatcaggcatgggtgttgctgatcacagcaaaaacaccttcatggaattgaagcagaagaaggttcatcgttatgtgatctttaaggtcgatgagaagaaaagggaggttgtggttgagaagactggtggcccggctgagagctatgacgattttgctgcatctttgccggagaatgattgcagatatgctgtctttgactatgatttcgtcacttctgagaactgtcaaaagagcaaaatcttcttcattgcatggtccccttcaacatctcggatccgtgccaagatgctctatgccactactaaagacaggtttagacgtgagctagatggtgtccattatgaaatccaggctactgaccccacagaaatggatcttgaagtgctgagagaccgtgcacattgaaatgtttaagcacttaaattcattttcatatcagaatctactaggttttacctttaatgaattacctcttcatgctttgtcatctgcagagcccatcttgccacagatatataactcgtatccaataatatgaatctgaaggctgatgggtttaaagcttttggcagttattgttgtaaatcccagtgtgctggacttgtattgtatgagcgtgactctatggatccagatagattacttggatgaaaaagttccttgttctaactttggcaagtatctatagaaaatttcaaaacttgcatttatcacatatttaatttgcttcttgaaaaatcccagtgtgctggacttgtattgtatgagcgtgactctatggatccagatagattact

SEQ ID NO: 3580 - DNA, 1341 bp, Glycine max
ttcgagtcagctacgtaggccccccccccgcaaaagtaaaaatgtggtttcttggttggaaaggggcatcagggttctcagcctcttccacagccgaacaagtcactcaagggattgatggaaccgccctcaccgccatcgtcacaggagcaacaagtggccttggtctggagaccacccgggttcttgcattgcgcggtgtccatgttgttatggcagtaaggagtctggacagtggtaagaatgtcaaagaaacaatacttaaggaaatcccctcggctaaaattgatgtcatggagttagatctaagctctatggcatcggtaaggaaatttgcagcagattttaattcttctggtcttccactcaatatcctaattaacaatgcaggggtgatggcgactccattcacactttcccaagacaatattgaattgcagttcgcaaccaatcatttaggccattttctcttgacaaaccttttattagaaactatgaaaaaaacagtaggggtatgcaaccaggaaggaagaatagttattctatcatcagaggcacacagatttgcttatcgtgaagggattcaatttgataagatcaatgatgaatcagggtatagcagttattttgcttatggacaatcaaagcttgctaatatcttacatgcaaatgagcttgcaaggcgcttgaaggaagaaggagtggaaatcactgtcaactcccttcatcctggatcaattattacaaatattctgcgataccatgattatattaatgcccttgctaacatggtgggcaagtacttccttaaaaatgtgcaacagggagctgcaactcaatgttatgtggcattgcatccacaagtcaagggaatatctggtgaatactttatggatagcaataagggaaacccggcctctctggctaaagattcagagctggcaaaaaaactatgggaattcagcttaagcctgactaatccaaagtagcttaaaggtttgactagaggaagcttcataaatgccaacattattgtattggaaaacaagtttcagcgaattagaaatttatagtggtgtaagcttacaacttgaaggtttttattaattattacagctcagactactatccattacagtattgttttggtaccgttattgttgaaaatcaagcagtatacataattagtttcaaacttgactccataaaaaaattctgcattgatatcgaaatcattacggaagaattgtatgatggtaatcgctacatattattaccccattgcggccatacttttttacttgtgaatacaatcccctcggcaaatttgactgtgtgttt

SEQ ID NO: 3581 - DNA, 1318 bp, Glycine max
  misc_feature (12)..(12): n is a, c, g, or t
tcgagtcagctnacgtaggccccccccccctctgttttgacttctttggtctgcaaaagtaaaaaaatgtggtttcttggttggaaagggcaatcggggttctcagcgtcctccacagccgaacaagtcactcaagggattgatggaaccgctctcacagccatcgtcacaggagcaacaagtggccttggtctggaaaccacccgggttcttgcattgcgcagtgtccatgttgttatggcagtaaggagtgtggacagtggtaagaatgtcaaagaaacaatacttaaggaaattccctccgctaaaattgatgtcatggaattagatctaagctctatggcatcggtaaggaaatttgcagcagattttaattcttctggtcttccactcaatatcctaattaacaatgcaggggtgatggcaactccattcacgctttcccaagacaatattgaattgcagttcgcaaccaatcatttaggccattttctcttgacaaaccttttgttagaaactatgaaaaaaacagtacgagaatgcaaccaggaaggaagaatagttattctatcatcagaggcacacagatttgcttatcgtgaagggattcaatttgataagatcaatgatgaatcagggtaatggtctggttggaatgataaatcaatgataaaccttttccctatttggctattttctactaagctcttgctataaaaattcataataaatgtatattattcatgtccaatgttttgagtccccaaaattgcataatttccttctctatctgagttttatacaggtatagcagttattttgcttatggacaatcaaagcttgctaatatcttacatgcaaatgagcttgcaaggcgcttgaaggaagaaggagtggaaatcactgtcaactcccttcatcctggatcaattgttacaaatattctgcgataccatgattatattaatgcccttgctaacatggtgggcaagtacttccttaaaaatgtgcaacagggagctgcaactcaatgttatgtggcattgcatccacaagtcaagggaatatctggtgaatactttatggatagcaataagggaaacccggcctctctggctaaagattcagagctggcaaaaaaactatgggaattcagctttaaccctgactaatcccaaaatagctttaaaagttttgactagaagaagccttcataaaatgcccacaattattgtatttggaaaacaaagttttaagcgaaattaaaaatttatagtggttgtaagcttaccaacttgaagtttttattaattattac

SEQ ID NO: 3582 - DNA, 1278 bp, Glycine max
tacggctgcggaagacgacagaaggggatatacatatacatcaaaacacgcagaagaagaagaaccttacaaagggcttttgaattttcgtgttttgatcagaatcagaggaaaaaatcacataatttcgaattcaaaatttgaattttcgtgtataaaacgaagagaagagaatggaatcggaggatttggtgaagcaggaattggaggaattgcagaaacaattggggaagaagctaaaatttgaagcctctatttcgtctctaaaatctcttctccaacgcacttacccatcagcttccccagcgcttcgcaaatccttttatttggttatatgccgagttgctactgtgttgaagaccaggtatacagcaccaggtttctggaatgctggactgggcctttttgagcaggctcatttgcttgtttctgaaccttctgagaaggagaagttgaaggcttgcattgctcaggccagggaacatttgcatctagaagataacccatcacaagctttacaaccttcagataatcaggcaaacagaggatatctttttgaggggcaccttacggttgatcctgagccaccacagcctcaatggttggtgcagtcaaacctcttgacaacagctgctacactctttgctgctgaatcctctcaagctccagcagcaaatgaaaccactcaagaggatgccgcaaatatgcttcaagatcttctaaatagattggaagaagttgtgcccttgatggtggatggaggtcctgtagccccaaaagcacctcctgccagtaaagaggttgtggcaaatcttccggtcattactctcacagaggaaatcctggctaatttggggaaagatgcagagtgtgctatttgcagggagaacttggttttaaatgacaaaatgcaagagttgccatgcaagcacacattccacccaccatgtctaaagccatggctggatgagcacaattcttgtcccatctgtcggcatgagctgcaaactgatgatcatgcctatgagagctggaaggagcgtgaaaaggaagctgaagaagagaggaaaggtgctgaaaatgcaattcgaggtggtgaatacatgtatgtttaaatgaccattcaatgtatggtttaataatatggttgttcgtgtaacaatggatttgaaatcttcatctggtgaatagttgtgtattctttattgtttcatgttatggagatatctcaaatttttagggatgctcaagggtttaacaataaaaaaaaaaaaaaaa

SEQ ID NO: 3583 - DNA, 1768 bp, Glycine max
gatcgcccccgcgcccggttcactcactcaaccgttcctttatcttttggattcccttctcattcactttcactttcactccttagcctggttataggagctagggtttatcgagggtttcgttccttcctctctgcaacaacaatggcgaaacctgggcgaggtcgtcgctctccctccggttccgtttccggctcctcctctcgctcctcttccccctccgactctcgttcctcctctcgctcgcgctccctttctcggtcccgttctccctcgcgctccagatcctcttccccctcctcctcctcttcctcccgaagctcccgcagccgcagccctcccccgcagaggcgccgaagtcctgctgacgcaactaggcgaggtcggtctcctccacctcagtctaagagagcttcacctcccccaaggaaaccttctcctgtacgcgagtcacttgttcttcatgtagaaaagctcagcagaaatgtcaatgaagggcacttgaaagaaattttcagtaactttggtgaggttataagtgtcgagttggcaatggatcgaactgtcaatcttccaaaagggtatggatatgtgcagttcaagacaagaggggatgctgaaaaggcattattgtacatggatggtgcccaaatagatggcaatgtcatcaaggcaagatttactctacctccaaggcagaaagtttcaccacccccaaaggcttctgctgttgctccaaagagagacacccccagggctgataatgctagtgcagatgttgacaaggatggaccaaagcggcaaagagaatcttctcctcgtagaaaacctcctccctcaccacggaggagatctcctgtacctagaagagctggatctccaagacgaccagattctccacgtcgccgtgcagattctcctgttcgtcgccgattagactctccttatcgtcgtggaggagacacacctcctaggaggcggcctgtgtctcctggaagaggtcgttctccatctccacctagacgccttagatcccctgcaaggctgtcacctagaaggatacgtggaagtccaggtcgaagacgttcacctccacctcctcccaggcgccgatcaccacctagacgaccacgtagtcctcctagaaggtctccaattggtcgtagacgtactcgctctccaatacgtaggtctgcacgctcacgctcaaggtcattctcacctcgcagaggtagaccaccagttagacgtggaaggtcatcatcctactctgattcacctagtccacgcaaggtatcccggagatcaaagagtcggagcccaagaaggcctttgagaggaagaggcagtagcaacagcagcagcagcagttcaccaccaccaccaccaccaccaccaactcgcaagccatagataattcttgtacatctactgtctatttctgttgatgtatttattgagattctgtaccggctgagttctagcttgatgtgcttggggatatatgttgcttttcattgtggtctattaacacattttttcttattagcacttaaaagttgtttggaaactaggcattccgtttttgtttggatcctactttagttgttactttgctcaaaaatgcaaaacatgaaagacgatagtgctctgctttattgtatttctagaaattcagtggaattccatgtaactggtagtttctttagaaatttgattatgcgaagaaagtagtagtaaatgttcaatgtgaaaaaaaaaaaaaaaa

SEQ ID NO: 3584 - DNA, 1429 bp, Glycine max
agagagtttcaggtaagggaaacagtgcgtgatgtcgcatttttgcataatgagctcttttttgctgctgcccagaaaaagtacccatacatctataatcgagaaggcacagaacttctttttctccaggaacatggtccagtgttaaggcttcagtttctggaaaaccattttctcttggcttcaatcaacaagtttggacaacttcgttatcaggatgttacaatgggttccatggttggtaattttcgaactggcttaggacgtacaaatgtaatgcaagtgaaccccttcaatggggttgtttctttaggtcactcaggtggtactgttaccatgtggaagccaaccagtgcttctcctcttgtcaagatgctatgtcatcatgggcctgtctcagcactggcatttcattcaaatggcctcttgatggccactgccgggaaagataaaaaaattaagctttgggacttgaggaaatttgaggttcttcaaaccttaccaggtcatgcaaatactctggattttagtcaaaaaggcttgcttgcttgcggtaatggttcattgatacagattctgcgtgatgtttctggtacacaaaattattccaagtatatgactcattccatggtgaaaggttaccagataggaaaattggtatttcggccatatgaagatgttctaggcatagggcattccatgggctggtctagtattcttactccaggagcaggagaacccaactttgactcatgggttgcaaacccgtttgaaacttctaagcagaggagagaaaaggaaatacggtctcttcttgataagcttccacctgagactatcatgctggatcccagcaagattggtacggtgaaaccaagaagagagaggccaacaaagcaagagagggaggctgaaatagaagctggcgttgaagcggctaagggcatgaaactgaagaagaagacaaaaggaagaaacaagccaggtaaaagggtacagaaaaagcaagaggcagtttctagagtgaagaggccctacttggagcagaaaattcaagaagaggaaagcatatcaagaaagaagcagaaaactagtgaggatgttgaactaccaaaatcactacagcgctttgctcgtaaaaaagcatcatcatgatttaactgtccaatagagtctcgtattcgtctttactttccatcctgttgattttaagcttcttgtttgtattttttgttgcatttcatatttgtagcctttttagcctttgatgtgatgttttcggcctttaaagtaaaggcatgtccaaattttgccttaccgacccttgattagagtcttttttaatattataagaatctttacctttacataaaaaattgacgggaccgaatgtttggattgataaaaagagatgtaatagaatggaatg

SEQ ID NO: 3585 - DNA, 1531 bp, Glycine max
tcagctacgtaggcccccccccccccccccttacataatatttgtctcaatttccagagtgatgaagggttgttacttgggatctgtagggatggacgaagaatgaaattgaaaagtgaaaagtagagatggaagaagaaaaagcagcggcatactacgacgagctgagccgtaagggcgagggagccgcgaggttcaagcaaggtctcggcttttcctcttccgcgccaaacgacgacgttccaaaaccctcctccttcctctccaaattcgtcaaagcctcctccactgcgccttcaaactctgagaagcaagcgcagcttcaatccatccaccacaagctcaagaaaaagccctcttccgagtctagggtttcgagcagcgatagcgatagaagtagaagacgaagcagagatagatacagggaatcgcggaggcgaagtaggagtagagaaagacatcggcatagggagagagggagacggaggagtagaagcgtttctcctcgcaagcaacgcaggtcggagaaagacgcgaacgatagagggaaagtgagtgaaacgaagaagaggaagaatgctgagattgattattacaagctaattccaggttatgaccgcatgtcatctgctgaaagagtcaaagccaagatgaagcttcagctttctgaaactgctgcacaggattcagaaaagggtgagggctgggagcgatttgagtttaacaaggatgcccctcttgatgatgaagaagttgaagttgctgaagatgatgcgtccttagtcaagcacattggccaaagtttcagattttctgcagttaaggcaagaagggaggaacaaatacaagctgctcatgaggaagctatgtttggtgctacagcacttctgcctcccaccagtacagacagtgagcctgaaagggataatgagaaggagactgataaaaaagaactggttacaagcctcttaagtgaaacagtgctggccaagcaaaatgggtcttggcgtgatcgggttcgtcaaacttagaatttgcacccttaaagttgatgctgataatagaaaagttggctgaatgttgaatgaagttgagctttaaccatgtctaaagcattcaattttgcgttgctcagtctgtatatggtgtgagatgggctttaaccgtgtatacaacttgtatctggttcctatgcaactggcattattttcaagcctataatcactagtgaggtaggctatgtgttactgtttatcatttttagagggggaagcagagtgatgtgtgaaacgccatttgtcttttgtgtaattccagtttcatagttaagtatttagaggaaaaacttgcaaataggatgatgctattcatcgctgatcttcacagttttcatcatctgattacagttggtcccctctcattttttttgtacctatctaattcggtcaccatacatagatgcgaggtgatttgacttttgggatgtgtattaagcatgatccttgccaatacgtgaaaaagggggacaagg

SEQ ID NO: 3586 - DNA, 639 bp, Glycine max
  misc_feature (7)..(7): n is a, c, g, or t
tcgagtnagcttcgtggcccccccccgggggcccccgccctgagttgagaaggatgaagaatgaaattgaaaagtgaagtttagagatggaagaagaaaaagcagcggcgtactacgacgagctggcccgtaagggcgagggagctgcgaggttcaagcaaggtctaggcttttcctcttcagcaccaaacgacgacgttccaaaaccctcctcctccttcctctccaaattcgtcaaagcctcctccgagtcggagaagcaagcgcagctccaatccatccacgacaagctcaagaaaaatccctcttccgagtctagggtttcgagcagcgacagaagcaggagcagagaaaaacgtaggaaaaggagcagaagcggagatagatacagggaaacgcggaggcgaagcaggagtagagagagacatagggatagtgaaagagggagacggaggagtagaagcgtttctcctcgcaagcaacgcaggtcggagaaagacgcgaattatagagggaaagtcagtgaaacgaagaaagggaagaatgctgagattgattattccaagcttattcaaggttatgaccgcatgtcatctgctgaaagagtcaaagccaagatgaagcttcagctttctgaaa

SEQ ID NO: 3587 - DNA, 1728 bp, Glycine max
  misc_feature (26)..(26): n is a, c, g, or t
cgtaggcccccccccccccgggtttncttttctttttcttcgaaagaaaagaggcacaccaggcgtgtgccgtaacaccttcatccaactcatcatcatcttcttcttcttcttccttcaattcgcttttcatccaaccaggacatggcggcagatgaagatatgtctttgaagtctaatctgagtcaatcaaatgaaacttggaagcaggagatggaaagaagtcaatctcaagtggatgtattgcaggcaaggataatggaggtaaaggcacaaatacaaggctcaaaggaagatgcaaaaaaggagttagaggttctatggagaagagtcaagactacttctaccctgttgacctacttaaaatcaaaatctagaatcatggctgttcctcatctagcccacacttcttgtggcataaaaaagttagatggggtagggcttgttgacaaagatgggattccattatcaggttggtctaggaatgttgatctttcttcatttgatgatccagatgaagaatcttggataggaattaaccgtcagcatggttccttagacgaacaggatgcagtttatataggtgagatactgaagtctgttcagatggtcacggatgtgatggaatcccttgtcaaaagggttttattggcagaatcagaaactactattgagaaggaaaaagtgattttaggtcaggaagaaattatgcaaaagtctgctcagttagagaatatgtccatgaaattggaggagatggagcgctttgctttgggtacaaatggtattttgaatgacatgcggcaaagagttgcagatttggttgaagaaacaactagacagagacagcgtgctgctgaaaatgaagaagagctttctagagtgaaacgggaatttgagtctctgaagtcatatgttagtagtctaatcacagtaagagaaaccttactgtcttcagagaagcaattccaaactattgagaagctgtttgaacggctagttggaaagactacccaattggagggtgagaaaatgcagaaagaggctgaagttcagaaacttatggaagagaatgtgaggttgagtgctctgcttgacaagaaagaggctcaacttctagcattgaatgaacaatgtaaaatgatggccttgagtgcttcaaacatgtaaatgccattgcactctacagattgcttgcttagctcttccttgctgacagctggagtcttcaaagtgaagctttactggattaagaatcatccatggatggctccataaacatcatcaatgcctttatctttttttctgattcccattttaatgcctctttcaagattgaaacgggaaataattttccttagaatgtaaacttggcgtgctctttaatgagaaaaacaagacgtgtctcttcactgtacatgttgcaaaccaaagaccgaatcatcaaaccccacatctatatacatatatatacccatcaaatttttttgagaccagcaaaagatttctcttgttctgttctgggaaattcttaggttcccacgtaacaaaagaaatagtttgctatgtttcagccatagatagcgttaaaaatgtagtaagagatgtcaatggctcacaagactgagatgatatagattcaatgatataaagagatttctcttgttttgataacatccaagaatttctcattacattgaatgtgtatcattagtgccactgacatat

SEQ ID NO: 3588 - DNA, 1950 bp, Glycine max
gtcttttgtcaccccgatagattaagattagattccgcccacgtgaatcaatggggaaagtggcggtcggaaccgcggtggtttgcgcggcggcggcgtgtgtcgcggcggctctggtggtgcgccaccgcacgaggagctccggaaagtggggtcgcgcgacggctattgcgaaagagcttgaggagcagtgttggacccctttttcgaagctgagacaggttgctgatgccctggacgttgagatgcacgctggtcttgcttctgaaggtggatgtaagctcaagatgttgatcacttatgttgataatctcccttctggggatgagaaaggactcttttatgcattagaccttggtggcacaaacttccgaacccttcgagtgcatttaggtgggaaggagaaaggtgttgtcaaaatagagtctgaagaagtttccattcctcctcatttgatgactggttcttcacaagaattatttgattttatagcatctaaacttgcaaagttcgttagttctgagcctgaagagttacaccctccccctggcagacaaagggaactgggttttacattctcatttccagtgaagcaaacatccatagcatctgggactctaataaagtggactaaaggtttcaatattgaggatgcggttggagaagatgtggtgggtggactaaccaagtccttagaaaaaattggtctggatatgcgtgttgcagctctagttaatgacacagttggaacagtggctagagcaagattcagcaatcaggatgtcattgctggagtgattcttggtactgggacaaatgcagcttatgtagagtgtgcacatgcaattccaaaatggcatggtcttctaccaaaatcaggagagatggttattaacatggagtggggtaatttccgttcctcgcatcttcctctaacagaatatgatcatgctctagatgcagagagcttaaaccctggagaacagatttttgagaagataatttctggtatgtatttgggtgaaattgtaaggagagttttgttgaagttggctgaagaagttgacttctttggagatactgttcctccaaaattgagaattcctttcgtacttaggacacctgacatgtctgcaatacatcaagatacatcttcagatctgaaggtggttggaaacaaattgaaggatatattagagatcaataacacatccctgaaaatgaggaagattgttgtggaactctgtgatattgttgctaatcggggagcccgcctttctgctgctggtatttttggcatcctcaagaaaataggaagagacacagtaaaggacgggaagaaatcagtagtagcactggatggaggattgtttgaacactatactaaattcagaagttccttggagagtacactaaaggagttgttgggagatgaggcagctgagacaattggcattgagcagtctaatgatggctctggaattggagcagccctcctggcagcttctcactcccagtatttggaagtgcaggagtcctgaagatgtggtttaatgtcaaggtaaatcagtgtaacactagtttcatttttttgtatacctactagatcaacagattgaagcagaaaagtcttcgttactagtcctagagagcttttaaccaggaaggtggaccaagtccacagtggagttatttgtagggctgtgttcttcttgctgcaaatgcaacattgctgcttctcggctaattactggtgcattgttttggttacagtgtttgtctctcccacatcaaagaataataggagagatgtaaacttttgagttgtctcgttttcccaatgtaacatgttttcaatgagaataagtcaggattaatttattgacaaaggtgaatgatttcaattcaaggcttttgcgagttatcaatgaagagttgagtttatttatt

SEQ ID NO: 3589 - DNA, 1152 bp, Glycine max
ccacgcgtccggtggcctgctgtggtggtaatttttactatttagttggcaagacttagggttaggctggttttgttaatactacaacatcaacacttctacagattcttttcttttcttttctttctcttcttggtttggttgctggaatactatggaatctaatccaacaaccatggacgcaaaacgcgaactcgaagtggaagactgggaactgctccacccaaacgacgacgattcaatcgtgttcggtgggcccccactcgactctatcctccccgatcacttctcccttaatcccaattccagttgcagttccaattccaattccaattcctcctccgaggtcgatcgcaacttcgacgattcctatgttgccaatcagatattcccaaattccaccctcgcaccctggaacggggattccgattccgacaccaccgccaccaacgcccccgtggtggcgatggccgaggccgaggccgaggctgtggtggaacaagaagaggaacagaaaaaaatggaagaagtggaagagaaagatgatgatgaggaggatgagggggaggaggaggaggaggaggaggaagaggagaaggagaagagattggtgtggtggaaggttccttttgaggtgttgaggtattgggtgaaccctctgcctctgcctctccctgtttggtctctctctgtcgctgccgccgctgcttttctgggactcttcttcctgggacggaggttgtacagaatgaagcgcaagactcaaactttgaagctcaacctcgctctcgatgataagaaggtgtctcagctcatgggtcgtgttgctcgtcttaatgaagcattttcagtagtgagacgtgttcccatagtgcgaccaccatctctgccatcttcaagtgtgactctgaggcctgtgatgagtatgagatgaagaatttgacaaattacttgattgaaagtagtgtgaaatgcaataattgtttaatactataagaatccttttgtatgaatacatgtatgtatgaatctattatgtgtgtggcagttggattttatgaagcttttcagtagcttcttgtatatgattatgatatcctaccatactcttactttttatgtcttgtcaaaaaaaaaaaaaaaggttgtccc

SEQ ID NO: 3590 - DNA, 1198 bp, Glycine max
gcgggggaatcacaccaaccaaagccacaaaagaaaagcaatagcaatagcagtagcaacagcccatataaaatataatggcagaaacctgcgactccaacaataaagtgatccgtgaataccatcatgatgcttcctttatgtcaaggtgtgacatctttactgatgttaccgagtaccaactgtgtctggcatatgccggagaatctggtaaaggaaacttcgaacctaagtgggacacagacaatgtcactccccaccttatcgagcagttcaagctaaattgtgctgcctcgaatctgccagtcaaagtgtttgtcagcatcggaggagatgaccccttcaaagttgctgctggtggtgccgatgattgggttctcaatgccacaaccacactccaccacatgatcaacgagtaccacatcgatggaatcgatgttaactacaccacaatcctgtgcaacaaaaaattgtttgttaactgctttaaggatctcataaggggcctaagggaagctctatgcaccactgggtttgaggcttccttagctccagatgctgccaccaatgaggctttctacttgcccttgtaccgatctattgatacttcttggattggaactgttgtgtttcagtgcttcgttgatttcgaacctaaagatcctaacagatcagttgaaatcttggtgcgccaggttgagaagatagtggaagagtatgattattatgactctaagatcttgcttggctacagcgccattaaggaggattggaataaagtttcaccacccctcttctttcttgctctcaatcgcctagtgcattcttggcctagggttaagggcgcatctgtcaaggttcttagtgacacctatgccttcattcccccaacgtggatccctaaactcctgtctttggccgtctccgatcctggaaaatatccttaattgaagatccataattattaagttctatctatgcattcatggctctagccattctatatatggaataagacccatgctatatctattaattgtatgtgtgtgttccttctgcctatgtctatatatgttgtgcgtgcatttgaaataacaatgcatggcatgcatatttgtggtgtgttaatgcctacgtgcatctttctctcatcaataaaatatattgtatctctttgtgcttaaaaaaaaaaaaaaaa

SEQ ID NO: 3591 - DNA, 1752 bp, Glycine max
caccgaccaccgaagctctcttaaccctaacactggttgacattgcattcccggagtccacccttgcgtccgggtaaatattcattgattcattgattccagatcctgaactcaacaacaacccaaagataaaaagcacaacacaagacactgaactcgcactcactgggttttcaaccatggatgcgatacggaagcagctcgatgtgttgatgggagccaaccgtaacggcgacgtccgtgaagtcaatcgcaagtactacgatcgcgacgtctgtcgtctctacctcgtcggtctctgccctcacgaactcttccagttaacgaaaatggatatgggcccttgccctaaggtccactccttgcagctccggaaagaatacgaggaggcgaaagcaaaggggaccgataattatgacagggagttggaggatgtaatagataagcttattggtgagtgtgataggaaaattggcagggctctaaagcggctcgaggacgacgatgcgaaagcggctattgcaatttcggtctctgaagttactcaaacagatgaggtgcttgagttgtcgaagcaaatcaaagagaaattgaaagaagctgatcaatatgatcttgaaggcaagtcagatctcaagattcgagctttagaggttgtagaggaacttagaactaagagagcggacaagcagtctatgcttcttttagatgccttcaacaaagatagggcatctttgcctacacctctgccaaatccaccacctttggcacctcttcctgtagttgctcctgatgctcgaacacaagagatgataaatgaaaagctgaagaaggctgaggatcttggtgagcaaggaatggttgatgaggctcaaaaagcactggaagaggctgaagcacttaagaagcttcctgccaggcaagagccagtgttggattcttcaaagtatacggcggcggatgtccggattactgatcagaagctacgtgtgtgcgacatttgtggagcatttttgagtgtttatgacagtgatcgccgtttagctgatcattttggaggcaaacttcatttagggtatatgcagattcgtgagaagttagccgaacttcaagaagaaaggaacaagagccgaaagactgatcggcttgatgacaggagatcaaaagaacggagtagggatcgagacagggagtctagtagggaccgtgaacttggtgatagtcgtgaacgagggcgagaccatgatcgtaggagcagagatcatgataggcattatgatagagatcgtggatatgatcgagaccgtgacagagactcagaccgcacccgctcctatgactcaagaagtcgtcggaggtcacgctctagatcccgagagcgatctagagattatgatcgacataggcgtcatgatcgatactagcaattgccatgaatcttatgggtatgagaaaatgtctagtttaggtgggtgttgaacctcatgttggacaaataattttgcaatttcttctgtgttgaaccgtttctcggatgatggatgtaacttgagcttaggtgtcgctaaattatggtttgatgttgctttgcagacattaaatccaatttgtaatctgccttactttggagcagttcttgctattgtgcttaaaaatagtagtttgattggattgccatttccaaaaaaaaaaaaaaaaaaaaaaaaaaaaaaaaaaaaaaaaaaaaaaaaaaaaaaaaaaaaaaaaaaaaaa

SEQ ID NO: 3592 - DNA, 674 bp, Glycine max
tcgagtcagctacgtaggcccccccccccatacgcatatttcgtgcaggaaagggagaagagagcaaagaagaaggaaagaagaaagacatcttctgctgtcactgctgagaatacagaacaagaatctgctcataccacagaaactctaacaagtgtggaagaaagtgacctgactgagaaaccagctgaggtaacaaaaaagccacagaaaccatctcaattcacaaggcagaccaaggtaaaatctgtacctgcagctcttcgcaaccgggctaagagaagaattcaaccatggatgtgggttctaattgcagttgtggttgttgttgccttgttttatgtgggcaatagcagctctttgagatcttcgcttgaaggctttggttactgaggacactcggaagcaatcacaaggcgtttgtcggggaagagttaccgttacatatttatattttacacaaatacatatagacgcaattctttcttgcccttgcaattttttcctgctagcttttggtcatagccattattttcttcatattgagatttgttagtttgggatgtgatgtgactgctgaatgcttctgcaccaattatgagaataataaattattgtgattgtgccttctttaaaaaaaaaaaaaaaaaaaaaagaaaaaaaaaaaaaaaaag

SEQ ID NO: 3593 - DNA, 1027 bp, Glycine max
aaaaaagtatctcttgaactcggcggcaatgcaccttgcatagtttttgatgatgctgacctggatgttgcagtaaaaggaactcttgcagcaaagttccgtaacagtggacaaacatgtgtttgtgcaaatagaattattgtgcaagaaggtatatatgagaagtttgcaaatgctttacgtgatactgttcagaatatgaaagttggggatggtttcagtgaaggtgtggcacagggtcctctaatcaatgaagctgctgtcaaaaaggttgagtccttaattcatgatgctacatcaaagggggcaaaagtaattcttgggggtaaaagacatagccttggatttactttttatgaacccacggtcatcagtgatgtcaacagtgatatgcgcatatcaagagaggaagcatttggacctgttgcaccccttttgagattcaaaactgaagaggatgctatcagaattgctaacgacactaatgcaggtttgggttcatacatatttacaaacagtatccaacgatcatggcgtgttgctgaggctctagaatatggacttgtgggtgttaacgaaggagtaatttcaactgaggtggctccattcggtggttttaaacagtccggcctcggaagagaaggctccaaatatgggatggatgaatatttagagatcaagtatgtttgcttgggaaacatgcacaaagcttgaacaaaggtatacatgaggcagtggctagctagagggaaaagtacttaccttcagtgagtttgttgaagaatatgcatatagctgcacacgtgttgtatacaaataagggcaggcttgcaaaggacctcctcatttttctttgtttttctttttcttttcattttcattgctttctttttatggtcttttagaatattaaaaaaatgcactatagaaggtaccgcacgaggttaacaaaaactatgaaaatagcctttgacccttcttggtttaaaaaaaaaaaaaaaaggcggccaaagacaagtgagctcga

SEQ ID NO: 3594 - DNA, 567 bp, Glycine max
attcggctcgaggtaaacaaaaaccactgcaatttttctattaggacgaccaccgcaaatggcagcattgaacctttgccgcatggcacttcgatcctcgaagcttctctctcgcccttatcatcgtctttctgttcagttgcagatgcagatgcagccctcttctccttcactcactcgaaagatgagcatggatgcacagagtgttgcttctcagcttaatagttctggattgttgaggactcagggccttattggagggaaatggagtgatgcttatgatggcaaaaccataaaggtttataatccagcaactggtgaatctattgtagatgttgcatgcatgggtggaagagagacaaatgatgcaatttctgcagcctatgatgcatatggatcatggagcaaaaccactgccgctgaacgaagcaaatttctgaggaaatggtatgatttgctaatggtacataaagaagaacttgcacagcttataaccttggagcaggggaaacctcttcaagagtctgttggtgagataaactatggggctggctctattgagtttgc

SEQ ID NO: 3595 - DNA, 2169 bp, Glycine max
agaaaaacaaacacttatctctgtttctccgtcttacggcaattgaaggaagcactatctctgcaacttccgtcacattcacatggcagcaacatcagggaagattgtccaatttttttttgtgtcaaactgccaccaacagaatacacagggtcgaagggactattgttttgccccttctcggctacggaagttggcatggactgcctcttccatgcaattccgcactttattcaaaccccagaatcattttagtgtccagagaaattttcactgcaatgcttctgcatctgctactgctgtgccatatctagacaagacagattttctaaagcttcaaaatggcagtgacattcgtggtgtggctgttgatggtgttgagggagagccagttaacctcactgaacctgttgccgaagcaataggagctgcttttgctgcatggttagtggagaaaaagaaagctgatgcttctcagcatttgagagtttctattggtcatgattcccgaatatcagccaaattattacagaatgcaatatctcgaggtcttgctggtggtggcctagaagttgtccactacggattagcatcaacaccagccatgttcaatagcacactcacaaagaatgaagcatttttgtgtcctgctgatggatctattatgataacagcaagtcatcttcctttcaacaggaatggattcaaatttttcacaaatgctggtgggcttgggaaggctgacatcaaagatatcttagagcgagctgcggacatatacaatcgatggcccgaggaaagtttgacaaattcagagagaaaagcttcactatctattaagaaagttgattacatgattgtttatacatctgatttagtaaaagcagttcgcaaggcagctggaaacatagagaaaccattggagggtttccatatagttgttgatgcaggcaatggagcaggaggcttttttgcagcaaaggttctggaacctctgggggcaataacttctgggagtcaatttttggagcctgatggcttgtttccaaatcatatcccaaatcctgaggacaaaacagcaatgaaagctataacccaagcagtccttgataacaaagctgatcttggaattatctttgatactgatgtggacagatctgctgctgtggatttcactggccgtgaattcaacaggaatcgtttaattgccttaatggcagctattgttcttgaggaacatcctggaacaactattgtcacagacagtgtgacttctgatgggcttaccacgtttattgagaagaaacttggtggcagacaccatcggttcaaaagaggctacaaaaatgtgattgatgaagctattcgtttgaattctattggtgaggagtcacatttggcaattgaaactagtggacatggagctctcaaggaaaatcattggcttgatgatggcgcatacctaatggtcaagatcttaaataaacttgcttctgcaagagcttctggaaagggtggtggaagtaaggttttgactgatctaatagacggacttcaggaaccagattttgctgtagaactgagattaaagataaaccaaaaccatccagatcttaaaggaggatcttttcgggaatatggagaagctgtgctgaaacatttggagaattcaattggctctgatccaagtctgctcaaggctcctgtgaactatgaaggggtccgagtttctggctatggtggatggttccttcttagattatcactccatgatcctgtacttccccttaacattgaggcacctagtaatgacgatgctgtgaagcttggacttgctgtgcttgcagctgtaaaggacttcgcaggtttagacacatcagccttgaacaagttggtaggagcatcataattcgatgctgtacgcttctatttttgcattatacaaagaggttctctatatgtgcatcagcggcaacagaggatgaattaaagatttagtggaccagaattgcctctatatggagcatggcctgttgtggattagaaatatcagaaatctctacgatagaattttcatgggacatcacattttgagatcactgtgatcaggatctatggtgtaatttcgttgtgctttggcattgaatattaatatattatcgagtcttt

SEQ ID NO: 3596 - DNA, 1026 bp, Glycine max
atcttctctctctctctccaatttccctgtcacaaacacagattcactccaaaactgaacgctatagaaaatgttcaaaaaattttcaggtgaagatgtatctgcacagaaccaagtgaaggcatctgttcaacgaaaaatacggcaaagtattgctgaagagtatccgggtcttgaacctgtgttggatgatatacttcccaagaagtcccctctaatagttgctaaatgtcagaaccatctcaatctggttcttgtgaacaacgtgccactgtttttcagtgtccgtgatggaccatacatgcccaccttgcgtcttctccatctatatccaaatataatgaaaaagttacaagttgaccgtggtgcaattagatttgtcttggcgggtgcaaacataatgtgtcctggtcttacatctcctgggggtgttttggatgaggaagtaggggcagaatgtcctgtggccatcatggctgaaggaaaacagcatgctcttgctattggctttacaaaaatgtcagcaaaagacataaaagcaatcaataagggcattggggttgacaacttgcattatctcaatgatggtctttggaagatggagaagcttgattaaagatgtcgtggaagcttcagtgcttactaatgattgatgaattcctgtgtttctggaccttgatccagatcttaggaatcgtatgtgaacttgtggatttgttttgttataccatgtaaacagtgaagaaatgaattttgttgcatagagtgctctcttttagtaactatgtagatttcatgtaacatggaatacacactctgcgtgttgacaaatacgaagttttgcttatttttggactccaattgaatgttggaaccatgcacggaagtttatttaaacttgattatgccattagatctggtttcataccacagaattatctttagaccttaaacactctgcgtgtttgattgggggaaaaattggacgttgaaaaaaattgcatttattaggaatatttttctctt

SEQ ID NO: 3597 - DNA, 824 bp, Glycine max
  misc_feature (618)..(628): n is a, c, g, or t
  misc_feature (630)..(631): n is a, c, g, or t
  misc_feature (643)..(643): n is a, c, g, or t
  misc_feature (662)..(662): n is a, c, g, or t
  misc_feature (681)..(681): n is a, c, g, or t
  misc_feature (693)..(694): n is a, c, g, or t
  misc_feature (698)..(698): n is a, c, g, or t
  misc_feature (703)..(703): n is a, c, g, or t
  misc_feature (705)..(705): n is a, c, g, or t
  misc_feature (713)..(713): n is a, c, g, or t
  misc_feature (716)..(716): n is a, c, g, or t
  misc_feature (720)..(723): n is a, c, g, or t
  misc_feature (730)..(730): n is a, c, g, or t
  misc_feature (735)..(737): n is a, c, g, or t
  misc_feature (761)..(761): n is a, c, g, or t
  misc_feature (765)..(767): n is a, c, g, or t
  misc_feature (781)..(782): n is a, c, g, or t
  misc_feature (795)..(796): n is a, c, g, or t
  misc_feature (801)..(801): n is a, c, g, or t
  misc_feature (812)..(813): n is a, c, g, or t
  misc_feature (819)..(820): n is a, c, g, or t
  misc_feature (822)..(822): n is a, c, g, or t
agtgcccccgtctcttcctcctctctccgcatcgctgcgttttccgaatcgaaaggtgcgtaagtaacaatggtggaggccaagggtaggaaagaggaggtcgtcactcgagagttcaccatcaacctccacaaacgcttgcatggctgcacattcaagaagaaggctcctaaagcaattaaggagataaggaagtttgctcagaaagcgatggggacgaatgatgtgagagtggatgtgaagctgaacaaggctgtgtggagccaggggattcggagcgtcccgaggaggattagggttcgcattgcccgaaagaggaacgacgatgaggatgcaaaggaagagctatattcccttgttactgttgtcgaaatccccaaggatgagctcaaaggtttgggaaccaaggttattgatgatgaagattgattatgtattgcttacatatctgttttattttatagttgatgcagatttgcgaatatcttttattttgttgagacattggagatattttagtttgataatatcgattgccttcctctgttttgattcttggaaaaattaatcagcatcaatgcatttgagtttcaaaaataaaaaaaaaaaaattcctgnnnnnnnnnnnannatttccgccccnggggtcctttttttaaacngccccccgggggggccccntttttcctttanngggnaattncncttggganatngggnnnntttcctngaaannnttcccccaatcccccaataaccgnattnnntaaccggggcctannaaaaaaaaaaaanntgggncccccctcctnnaaaaanncncc

SEQ ID NO: 3598 - DNA, 892 bp, Glycine max
aggcccgtagattgcacccattaggcccattagggttttatactttgtattatatgtgaaaacccctctctggagtttagttccagtgtctccgtctcttcctcctctctccgcatagctgcgttttccgaatcgaaaggtgacgttagtaagtaacaatggtggagaaggccaagggtaggaaggaggaggttgtcactcgagagtacaccatcaacctccacaaacgcttgcatggctgcacatttaagaagaaggctcctaaagcaattaaggagataaggaagtttgctcagaaagcgatggggacgaatgatgtaagagtggatgtgaagctcaacaaggctgtgtggagccaggggatccggagcgtcccaaggaggattagggttcgcattgctcgcaagaggaacgacgatgaggatgcaaaggaagagctctattcccttgttactgtcgtcgaaatccccaaggaggagctcaaaggtttggaaaccaaggttattgatgatgaagattgattatgtgttggttatatatctgttttttttttagttgatgtggatttgcgaatatcttttattttgttgagacattggagatatgtagtttgataattgtttgccttcctctgttttgattcttagaaaggttaaaaggcatcaatgcatgcttttgagtttagacactctttttccttctttttttgttgctgtggataatgaggaaaataatttcttcttaaaagaacaggatgtaacaaaatttggtaaaggagtagcttaagccttttgaggcgctactgctactgatcttggagggggggggggcaaacctagaaaccggtggaatgaatgaatctacatgaataaaataaaagagaattttatcc

SEQ ID NO: 3599 - DNA, 728 bp, Glycine max
  misc_feature (678)..(678): n is a, c, g, or t
ctaacattagtttattatcataggacaacataaatctgtgttaactccctgtgtccctccctatattattactaccgagagagaaagagtgatcttgcaagttctgttctattcctgttccagcaagccatggcaatttcaggttcagagactcagagtccttcagtgaaaagcgtttctcaggtggaagttgagtgtgtgaaatgcgactcgtgcgggttcacagaggaatgcacccctgcgtacatcacgagggtgcgtcagaggtaccagggtcactggctgtgtgggctgtgcgtggaggctgtgaagcacgaggtggtgagatcagatagtctcatcaccacggaagaagcgctggaccgccacatcagcttctgcagagagttcagatcatctgcggttaccaataataaaacagagcaccccatcttcgccatgggacgcgttctccggaggagcctcgactctcccaggcctctccgatcgaactcgagtggggctcttccgtccgtggacggagttcgtgcctcacacttccttcgatcggagagttgtttctcttctatctcgggttaaaaaggtctttttagtttgctttatcagactcttttagttgcagcaggtaaagtatggagcgtgggttgtttctgtgactgacagttctgtgactgacangttttagaaatctataacgaaggctctctaacattagccctttctgttta

SEQ ID NO: 3600 - DNA, 1238 bp, Glycine max
tcgagtcagctcgtaggcccccccccacctttctctttctcttgtttagtttcgaaccctttccttttccttccttctccgcctcaccaccctaacccaaccctctctctttctctctccaaaatctctctccctcccaccgttatttagggtttggcagatctcgatccgtcacaatggacgttcgcaagcgcggaaggcccgacgtcaaccttaacggcgccgttaagaagaccaagcaagaattggagtccttatcaagtggtgtaggaagcaaatcgaagccatgtaccaagtttttcagtactgctggctgcccatttggtgagggctgccacttcttacattatgttccaggtggttacaatgttgttgcccatatgatgaatttaaaacccgcggctcctccaccaagaaccgttgctgcaccaccacccatcccgaatggttctgctccatctgctgttaaaacccgcatatgtaacaaattcaatactgccgaaggatgcaaatttggtgacaagtgccattttgcccatggtgaatgggaacttggcaaacctattgctccatcaattgatgatcatcatcatcatcgtcctttgggacctccagcaggtggtcgtatggctggtcgaattgagcctcctcccgctatggctggtagctttggtgccatttctaccgccaagatcagtgtagaagcttccctggctggagctatcattgggaagggtggtgtgaactcgaagcagatctgtcgccaaacaggagccaaactttcaattcgagagcacgaatccgatccaaatcttagaaacattgaactcgagggaacttttgaacagattaaggaagcaagtaacatggtaaaagatttacttttgaccgtgtcaatgtctgccccaccaaaatccaccccaggtgttcctggtgcccctgccccccctggaagcaacttcaagaccaagctgtgtgagaattttgcaaaaggatcttgcacctttggagagagatgtcactttgcacatggagctgctgaattgcgcaagtcgggagtatgattttgtttttccatttgtattagccaggctattattattatcatcattattgttgttgaagctgtgcattgctacttaatggtactgaaattaattcttgatgttatagttttgcagtactaagttatttttcaaaaaaaattttttgcgattgcaaatactgttctttttctt

SEQ ID NO: 3601 - DNA, 1319 bp, Glycine max
tcagctacgtaggcccccccccccccgaacgaaaggtctttctaggtgcattcgaccctttaatacttaagtggcatatctcttcatcctgtctctcttttccctttctttcattgtttgttttgtttgcactctcctctccccttaacagtaactcaacaatcaagaggatcagatccataggagaagttttatctgtccatcaccaaaaccgcgactactgatcagtcaatcccatcaatcaaatcaaatcatcagaaagaaaagaaaggaaagaaaagaagaaaaaaaaaagggaatcaacaaaaagaggaacaacaacaatatcaaacatgtcctcctcatccacttccttttcaccggaccaacaacacctctctccctccgaccagctctgctatgtccattgcaacttctgtgacactgtcctcgcggtgagtgttccttgcaccagcttgttcaagaatgtcactgtgagatgtggtcattgcaccaaccttctctcagtcaacatgcgtggactgcttcttcccagtgccaatcagcttcaccttggccacactttcttcactcctcaaaatcttatggaggagattcgtaatgcaccttcaacaaacataatgatgaatcagctgccgaaccctaatgatttggtcatgagcaccatgagaggagggcctgaagaaacccctaagcctccatcagctaatagacctccagagaagagacagcgagttccgtctgcttacaaccgcttcatcaaggatgagatccaacgtatcaaagctgggaatcctgatataagccacagagaggcctttagtgcagctgcaaagaattgggcccattttccacacattcatttcggactcatgcctgataatcaacccgtgaagaaagctaatgttcgtcaggaagcagaggacgtgcttatgaaagatgggtttttcgcaccggctaatgtaggcgtctctccctactagaggtgtttaagaattttagggctttgagtattgttacccatgcatgtctctcattaagtaattgtgtactaggagtttgtcttatgcatatgaatgttgtgcacttgtattagtacttgttggtgttaaaagttgttagtttatgtttacaatcaatggtggaagggaattctgacgaagctagattagttcttctgaaaatgaagatggtttattttctgttgaactggtcctggaatgtagaaagctcaagttacaatatttaatttgaagtttttctttattcttaaaaaaaaaaaaaaaaaaaaaaaaaaaaaagccgctctacaggatcca

SEQ ID NO: 3602 - DNA, 1870 bp, Glycine max
accctcctcgcccttcctttttttctgcaaacaaatcaaccctcaaatttccttttgcttcctagaaagagttagttcccggaagcttctctctttgcacttgcatgatttgatctccgccgtggattcgtgatggtgattttatgaacttcctcctctgccccctctttccttttctgattatcattatttttatatttaactagagagagagactcatccttccttcgagacatgagatgaggccgatgcaactgccaccgccttccgcttccggggccaaccctgcccctgcaaccaccaacaacaacaacaaggagcagcgtccccagcgccgccgcaaggacctcacgctgccgctgccgcagcgagacaccaacttggcggtgccgcttcctctgccgccatcgacggcgcctgctgcggcggcgagcggcggagcgagccagcaggcggcgcagcaggtgatccctttctcggagctggagagactgaaccgcatcgggagcgggagcggcgggacggtgtacaaggtggtccaccgcacgagcgggcgcgtgtacgcgctgaaggtgatatacggtcaccacgaggagtcggtgcggcggcagatccaccgggaaatccagatcctccgtgacgtggacgatgcgaacgtggtgaagtgtcacgagatgtacgatcagaacagcgaaatccaggtgctgctggagttcatggacggaggttctctggaggggaaacacatcacgcaggagcagcagctggcagatctgtctcggcagattcttagggggctggcgtacctgcaccggcggcacatcgtccacagggacatcaagccgtcgaatctgcttataaactcgcggaagcaggtgaagatcgctgacttcggggtgggtcggatactgaatcagacgatggatccgtgcaattcgtcggtggggacgatcgcctacatgagtccggagaggatcaatacggacataaacgacgggcaatacgacgcgtacgcaggggacatatggagctttggggttagcatactggagttctacatgggaaggttccccttcgcggttgggaggcagggcgattgggccagtctcatgtgcgccatttgtatgtctcagcctcccgaggctcctccttctgcttcccctcacttcaaggacttcatcttgcgctgtcttcagcgcgatccctctcgccgctggtctgcttccaggttgctcgaacaccccttcattgctccgccgctgcccaaccacaatcagactcctccaaacctccatcagctactccctcctccgccaaggcctcttccctcctagtatgatggatccttctacatgcctattgcctattgcctagctagctagccctgtgtgccgctttattttcattttcattttcattttcatacagaatcaaatcttaatattggattttcagccatacattacagtgtttttcttcttaccataacatgccctgtttgttttttccattctttttctcttttagtattattatctttttcaagccccctcagcctcagtccctggttattattgttatgttatgccaattgcccagtgagtagtacggttataacctgcaggtgccttttctttcttgatttaatcatcttcttatttagagctacatcacctgaaggattcctagacattttggttgctgctagatagatagatagatagatagatagatagatagatactcatctatctctctttaaatagttaatctatttgcttttctggactcgggaatatttctgttctgccctccccattttgttcaccttccttcctggatttggatgctgttgtacgcatttccaatc

SEQ ID NO: 3603 - DNA, 1551 bp, Glycine max
  misc_feature (20)..(20): n is a, c, g, or t
atcaaccttcaaatttcctntttgcttcttaccaaaaagaaaccttcctggaagcttctctctttgcacttccatgatttgatctccgccgtggatatgatggtccggattcccctctcgttttctgattaatattattttttatatttaactggagagagagagagagagagagagagtcatccttcttcattttttgatacctggattcgagacatgagatgaggccgatgcaactgccaccgccttccggttccggggccaaccctgcccccaccaacaacagcaaggaccgtccccagcgccgccgcaaggacctcacgctgccgctgccgcagcgggacaccaacttggcggtgccgcttcctctgcccccatcgacggcttctgctgcggcggcgcagcaggtgatccccttctcggagctggagagactgaaccgcatcgggagcgggagcggcgggacggtgtacaaggtggtccaccgcaccagcgggcgcgtgtacgcgctgaaggtgatatacggtcaccacgaggagtccgtgcggcggcagatccaccgggaaatccagatcctccgtgacgtgaacgatccgaacgtggtgaagtgccacgagatgtacgatcagaacagcgaaatccaggtgctgctggagttcatggacggagggtcactggaggggaaacacatcccgcaggagcagcagctggcagatctgtctcggcagattctgcgggggctggcgtacctacaccggcggcacatcgtgcacagggacatcaagccctcgaatctgctgataaactcgcggaagcaggtgaagatcgctgacttcggggtgggtcggattctgaatcagacgatggatccgtgcaattcatcggtggggacgatcgcctacatgagtccggagaggatcaatacggacataaacgacgggcaatacgacgcttacgcgggggacatatggagctttggggttagcatactggagttctacatgggaaggttccccttcgctgtagggaggcagggcgattgggccagtctaatgtgcgccatttgtatgtctcagcctccagaggctcctccttctgcttcacctcacttcaaggatttcatcctccgctgtttgcagcgcgatccctctcgccgctggtctgcttccaggctcctcgaacaccccttcattgctccaccgctgcccaaccataatcagactcctcccaacctccatcagctactccctcctccgccaaggcctcttccttcctagtattctccatccatgcctagctagccctgtttgctgctttcttttctttttttattttccatacataatcaaatctctataatattggattttctgccatacattacatgccctgtttgttttgccatgcttttcttatactattatcatccttttctttttctaaaccccctccgcctcagtcactgtgtatgttattgttattttatgcctattgcccagtagtggttagttagtttttgggaacggaatgaatgataactgaacaacctgc

SEQ ID NO: 3604 - DNA, 1178 bp, Glycine max
  misc_feature (32)..(32): n is a, c, g, or t
  misc_feature (1164)..(1166): n is a, c, g, or t
  misc_feature (1168)..(1168): n is a, c, g, or t
  misc_feature (1171)..(1171): n is a, c, g, or t
  misc_feature (1174)..(1174): n is a, c, g, or t
  misc_feature (1176)..(1176): n is a, c, g, or t
gatccccttgttcaggtgcttaaaaagccctnttggtgcttttggggcactcctgggaagttctgcttcaaagaggaagcttggtcctggtaaggtatgctttcgtcaaacatctcaatgaatgtctctaaattacatacgtgatgcaaaatatggagagctccatgtctgttctctacttctccttcccactggttgcgggctgtttcttagggcaaggaagagatcaagctagagcagattagatcttctgtcagtcttcctttccattcatttttgggtagcagtgaaaagtcagaacctacagaagaaattcctagtgtagcatctgaaatgtcagaaccgcagaaacctgtttctgatgtagtttctgcctctccagtagatgagattataatgctagaatcagatacgggtgcaaaggatatggagcagaataacctagaaaactccaatgaacacagggagaaagattctgttgtgtccacttcgggaaaagaggatgaagatgagccagtatcactgtcagaattgtcatcgaatttaaaaaaatgctttcattcaaatgatcaaaataataaaatcagacagcccaagaaaactgaacagcccagtggcttagtgcagctgaagccatttgattatgaagctgcaaggaaacatgttaagtttggagaacataaaaagcatgcatcttccaagggttccgatggtcatatggaggtagtagaggactccggtagcaagaagcagcgttcgacaacaggacagggacaagctagtgatttgagtaaacaattgccccaaggtagaagacgtcaggcgtttcctgcttctgggaatcgtagttcaacattccgctgagacaatgaaaatagattttatgtacaaattgacaaagccatattttcaatttagcagtgttaaatccaacatgatcaagatatataattttgtgatttagcataggttgtgtcataaaagctcacatattttgattataatttttgttcattacttgagcagcaacagtttttttgcgccgatcagctattgaaggtgaaaatatttgagggatcagaaaaatatgttagacattgaattgtattgtattggtttgaaaattccaattacaaggttaaatatgctttgcattttgacaannnanaanaananaa

SEQ ID NO: 3605 - DNA, 1343 bp, Glycine max
atggctgcttgaagatcccaatacatgtcacaaggtgattgataaagtggtgcctgcattagttgaccttgctgagattacaactctgggtgatcataaaaagcttggcgatttagttgttaatgttcttcaagagtgcatccagtctcaagggtcaggacgaagctcgattagtagtcatactaaagagcagattgaggatattttaaattcaaagcagagattaaagtgggtctcgagccggctcgagcggctcgagcatattaagcaggctgcagcgctggttgtcaagcttgaaggaaattccctgttctcatctggaaatattgctggagctgcatcaaaatactctgaagcattggcattgtgtcctatgagatccaggaaggagagagttgttctatatagtaatcgtgctcaatgccatcttttgctgcaacaacctttggctgccataagtgatgctacccgtgcactatgtctccataaacctgtcaatcgtcatgccaaaagcctctggagacgagcacaagcttatgacatgcttggattagcgaaagagagtttattggatgctattttatttataaatgagtgctctcagtcaaatgatcctgatctctcactgaggcaaaataaagttccagattatgccgagcgtttggttaagaagcagatgcgtgctgcttggttatttcgagaggcagctattaagcatggtggggtccatagtcagggtgatggcggtgatatgtatggcccagagactgatgattctgaatgggagacagctagtgaaagtgatataggaaatgatggacgggatgacatgggcgaagacgacgatggtgattggaataatgatgatgagaggaaaaattatgacaaaccctcgatgaaagatataaagcatggatacaatgtgcagcttgcggaagaagaaccttgacaatagtaatccttgcatttaattgttctctccagcacgaatgaagcagggttggctgctgtgactaactctacatgctttgtgggatttaaaagagaaaattctaagtcgctcgttgtagtaagtggcaggttgaaagtgatgagtgagtttttggtcttacgattatttgaggttgataatttatataaacttttccatgttccatatttgttctccccatcgttcttgtcaagtgtaaaaattgaagattttaagtttggagaactacatagcgtttggaggatgtgaagtttttttttttttcctttattttccccggaggtttgtgtatataaatcctttgtgcttaagttttctgagtccgtttccactattaaaaaaaaaaaaaaaa

SEQ ID NO: 3606 - DNA, 1925 bp, Glycine max
tcagctacgtaggcctttaaccttcagatataacagcagacactacctgcggaagacgatccggagccgccacctattcttttgttcatcacatattcaatggcttcctctcttctctctccatcatttacatccttcctccgcaccaaggatctctctctctctgctttcacttctcagcgatgcttcaaagcggtgccaaggaaaataatccgttgtgctattgcggcgcctcagcgccaaccttccaccactggatcagtgaggactgcaatgaccatgactgagaagatattggccagagcttctgagaaggcacagctgacccctggggataatgtttgggtcaatgttgatattttgatgacacatgatgtgtgtggccctggttctattgggattttcaagagggagtttggcgaggatgccaaggtttgggaccgtgaaaagcttgtaataatacctgaccactatattttcacaagtgatgaacgtgccaatcgcaatgtagacatattaagagatttctgccatgagcagaatatcaagtacttttatgatattaaggatctcagtaattttaaggtaaatccagactataagggtgtttgccatgttgctcttgctcaggaaggtcattgtaggcctggagaggttctcttaggtactgattctcacacttgtactgctggagcatttggtcaatttgctacagggattggtaatactgatgccggctttgtgctgggaactgggaaacttctgctcaaggtgcccccaactttgagatttgtaatggatggagaaatgcccgattatttgctttctaaggatttgattctgcaaattattggtgaaataactgtggctggggcaacatataaatcgatggagtttgttggtacaaccgttgaaagtttaactatggaagaacggatgacattgtgcaacatggttgttgaagctggtggaaagaatggtgttgttcctgctgacagcactacatttaaatatcttgagggcaagacatctctgccatatgaacctgtttatagtgacgatcaagcaagatttctcgcagagtatagatttgatgtctcaaaattggagccagtggtggccaagcctcattctccggataatcgtgctttggcaagagagtgcaaggatgtgaaaattgacagagtatacataggatcttgtacaggtggcaaaacagaggatttcatggctgcagcaaaagtttttctggcatcaggtaaacaggtcaaagttcctacatttcttgtgcctgcaacacaaaaggtttggatggacttatactcccttccagtccctggatctggtggtaagacgtgctcccagatatttgaagaagctgggtgtgacacaccagctagtcctagttgcggtgcttgtttgggtggcccgaaagatacttacgcacgcatgaatgaacctaaggtttgtgtttcaactacgaacaggaacttcccgggccgaatgggacacaaggaaggtcaaatctatttggcttccccatatacagctgctgcatctgcattgaccggttatgttactgatcctagagagttcttgcagtagaatgttgttacagtcatcccattggtgttgtacacgttgttggttagttgtgtattctctagccataagttaaaactgatagctatttaagccgaccaatcttttggtattttttgtctgaagaaattttcggtgactattattcaattgacacagttttggttgttaaaaaagattggttcatttagtacttgttgagtatgacttggtcgttgctgttacagttgcaagtatgatttcatatggattttcttgtcaacccgtgttttattaactttgctttttgtttgttttaagttgatctttagaatcattccttc

SEQ ID NO: 3607 - DNA, 773 bp, Glycine max
ccacgcgtccgttcaattcttgtgaaattcttaaaacacaacataacaataataataataattaaaaaaaaatcgaaaaaagtactttacttgcgccgcactttgacttattaaaaagtcgcctccgagcagaccacagaaggggaagtgaggtggtgattgaaacgaaacgcacagggccatcggcgatgggagacgacagtggcagcaaccggtcaaagccggagtggctgcagcagtatgatctaatagggaagattggagaaggcacctacggtctcgtcttcctcgctcgcatcaagtcttccaccaatcgcggaaaatccatcgccataaaaaaattcaagcaatccaaggatggcgatggtgtctctcccaccgccatacgtgaaatcatgttactcagggagataacgcacgagaatgttgtgaagcttgtgaatgttcacattaatcatatggacatgtctctctatctggcttttgattatgcagaacacgacctttttgaaataataagacatcatagggacaaagtcaatcaatccattaaccagtatactgttaaatcgttactctggcagttgctcaatggactaaactatctacacagtaattggataatacatcgggacttaaagccatcaaatatattggttatgggtgaaggagaggaacatggagttgttaaaattgctgactttggacttgccaggatatatcaagcacctttgaagccattatctggaaaatggggggtggcttcctattgg

SEQ ID NO: 3608 - DNA, 1612 bp, Glycine max
tcagctacgtaggcccccccccccacgccgagcacgatctctatgttggtatatccttccatcgagaagcatttttcttttctgttgggtgtgaaataaattgctgtgtgaaatatggcaccacgcgtccgggcatcacagggacaaactcaaccattccattaatcagtacactgttaagtctttgctctggcagttgctcaatggactaagctatctgcacagtaattggatgatacatcgtgatttgaagccatcgaatatattggttatgggtgaaggagaggaacatggagttgttaagattgctgactttggacttgcgaggatatatcaagctcctctgaagccgttatctgacaatggggttgttgtaaccatttggtatcgtgcacccgagttgcttcttggagcaaaacattataccagtgctgttgatatgtgggctgtgggatgcatttttgctgagttgttgaccttgaagccgctatttcaaggggcagaagtcaaagctacatcaaatccctttcagctcgaccaacttgacaagatatttaaggttttaggccatcccacattagaaaagtggccttccttagcaagtcttccacattggcaacaagatgtgcaacatatacaaggacacaaatatgataatgctggtctctataatgttgtacacctgtctccaaaaagccccgcatatgacctcttgtcaaagatgcttgaatatgatcctcgtaagcgtttaacagcagcacaagctttggagcatgagtatttcaaaattgaaccattacctggacggaatgcacttgtaccctgccaacttggagagaaaattgtaaattatcccactcgtccagtggacactacaactgatcttgaagggacaaccaatctgccaccttcacaaacggtaaatgcagtttctggcagcatgcctggtcctcatgggtcaaatagatctgttcctcggccagtgaatgttgttggaatgcaaagaatgccccctcaagcaatggcagcttataatctctcatctcaggcagccatgggagacggaatgaatcctgggggtatctcaaagcaacgaggtgttccacaggcccatcagccgcaacagttgagaaggaaggagcaaatggggatgccgggataccctgcacaacagaagtcaagacgaatataaggtttctgctggaagagagactacgtgaagataaatttggggtcaatacttcagtgcctgaactcatgcaggacatttctggacagggtttgtctcaatacttgcaaacctctcactttattgcaatcaaagattgggtgcattcttctctggaattttgatgctaaaatgccaaatgtatgctggaacaccaatgaagccataaaagggtataaacgtatgaaagggttaagctactgtaagcacatgtatatcatgattataacaatgcaattctattgtatttctcagcttttgggcaagatcaatgtcagtgaaaccaaatgttaatcatccattgggttttcataatgaaacttttcacgattaaatttataatatgctactttgtattcgtcgaatattttgcctcacatgatt

SEQ ID NO: 3609 - DNA, 2024 bp, Glycine max
gtccggaattcccgcgtcgacccaccctggctatcgcttcctctttctctctttaaatacacacacacacacactcactttcttgcttgttctaactaccatgacaacccacattgataacctgtgggtgttggccttggtctcaaaatgcacacaagagaacattgcatggtcactcttgaccatcatggtcactctctggctctccatgaccttcttctgctggtctcatcccggtggtcctgcttggggcaagtactactcctttcattactggaaaaaaacaaccacaaccacaacctcaacctcaaacaacacaaactccaacaaccttaaaatgattcccggtcccaaaggctatcctttcattggaagcatgagcctcatgacatcccttgcacaccaccgtattgctgccgctgctcaagcatgcaaagccaccaggctcatggccttctccatgggtgacacgcgtgtcatcgtcacgtgccacccccacgtggccaaggagattcttaacagctccgtcttcgccgatcgtcccataaaggaatcagcctacagcctcatgttcaaccgcgccatcggctttgccccttacggcgtttactggcgcaccctccgccgcatcgccgccacgcacctcttctgccccaaacaaatcaaggcctcggagctccagcgcgccgaaatcgccgcccagatgacccactcgttccgaaaccgccgcggcggtttcggaatccgcagcgttctcagagagcgtcgctcaacaacatgatgtggtcggtgtttggacaaagatatgaccttgacgagacaaacacttcagtggacgagttatcccggttagtggaacaaggctatgacttgttgggtacccttaattggggagaccatatcccttttctgaaagactttgaccttcaaaaaatccggtttacctgctccaaactcgtcccccaagtgaaccggttcgtaggttcaatcatcgccgaccaccaaaccgacacaacccaaaccaaccgcgatttcgttcatgttttgctctctctccaaggtcccgataaattgtctcactccgacatgattgctgtcctctgggaaatgatatttagggggaccgacacggtggcggttttgattgagtggattatggcaaggatggtgcttcatccggaggtacaaaggagggtgcaagaggagctggacgcggtggttggaggtggtgcgcgcgctttgaaggaggaggacgtggcggcgacggcgtatcttctggcggtggtgaaggaggttctgaggctgcaccctccaggcccgcttctctcgtgggcccgcttggccatcaccgatacgaccattgatgggtataacgtgcccgcgggaaccaccgccatggttaatatgtgggccataggaagggacccggaggtgtggctggacccacttgatttcaagcccgagaggttcatgggcctggaggcggagttttctgttctcgggtcggatctgaggctggctccattcgggtcgggtagaagaacctgccccggaaagactttgggtttgagcaccgtgactttctgggtggcgaggcttttgcacgagtttgaatggctaccatctgatgaggggaaggttgatctaacggaggtgctgaggctctcgtgtgaaatggctaacccgctctatgttaaagttcgccctaggcgtggattaagtacttaataataataataataataataataataataataataatgttaagtagcaggtgcatggccctttggagccactaaatgttaagtgaatccatgaatcaaggtagaaagtttgagttggctctgtctctataatatgggtcaacgggtttttgttttttttttttttctctccttgtttttattaagttgacagtctcaagttgttcggtaatcgaaaaaaattagaaaatatatctatttccactgtaaatatttgttcaaattaatacaagttttaaagtttgcctctaaaaaaaa

SEQ ID NO: 3610 - DNA, 1904 bp, Glycine max
aaggaattaagcttaagcgtagctaatttgtggaatggggaatggtaataaatattaatgaagaatgatttgtggaaaaagggggagatttcggggaaggttcgcgtcgcaggtgtgtgactggtgggacttggaatagaacgccaaataggaatagtgagggaaatctcaactcaacgcatctgccttctgcctcgcttgccagatctcttctctctgatggggggttcggtggtggaggacaaccacgacctcgaccacgacctcgacctcgacgatactcccttagcatctgcctcttctaaatcccaccagcaattccatagcttcgatttcgaggatacaagtgttctagatttgcggcgctcatccatctttaacataacacgtatgagcaggagtatttattttgtcttaattaaagccaagatcaacctcttgcttccctttggtccattcgccattctcctacattacgtaactggacaccatggatgggtcttcttcttcaccttattggggattactccttcggcagaacgtctcggttatgctaccgagcagcttgccttctacacaggacccacagttgggggtctgcttaatgccacctttggcaatgcaactgaaatgattatatcaatttatgcattgaaaagcaatatgataagggttgttcagcaatccctactcggttcaatcttgtcaaatatgcttctagttcttggctgtgcattctttactggtggcattgtccactacaaaaaagtgcaggtttttgataaggcggctgctgttgtcaattctggcttactcttgatggctgttatgggaatactatttcctgctgtgctttactttactcactccgaagttcatcaagggaagtcagtcttgtctctttcaagatttagcagctgcataatgctactggcctatgcaagctaccttttctttcaacttagaagtcagcaaaatgtttatagtccagttggcgaggaaggagataatggtgaaaattctgatgaggaggaagaacatgaattaactcaatgggaggcaattatctggcttgctatcttgacagcatgggtatctatattgtctggataccttgtagacgccatacagggagcatctgagtcattgaatatgtcagtggcttttatttctgtcatcttgcttccaattgtaggcaatgctgcagaacatgccagtgctatcatgtttgccgtgaaggacaagcttgatatcactattggagttgctattggatcgtctacacagatatctatgtttgtgatccctttctgtgtagttgttggatggtgcatgggaaaagaaatggacttgaattttcaactattcgagactgccacgctttttatcactgtgttagtagttgcatttatgatgcaggaaggaacctcaaattattttaaagggttgatgcttattctatgctatctaatagttgctgccagttttttcgtacatgtagaccctaaaagtggtgatgactaaatatttagtgtaggtatggcaattgtcaatgctgcatttctttcccctttctgtaccataaaggtagtaagcaggatttttgaaagggttcaggaagattcttgcattcaacatgacctgggaacccctgatgtggtcacgggcaatttactgtactgaaaatttccagccttgtattatatattgaattttgaatgtatgtgttactgtattatttttatctccatagctttcattcattcaccataaaatgttgtagcctttgggctctcatctccaatgaatcacgttgaaagtaaccaatcaatgcaaagctttctttcattttgtaaaaaaaaaaaaaaaaaaagcaaaaagaggaaaagagaaaaaagaaaagg

SEQ ID NO: 3611 - DNA, 1264 bp, Glycine max
  misc_feature (1246)..(1246): n is a, c, g, or t
  misc_feature (1251)..(1251): n is a, c, g, or t
  misc_feature (1253)..(1258): n is a, c, g, or t
attcccgggcacatctcaagtcttatcatcttcatctcccaagggattcaatacaataccaggctagaagaaactccactcatcaccatctcaagcaactaattaacaagctagtactctttgagtgtttggcaattggcttagatttcttgtacttggaacaagatggaaagcactgtcacatttgagactgatctcaacctcaaggcaaccgagcttagattggggcttccaggaacagaagaaattgttgaaaaaccacttcctgcaagtgctagaattaccaacaaaaggcctttgtctgaaacctctgaggagtgtgcttcaaagggttctagtgctccacatgtggaaactgaagcagcccctcctgccaaggctaagatagtggggtggccaccaatcagatcctacagaaagaacagccttcaggagaatgatggtgctgggatttatgtgaaagtgagcatggatggagctccttacctcagaaagatagacttgaaggtctatggaggctacacacaactcctcaaagctctagaaaacatgttcaagttgaccataggtgagtattctgaaaaagaaggttataagggatctgactatgcacctacatatgaagacaaagatggtgactggatgttagttggagatgttccatgggacatgtttgtgacttcttgcaaaaggctaagaatcatgaaaggatcagaggcaaggggtttgggttgtgctgtatgagaaaaccaaaccactaaaaattactatgagcagagaattaaaaaaagtgttttgggggtgaagggaaaaacatgctgaaaagcttgtgttctcggatctgaagggttttgacttttgaaatcactctagtgtgtgcttttggcatacctttatatggagttatactctgaagcaggagaagatggaagatacggtgcagtttcgatcttcctcaagtttggcaacttttatggttattattttggcatctgtggttggatgctatgcttatgatgttgtttccactgatcctttttgaagtttcatgtgagaaatcttagagatttcaaatgaaactttgtgtagaggagagatagaaaattaaaggttatatgtaatattgtttaatccaagttttttggttgtgttgatacaagaatacaatgtaatatactaagtgttggtatttgcctgtgttattggatggactcaattaagtatgttaaaaaaaaaaaaaaaaaanaaaanannnnnnaaaaag

SEQ ID NO: 3612 - DNA, 1696 bp, Glycine max
tcagctacgtaggcccccccccctctcaatccctctcattccctctaccacctgctccattcttcaactaaaagctattgtttacatcacaagaaacaaggctacgctaaactattcttttgagttttgaaatcccaagccaatacagattctcaagcacagcagcagcaagggatatgatgggcagcagcagcatgttgagggtagtgttgggcttgtctgttttgagttgtgtgctagtgacatcctcagctcaaacgtgcagaaaccaaacattctcaaacagggtgtttgccacatgtcgtgatcttccacagttgacagcttacctgcactggacgtacgaccaggcgagtggcaggttggacatagcattcaaacacgccggaatcacctcgaccaacaggtgggttgcatgggccatcaatcccagaaacaccctcgacccagccatgatcggtgcccaggccctggtggctattcctcagtcaaatggaagcccacgggcttatacctcgtccatagccagcaccagcacaacgttggaagagggagctatcagttatccggtgtccgggttgagtgccacgtttgagagcaaccaggtcaccattttcgccactctcacacttccaaacgggacctcctccttggtccacgtctggcaagatggtcctctctctggcactacccctcaagagcatagccacgagacttcccaccaaaactccaaagaaatcttggaccttctctctggttcctccactcaggcaaccggaaattcacgccagaaaagaagaaacacccatggagtgctaaatgcggtgagctggggcatattgatgccaacgggtgccataatcgcaaggtacttgaaggtgttcaaatctgcagaccctgcttggttttatcttcacatcacctgccaagcctctgcctacatagttggtgtttctggattcggcaccggtctcaaactcggcagtgactccgagggtgttgagtatgacactcacagagcacttggtattgtcctcgtctgccttggaactcttcaggtgtttgcgctgttcttgaggcccaacaaggaccacagatacagagtgtactggaatgtgtaccaccacttggtcggatacgccaccataatcatcagtgtcgtcaacgttttcaaagggttcgacaccatagaaatttacgtaggggatcgctacaatagctggaagcatgcgtacattggcattattggagcattgggtggcattgctgtctttttggaagctttcacatggatcattgtcttcaagaggaggaagtcagagaacaaaattccacacggagcaaatggtgttaatggctacggttctaggccacaacaggtgtaggatatgaatatatgacgtgtagccagatagatatattggtttcttttgtaattttatgcatttttactcctatacgtgtgcattttattgttgctctcctttgtataatgttgagggtatttaatttaaggatactccagctgctcagagtctcagttttgaggcaattctttcttagggaagtgactcagagtctggtttaatccatactgttacttcaggttcaggttatacattgtattggtttctgtttgaagaatatttgtatttattattaattatttttttacttatatattactttttctaaa

SEQ ID NO: 3613 - DNA, 1382 bp, Glycine max
tcgagtcagctacgtagggccccccccccatagtcaccctctcactcttcttgcagcatctctctccattaccttcataactcaatctcccattattattagagatgacggttgaaaaggaagatttgggtttgagtctaagcttgagcttccctcagaaccccccaactcatcttcatctcaatctcgtttcctcttctccttccagccacaaccctcagaaaccctcttggaacgaccctttcacttcttcagctggatcatcattccttcgaggaatcgatgtgaaccgtttaccttctgtggtcgattgcgaagaggaagcaggtgtgtcatctccaaacagcacggtttctagtgtcagtggaaaacgtagcgagagggaagaagccaatggtgaagaaaacgacacagacagagcttgttccagaggcatcatcagcgacgaagaagatgccgaaacctctagaaagaaacttagactctccaaagaccaatcaattatcctcgaagagagcttcaaagaacacaacactctcaaccccaaacaaaagttggcgctggcgaaacagctgggtcttcgagcgagacaagtggaggtgtggttccagaacagaagggcaaggaccaagctgaagcaaacggaagttgactgtgagtttttgaaaaggtgctgcgagaatctgaccgtggagaacaggaggttgcagaaggaagtgcaagagcttagagcactgaaactttccccgcagttctacatgcacatgaccccacccaccactctcaccatgtgcccctcgtgtgagcgtgtcgcggttcccccctcctccgccgttgatcctgccatgcgtcaccatcacgtgcctcctacacaacctcgggccttccccattggcccatgggccaccgctgccgccactatcccgcacaggcccttcgatgccctccgtcgcagatcttgactcgtcgaaacaaaatgacaaaatttgaaaaaaagaaaacggttgtaatagtaggaagccatgaattatgtgttcaaagtgtggtctaagatatggtggttaggaaaactgattttgtgggtctctaatgttttgtactagtttgacccttcgtctttgttttgggtttcggagcatgacctggtttagttagttagaggtttttttagtttgtaatacttactgcgttactctcatttctcatgattaaatcggagattctgtaaagttcagtagtcttaataaatattatatattacatatagctttcttgggtaaaaaaaaaaaaaaaaaaaaagaggaaaaaaaaaaaaaaaaaaaaaaaaaaaaaaaaaaaaaaaaaaaaaaaaaaaaaaaaaaaaaaaaaaaaaaaaaaaaaaa

SEQ ID NO: 3614 - DNA, 1063 bp, Glycine max
cgtgcgtaagctcggaattcggctcgtggtcttttatagcagcagttgagaaaggaaacatgagaagcatgccaaacagaagcatgcctgcatctccttatcctacacctggcgcccttctcatgggagatgccttcaacatgcgtcaccctttaaccggagggggaatgactgtggctttgtctgacattgttttgctaaggaaccttcttagacccctgcatgatctgcatgatgctaatgctctttgcaaatatcttgaatcattctacaccctgcgcaagccagtggcatctacaataaacacactagctggggcactgtacaaggtgttttgtgcatcccctgacccagctagtaaggaaatgcgccaggcatgttttgattatttaagccttggaggtgttttctcagatggaccaatagctctactctctggtctaaatcctcgtccattaagcttggttctccacttctttgccgtggctatatatggcgttggtcgcttactcataccattcccttctccaaaacgcatgtggattggagctagattgatttccggtgcatctgctatcattttccccattatcaaggctgaaggaattagacaaatgttcttcccagtaactgtgccagcatattacagaacaccccctaccaatttggatgattaagtacacttcttggaaggaaagtcatgaattcataacataatctgtgcccgcattctttgtaactgtgattagtcctaccaaaaggaataagagagcctagaggggaattttgttaaaaggctccacatattagggcactggttttgtgcgtgtgcaatatactactatcttgttttaataaaactttttaaacgtattgtctaaacaaggacgaaatttaagtttccaagtcaatcttccaaatatcagaggtaaaaaatgtacgctttggctttaataacaagtccttgatttttggctattagtatatatcattgctgtatgcctatcccttattaaaaagacaaataatataatgtaaaagatatgccattgtgtaacgtgat

SEQ ID NO: 3615 - DNA, 2187 bp, Glycine max
gcgagctataatacttattccttaagtatgtacaataattttacccctatatacggctgcgagaagacgacagaaggggatagtagcaaagtgttacaattcaaaagtcacatgtaaacaggaacaaagaggtgttccaagaaactacaaaactagtactcaatcccatctttttgcaatcccagtttcaccgatctctaggagaggatggattatcagtacattctaggagggattatggcttgtagttttgcttttttgtatgttgtgtacagttttggagcaaaggtcacagattcaagttcaatacatgtaaagagtaatgaatgtgcaaagatatcatcagagaatggaatatgctcacatgaggatgcaggaagtgctgacatcattattgtgggtgctggggttgctggttcagctcttgcttgcactcttggaaaggatggacggcgagtgcatgtaattgaaagggatttaagtgaacctgacaggatcgtgggtgaattgctacaacctgggggcgctcgtgagttaattgagttgggtcttgaggattgtgtggatgaaattgatgctcagcaagtctttggctatgctcccacgcgtccgggcaaaaataccaagctgtcttatcctttggaaaaattcagctctgatatttctgggagaagctttcacaatggccgtttcatacagagaatgcgagaaaaggcttcgtctcttccaaatgtaaaattagaacaaggaactgtcacatctctacttgaagagaaaggaaccatcactggggtgcactacaaaatcaaaagtggacaagagttcacagcaaaggctcccctcaccatagtatgtgatggttgtttttccaacttgaggcgttctctttgcaatcctaaggttgacgttccctctcattttgttggtctggtcttggagaattgtaatcttccatatgcaaatcatggtcacgtcatcttaggtgatccttcacccgttttgttttatcccatcagtagcactgagattcgctgtttggttgatgtgcccggccaaaaattaccttccctaggtggtggtgaaatggcctgttatttgaaaactgtggtggctcctcaggttcctccagagctgtatgattcttttatagcagctattgacaaaggaaacataagaaccatgccaaatagaagcatgcctgcctcaccttatcccacaccaggtgcacttctaatgggagacgccttcaatatgcgtcaccctttaactggaggaggaatgactgtggctttatctgacattgttgtgctaagggatttacttaaacctcttcatgatctgcatgatgcttctgctctttgcagataccttgaatcattctacaccctacgcaagccagtggcatctacaataaacacactagctggggcattgtacaaggtcttttgtgcatctcctgatccagctagaaaggaaatgcgccaagcatgtttcgattacttgagccttggaggtgttttctcagatggaccaatagctctactctctggtctaaatcctcgtccattgagtttggttctccatttcttcgcagtcgctatatacggtgttggccgcctgctcataccatttccttctccaaaacggatgtggattggagctagattgatttcaggtgcatcaggcatcattttccccattattaaggctgaaggagtgagacaaatgttcttcccagcaactgtgccagcatattacagaacccctcctgtccattgaacacacatgaaggaaatacatggaatatataaaattcccttttcccacattcttttcacctgttgtattccacttttgccaagaagaataagagagggaactcattccataattaggatactcattttgtgcaactgcaaccaatattattgtattaaaaaaacattttttaatttgggacccgagaatgaagttccaaaaccaatcttgcaggtattagagctaagaaatgttaggctttgttttcaatgcaagttggtgttatttggctactagtatatggtatcttggtattgtatacgttatcttcacttaaatgaggggcaaggtaagtacccagtgcagaaagaagttggtgtaatgtgccaatggaagcaccccccaaatggaagattatttatcccttcc

SEQ ID NO: 3616 - DNA, 1074 bp, Glycine max
ggattgattgagttaacagcatcttggactccggaactttcctcctttagggttgggaaaatatctcggtatgatgctaaatcaaataggatttggctggaaccagttttagaatacccatttgattttaagaaaaaaatagatgaggatgcatcttctgtacagtatgatccatccccttatcaggaggatggttctttagagatagagtatacattgctggccgatgttcgaatggttaagcatggcattcctgatttgaaaagtgatgctttggttaatccaacaaaagcaactaatgatattaccaatgaaaaacttgcggcaaaagcaattaatggtagcactggtgagaaactcgcgggtgatcaaactactgtgggaagttgccatccagaaagaggtcatatcactgctaaagaaaatggggaagtaaacgtgtgggacaaaattaacgaggcattaaaagcaaagaaggccaagctgtcgcaggaggattgttggagtagaggaggagagagctcaagcacgaggtcatggtcccatagagccatgagatgcagtgcgttgggtcccacaatggcattgttaaggtctaacaatggactttaagaaacaagcctacatctgttgtgtcacctatccgcagtattttggtatatatgaacaaattaccgaaactatcatctttttggtacatatgaacaaattaccgaaccatcatcagcaattcaggctgcatgtcctgatttcagtatattataggcaaaaatatttgaaggcttattcttattatccctctttcggatgttattagttgcagtcctcctgaaaaccaagcagaaaattgaatcaactgctacacaacatgagagaccattgttcaccatcccaagtaccaaacaaaagaaattatgattatagataataacgcttcttttcatacaatttactgttaaaattatattgttgttagttggcagaccgtattgtatgcaaaccctgcaggctaaaagaaatcagtgtttcacactcaaaagttaaattctaaataaacatgggtttttgaagctt

SEQ ID NO: 3617 - DNA, 1493 bp, Glycine max
ctaaaaagttgcctagcagaagtgctcggcgaaagaaagctaaaagaagatggctgagggaactaaaattagagaaggagaaggagaagctccatcagactcctgtgcttgaaaaaggtggacaagaattacctatcaacgataataattgtgttgtttctgatgtacatcaacaacctgatgaagaaagtgaagaagaggatgacattgctcctgtggaaattaggccagggcacattcggtttgagccccttaagaaggatcaggatcaggcagtgccacagaatcagtttccagtggaaacatttcagtggaatggaataaccaacaagaagaagggccagaaatggggtaaagagagaatgcctttccgtaagcaggatggatatgaagattccggtcaagattgtcctacagttcagaatgctgaaaaggaacagacatccaatgtgatagattttgataagcttaaacattatacaagcttgcctaaggaaggggatgtaattgcttatcgattgattgagttaacagcatcttggactccggaactttcctcctttagggttgggaaaatatctcggtatgatgctaaatcaaacaggatttggctggaaccagttttagaatatccatttgattttaagaaaaaaatagatgaggatgcatcttctgtacagtataatccatccccttatcaagagaatggttctttagagatagagtatacatcgcttgctgatgttcgaatggttaagcatggcaatcctgatttgaaaactgtagttgtttctagtgatgcttgggttaagacaacaaaagcaactaatgatattaccaaagaaaaacttgcggcaaaagcaactaatggtagcactgatgaaaaactcgcagctgatcaaactaccatgggaagttgccagccagaaagaggtcatatcactgctaaagaaaatggggaagtaaacgtgtgggacgaaattaacgaggcattaaaagcaaagaaggccaagctgtcgaaggaggatggttggagtagaggaggagagagctctagcacgaggtcatggtcccatagagccatgagatgcagtgcgctgggtcccacaatggcattgttaaggtccaacaatggactttaagaaacaagcctacatctgttgtgtcacctatccgtagtattttggcatatatgaacaaattaccgaagccaccatcatctttttggttatatgaacaaattaccgaaccaccatcagcaattcaggttgcatgtcctgatttcagtatattataggcaaaatatttgaaggcttattcttattatccatctttcggatgttattagttgcagtcctcctgaaaaccaagcaaaaaattgaatcaactgctacacaaaaatatgagaccattgttcaccttcctaagtaccaaacaaaaaaattatgattatagataaaaacgcctcttttcacacaaaaaaaaaaaaaaaa

SEQ ID NO: 3618 - DNA, 950 bp, Glycine max
aagaactgtcaagtctagctaattcaccaagctggccacctaggcatggttccccccccccaatttcttccttatttcattacaatccagcaacaattgttcgtcttccttgttctcaactatgttgattgccttagagacaccctgaaggatgagaagttccctcttcgcgaaacttcaaccaaggcattgggaaggctccttctttatagatctcaggtggatccttctgacacacttctttacaaagatgttctttcattgctagtatcatccacacatgatgagtctagtgaagttagaagaagagcattatctgctataaaagctgttgccaaggcaaatccttcagccattatgtcacacggcactattgtcggtcctgcactagcagagtgtatgaaagatggaaatactccagttagacttgctgcagaacgatgcgcgctacatgccttccaactaacaaagggttcagaaaatgttcaagcagcacagaagtatatcactggcttggatgctcggcgcctatccaagtttcctgaatatagtgatgacagtgacgacagtcacgaagatatatcaagtagctaagtttgtcttggtgttgtgtccttccctttcttctctggtcggaatacaaaattctcgttgataaccaaatttttggcagcacaatgatatagtccaaaaaaaaaatatagatatacgcaatttgaggcagcttacccaatttttttccgcctgggtatttgattatgtctataattgtaaattagatgaggtgaattatttgtttacttaagatttttattcaatcaattttggtggtaatatattttttcacgccggcaatattttgtccattttacctttgcaaagccttaggagcagcttttgattttccctaaggttctaccgtcaagtacaagattaaccggggttttaaa

SEQ ID NO: 3619 - DNA, 1476 bp, Glycine max
ctaatatgggccaaaagcatttacccatatacacttcacccgaagagactggtaaagatcatatagacaatgaagaaagtgaaatgcatgaagacacagaagaaatcaatgcattgctttattctgatgatgatgatgatgatgaggtaacaagtactggtcattctccattggttacaaaaagaacttatgtgatgcaagaacagtttgcaggcatgaagaaggaggttgctggctctgattggccaaacaaaaggcagaagttaattgatagtggatacaatacactaccaccactcatggacagtgctagttccgaaaggctaaatgaaatgtgcgagtatgccagtgatgctgaatcaaagtattctagtagtggcggggtgtatgctgcaaggcaaactaaagaagataatccaacacctgctgatattcaattgaaaaaggataaaatccgtgaattgttgagagttctcgagaactttattcctggagcaaaaggaaagcatcccctgttagtcattgatggtactattgagtacttgaaatctttggcgtcccaagctggtacactgaaatatcactaagtgctcattgtggtggttacaatatggttggttgaagggcacatgggtgcggctcgagcggctcgcggttgaatgattagatttgttgcattgcaagttttcaacttagcatctgcttcttttatcctctttctcgaggagtatttatagtgtagcagtgaaggggcaaaaacagcaatagatagtactgccctttgccactgcaattgaagaaatatggggtttgggatttaaagttgatgaccaagattttttatcttttagcgtttggaggattaaagatcacagagagattgaatggatgggagatgatagtggattgctgtgctgtaaatgaggacactttttttctccaggagttttgaattctcttgttgatcgaatgcatgcgcgttaggtaactggggtcccactctccaccctcctccttttcattcctgattttgtgctttgttctctcctctcttccaagcttgtacgcatatcatgctagcgtagactctaaagtaccaagaagaaagttcaatgttggggagtgcttgaatgaggagcgtggtgttgtgttttcatcatgacttgctggggccccatttgttggatacatagcatgttgtggtagtagtaaaggttactttgttttacgtgttgagggtggaatcataggtgattctcttttctacgttgtaattgagaggtgggttgagtattctaggtttctttttcattattatttatctgtcggttgtgtgattgtatgaatgatttggattgtgaatattgtaagggcagcgcagtggtgtattctggttgatgactcgttggcattcatatttttttgtctttgatgtttgtacatgttgaataattaaatgtcattttactatgaatc

SEQ ID NO: 3620 - DNA, 695 bp, Glycine max
  misc_feature (563)..(563): n is a, c, g, or t
gacccaacttgtccagcaagactattcgatttgattgattgtattacagtgtcattttccttcataaccgatttctattttatgattgtgcgcaacagttcgcagactcacaatggccgcaatatccaactccttatcactgaagcacagtttctctctgagtcgagctcctccttcttcctcttccatcaaattcaaattcagaagatgttacgccgcgttcgccaatgagaatcgcgagtacgtgatcgttggcggcggaaatgccgcgggatatgctgcgcgcactttcgttgagcatggaatggctgatggtcgtctctgtattgtaaccaaagagccgtatgcaccttacgagcgtcccgctctgacgaaagcgtatttgttcccgccggataagaaaccagcacgccttcctggttttcacacttgtgttggatccggtggagagaggcagactccggggtggtataaagagaatgggatagagatgttgtatgaagatccagtaaaagatattgatattgaaaagcatacctttgacaacaagttctggaaaactncctgaagtatgggtcgcttggtattgctacaggatgtacggcatccaagggttccagagaaaattggggggaaacctaccctggggttcactatattcgggatgttggagatgcccgagcactaattttatc

SEQ ID NO: 3621 - DNA, 1927 bp, Glycine max
ccacgcgtccgcgatttgattgattgtattacagtgtcattttccttcgtccccgattcccgggtcacgcctccgccccgcagttcgcagactcacaatggccgcaatatccaactccttatcactgaagcacagtttctctctgagtcgagctcctccttcttcctcttccatcaaattcaaattcagaagatgttacgccgcgttcgccaatgagaatcgcgagtacgtgatcgttggcggcggaaatgccgcgggatatgctgcgcgcactttcgttgagcatggaatggctgatggtcgtctctgtattgtaaccaaagagccgtatgcaccttacgagcgtcccgctctgacgaaagcgtatttgttcccgccggataagaaaccagcacgccttcctggttttcacacttgtgttggatccggtggagagaggcagactccggggtggtataaagagaatgggatagagatgttgtatgaagatccagtaaaagatattgatattgaaaagcatactttgacaacaagttctggaaaacttctgaagtatggttcgcttgttattgctacaggatgtacggcatcaaggtttccagagaaaattgggggaaacctacctggtgttcactatattcgggatgttggagatgccgatgcactaattttatcgttggagaaagcaaaaaaggttgtagttgttggaggtggttatataggaatggaggttgctgctgctgctgttggttggaaacttgatacaacaatcatattcccagaagatcaccttttgcaaagactgtttactccttctcttgcccggagatatgaagaactctatcaaaagaatggagtcaaaatcttgaagggtgcttccataaaaaatttggaagctggttctaatggacatgtagctgctgtgaaacttggagatggatctcttgtggaggcagatacggtaattataggcattggagcaaaacctgctgtgactccctttgagagggtgggcctgaatacagaggttggtggtatacaggttgatggtcagtttcggacaagcactcccggaatctttgctgttggtgatgtagcagctttccctttgaagatttataatcgtatctctcgagtggagcatgtggatcatgcccgtcgctctgcacagcactgtgtgaaagcattactcagtgcacaaactcacacgtatgattatcttccatacttctactcgaggatttttgaatatgaaggaagccctagaaaagtgtggtggcagttctttggagacaatgttggagaaacagttgaaattggaaattttgatcctaaaatatctaccttctggattgaatctggtaagctgaaaggagttcttcttgaaagtgggagccctgaggaatttcaactcctgcctaaacttgccagaagtcagcctctgattgataaagccaaacttcaaaatgcaacatcagtggaggaggccctagagattgctcgggaatccttgcaaggcgaagctgctgtctagtaccgatcttggtaacatcattctgtaatttatcttctcttacggccagattatcagtgactatctgtcatcatctgagtagggattgctccttaagagaataattttcattacattctcagtcacctgacattagtaatggtttttaactggaatgtctaatttggatttgatctggtgccataaggtatccttgaattttctcaataatttaagatagcctttgcctttaaaaaaaaaaataaccaaacagcaatgtgatttttgttcttaacttactacctacaacccttcttctgaagggactcctgtagggaattctgtctgcagaaagagttgtctcatttaaaatttcaagcctggacctaaaaaggcatattttctcttgtaaaa

SEQ ID NO: 3622 - DNA, 1517 bp, Glycine max
gtggagatttctatcgctaaaggttataaataaataaatatatagagagagaatgaaaaaagggttttgttttcatttcgttcttttttttccttccaaactcactcatctcacacttcctcttcctctctcactcagattcagcaattttctattttcttctctcatggcttcagattccaaaaaggatttccctgctgatgacaaagctggaacagcagagaataaagcatccaaagatgaaacgtcatctaaagattctccagcagcacaaagagctactacagctacttctggacctgcaactggttttccaggcaacccttttgatttctctgcaatgtctggcctgctcaatgatccaagtatcaaggaattggctgaacagatagcaaaagatccatcattcaaccagatggctgagcagcttcagaaaacttttcaaggagctccacaggatgctatgcctagctttgataatcaacaatatttttcaaccatgcaacaggttatgcagaatcctaattttatgaccatggctgagcgcctgggtaatgcattgatgcaggatccatctatgtctgccatgcttgaaagtttttctaatccatcaaataaagaccagcttgaagaaagaatgacacgcatcaaggaggatccatctctgaaacatattttggaggagatagagactggtggtcctgctgctatgatgaggtactggaatgatgaggaggttttgcggaagttgggacaagccatgggtcttgcaaattctggagatgtaggtgcctctgctgaaaattctggggcagatgagacagaagatttgggaaatgaagatgaatcaattgttcatcatactgctagtgttggtgatgtggagggcttgaaaaatgcactagccgctggtgctgacaaggatgaagaagattcagagggaagaactgctttgcattttgcctgtggatatggtgaggtgaaatgtgctcaagttctccttgaggctggagcaaaagtggatgctttggataagaataagaacactgctctccattatgcagctggttatggcagaaaggaatgtgtggcccttctccttgaaaatggtgctgcagttactctccagaatatggatggtaaaactccaatagatgttgcgaagctaaacaatcaaaatgaagtcctgaagctacttgagaaagatgcttttctgtaattgcaatgcatgatgccatgctgtcaccaacaagcaaaggggaaactgaggggaagaaggcacgactttgttatttatcttttggtttcttccaaccgttgtgtgttaaactaaattgattaacgttgttggatgtgagtcaccatagaatttgttatctatgttcttgtaatgcatttattgtcacactgcatgattttgaagattagtgccgtcatgattttattcatgcttcaattttacttgtaataaattgcttcgtggcaagattctggttcaaatggtttcgtccaagaat

SEQ ID NO: 3623 - DNA, 1512 bp, Glycine max
agattcaggttccaactcttctctctctcgccgtctaggtttttctctcaaaatttcgaaaccccgattttcaatttaaaattaaattaaaaaaaaagggttttgttttcatccaaactctcacactgcctcttcctctcagattcagcaattttctattttctcctctcatggcttcagattccaaaaaggatttccctgctgatgacaaagctggaacagaagagagtaaaacatccaaagatgagacttcatctaaagattctccagcagaacaaagagcgacagctacttttggacctagacctggacctgctgggcatccaggcaacccttttgatctctcagcaatgtctggtctgctcaatgatccaagtatcaaggaattggctgaacagatagcaaaagatccatcgttcaatcagatggctgagcagcttcagaaaacttttcaaggagctccacaagatgctatccctagcttcgataatcaacaatatttttcaaccatgcaacaggttatgcagaatcctaattttatgaccatggctgagcgcctgggtaatgcattgatgcaggatccgtctatgtctgccatgcttgaaagtttttctaatccatcaaataaagaccagcttgaagaaagaatggcacgcatcaaagaggatccatctctgaaacatattttggaggagatagagactggcggtcctgctgctatgatgaggtactggaataatgaggaggttttgcagaagttgggacaagccatgggtcttgccaattcgggagatgcaggtgcctctgctgaaaattctggggcagatgagaccgaagatttgggaaatgaagatgaatcaattgttcatcatactgctagtgttggtgatgtggagggcttgaaaaatgcactagcctctggtgctgacaaggatgaagaagattcagagggaagaactgctttgcattttgcctgtggatatggcgaggtaaaatgtgctcaagttctcctcgaggctggagcaaaagtggatgctttggataagaataagaacactgctctccattatgcagctggttatggcagaaaggaatgtgtggcccttctccttgaaaatggtgctgcagttactctccagaatatggatggtaaaactccaatcgatgttgcgaagctaaacaatcaaaatgaagtcctaaagctacttgagaaagatgcttttctgtagttgtaatgcatgatgccatgctgtcaccaacaagcaaagggggaaactgaggggaagaaggcatggtgacttcgttattttctcttttggtttcttccagccatttagtgtgttaaactaaattgattagcgttgttggatgagttaccatagaatttgttatctatggtcttgtaatgcatttattgttacactgcatgattttgaagattagtgccgtcatgattttattaatgtttcaattttacttataatacattgcttcgtgggcaaattctggttc

SEQ ID NO: 3624 - DNA, 743 bp, Glycine max
cacactgcctcttcctctcagattcaggttccaactcttctctctctctcgccgtctaggtttttctctcaaaatttcgaaaccccgattttctctcaattcgaatctgcgattcatcgtaacctaaattattagatagttatattatctctctgcgtttctttcagcaattttctattttctcctctcatggcttcagattccaaaaaggatttccctgctgatgacaaagctggaacagaagagagtaaaacatccaaagatgagacttcatctaaagattctccagcagaacaaagagcgacagctacttttggacctagacctggacctgctgggcatccaggcaacccttttgatctctcagcaatgtctggtctgctcaatgatccaagtatcaaggaattggctgaacagatagcaaaagatccatcgttcaatcagatggctgagcagcttcagaaaacttttcaaggagctccacaagatgctatccctagcttcgataatcaacaatatttttcaaccatgcaacaggttatgcagaatcctaattttatgaccatggctgagcgcctgggtaatgcattgatgcaggatccgtctatgtctgccatgcttgaaagtttttctaatccatcaaataaagaccagcttgaagaaagaatggcacgcatcacaggaggatcccatctctgaaacatattttggaggagatagagactggcaggtcctgctgctat

SEQ ID NO: 3625 - DNA, 2949 bp, Glycine max
ccacgcgtccgctcgccacgcgtccgcggacgcgtgggaacgctacgaccttaggctcaagcccgacctcgtcgcgcaccgtttcgcaggttccgtcgccgtccacctcgacatcgtccccgccacctctttcattgttctcaatgccgccgaactctccgtcagcaacgacgctgtttcattcaccaaccaagactcctccaaggttattaaaccttcacgagttgagttgtttgaaaatgatgagattctggttttggagttcccagaggaattacctattgggttcggtgtcttgtccattcgctttgaaggaatcttgaatgatagaatgaaaggcttctaccgaagtacctatgagcacaatggtgagaagaagactatggcagttacacagtttgcaccggctgatgccaggcgatgctttccttgttgggatgaaccttcttgcaaggcttctttcaagatcacattggatgtgccttcagagcttgttgctctttccaacatgccaattgttgaagaaataacagatggaaatctcaaaacagtttcatatcaagaatcaccaatcatgtctacatatttggttgcggttgttgttggtttgtttgattatgtggaagatcatacctcagatggggtcaaagtccgggtgtattgtcaagttggtaaggcaaaccaggggaaatttgcacttgatgtagctgtgaaatctttggaactatacaagggttactttgccactccctactcactgccaaaattggatatgattgcaatccctgatttcgctgctggagccatggagaactatggtttagttacatatcgggagactgctttgctatatgatgaccagcattctgctgctgcaaataaacagagggttgcaactgtagtagctcatgaactagcacaccagtggtttggcaaccttgttacaatggagtggtggacacatttgtggctgaatgaggggtttgcaacatgggtgagctatttagccactgatagctgttttcctgagtggaaaatatggtctcaatttcttcatgaatctactgagggtcttaagctggatggacttgcggagtcccacccaattgaggtagagatcaatcatgcttgtgagattgatgaaatatttgatgcaataagttatagaaaaggtgcatctgtaattaggatgctgcaaagctatcttggtgccgaatgctttcagaggtcgctggcttcatatataaaaagacatgcttgctcaaatgctaagactgaggatctatgggctgcacttgaggaaggatctggtgaacctgtgaacaagttaatgacctcatggacaaagcagaagggatatcctgttgtatctgttaaagtcaatgatcagaaattggaatttaatcagtcgcaattcttgtcaagcggtgctcaaggagaaggccattggattgttccaataacattatgctttggctcttatgatgtccacaagagtttcctcttgcaatcaaaatctgaaacacatgatgtcaaagatttccttggttccacacacaaaggtttaaattgttggattaaacttaatgtggatcaggctggtttctacagggtgaagtatgatgagctgcttgctgctagacttagatatgcagtagagaaacaactcttatctgcatcagaccgatttggcattttggatgattcatttgcactttgtatggctcgccaggaatcattgacctccttgattaacttgatgggatcttacagggaggaagttgattataccgtgttgtctaacctgataactataagtcttaaagttcaacgtattgcagctgatgcagtaccagacttactagaatatttcaagcagttctttattaacctttttcagtactctgctgagaggcttggttgggagcctaaaccaggagagagtcatgtagatgcaatgttgagaggagaaattttgactgcccttgctatgtttggtcacgatttaacactggatgaagcaagcaagcgttttcaggcattcttagaaaacagaaatacaccacttcttccacctgatataagaaaggcggcatatgtagctgtaatgcaacgggcaagcaaatctaacagatcgggttatgaatcccttttgaaagtatataaggaagctgacctaagtcaggagaaaacgcgtattctgggctctctggcatcttcacgtgatccagatctaattcttgaagctctaaacttcatgttgtcatctgaggttcgtagtcaggatgctgtttttggacttgctgttacccgggaaggacgagatgtagcttgggcatggcttaaggaaaattgggaacacctcataaaaacatatggttcaggatttttgataactcggtttgtcggtgcagttgtctcaccgtttgcttcctttgagaaggccaaggaggtagaggaattctttgctacccacgctatgccatccattgctagaacgttaaggcagagccttgagcgggtcaatatcaatgcaaattgggttcagagtgttcagaacgaaaataggcttggtgatgctatgaaggaattggcatacagagtttactaggctcttgtctagagcgcttttccataaataaaaaaaagaagtgtggtggtaatttcaactttcttctgtctgtcaatgttaccgtcttttgctaagcatggaccttgccagttgcctgacatgggaataatgttttgtgtgccctttttaaatctgcagtcgtgcgattttggtttgagatgacaaaaataccctcactcttggatatttgcggacaaaatttcgtaacggatagaagataaatacttaaatgagtgttcatggatgatgaagacaaatattaaaaaaaaaaaaaaaaaaaagaaaaaaaaaaaaaaaaaacataaatgtctttgttt

SEQ ID NO: 3626 - DNA, 1454 bp, Glycine max
ataacaggtggcttcctttcctcctcttctgttcttttattctagggttacaaagttttccttccatacttgccggcagccgtgtggtcttgatagagcgacaccgtgccaccgcgccaccacccaaccttgcagccccaagtctgcgtttccgcagatccactgtccgcacataaaggtgtatactctgctcagttatatcatttgctaataattttcactatctttacgacgccgccaccgaccccaagcccgccgtctgcgccgcgcactccgacgccgcggcggcccatctgatcaagatcaacgggaggtttactcgttcgtgtcaagctcaaaggttgaaacaaacacgaaggcgctgaaacaaccctaagaagtaagaaccagattttatctccatacagtagaagtaaaacagtatattgtagccattcggttgagttcaaattgaaagagacaagatggccgggcaatcaaaccatgacctttcattgttttcagctgaggagcttgagttcattgctgaagatgagatcgtggacattgtacccaatctcaaaatgagtgctctcaatttcatttctggagattttggcccatttacgccccagattgttacccaagtaccactgtggttggccactgctctcaagaagagaggcaagtgctccatttgccctccccaatggatgtctgttgagaagttgagtcaagttttggaggcagagcgagactctcaagagatgtcagatcaattgccatttcattatgtggaaatctcaagacttctttttgatcatgcacgtgacaacattcctgatgtatatatggtgaggtctctaattgaggacatcagaaatgttcggtttcataaagttgaaactgatttggaagcatttaatggtcgtacaattgctgttaagattaaaaatttatctgcaatggaagtgaatattgttcgtccatttattggaagagctttacaggcattttataagcatgatagtccagagctgataccagacccagagagagtttctgataggcgcccccaagttatcaacaatgctccaagaagacaactacgaagatagtcattgtcacctattggtaacatctcttctagaatcataagcatttggcccgcttcaaaggggcatctttcatgagaaatacttcacaactttctttgctgctgacttcagtgtaaatgaatggcttgagacatggtcgaatcttcagaaagtaatgttctctcaaaatattctcataattatttgtcaagagtctgaaaaagcaaagcacttcatgggattaacatggccatgcccccatatactttatgttgttaattctattagtagtgttaagtatttaatgtctatcttttgcttgctattatagtgattgaggattaaatacgaatgcagggagtatcggtcatatttttt

SEQ ID NO: 3627 - DNA, 733 bp, Glycine max
tcagctacgtaggccccccccccgaaatccgacatgagtagtagcatgcttagcttgtaagagagagagagagagagcaatcccacattctgagtgattcaggaagcagagagccctaaaaaggagaacttgaaggcaaagcagactcaatcagctactgttaagaggagcagatggaggaagtgattggacccagattgtactgttgctctaattgtagaaaccatgttgcccttcatgacgatgtgatttcaaaggcctttcaggggaaaagtggacgggcttttctgtttactcgtgcaatgaacgttacaataggaccaaaagaagacagggagctcatgacgggtctccacactgttgctgatgtctactgttctgactgccatgaggtgcttggttggaagtatcagagagcctatgaggaatcacagaagtacaaggagggcaaatatgtacttgaaaaggctaaatttgtcagggaaaacttctagtgcgtatttatcaatcttataaatataatcattccaaagtgcttcttattgtgtgttggtgcatgtattctattctacatgttcatttgacgtgtattcatattattgtcattcgctgtgtattctcttatcaatttatgtgtggatatttgaagaccgttcacttgtttttatataaattgtatttgtgggtgggcaacattgaaatttccgaccaatgaaataaaacttttaagaat

SEQ ID NO: 3628 - DNA, 2453 bp, Glycine max
ctttttttttttttttttcctttttttttttttttttttttttttttttttttttctttttttttttttttgaaaggagttaagtggcacatgcagatatatatataaaatagaaagggaaagcaacaactgttgctttttacacagattgcgttgataggacactaccattttgtttctttccctctctacgtttgtttctataatttgccttcaggtttctaaataattcagaatggcgttttcttttttgcctggaaatacaaaaggttaaaacaagtccttacaataactttttcgtcccaaaatagccataactttgttgactactaataaatcaccctttactagaaattactaccaactacattcattttcaatcctaccactaacgcttttttttttcttgatgtgcaacagtgcttctcttatcttccttttacacaccttttttcaagatttgccatgatcttcacacaagggattcctccttatataccagccaatttccccaacctatgtctcaaaatcttcagccccatgtacctgcccatcatcatgacagttgcttgaggatttgttcctggtgattcgtcaaatgttgagccgtctaccacacgaagtctgtcaacgccaagaaccttgtaatcagggctgactaccttccccacatggcaccctccatggtagtgccaaattgtgatcacggtgtctttgcagaactgtgctatcgacgctgtgtcattgggatgcttgggtatgaagttgacattagccttgacagtgaggttcagcagttcctctgtggttttcttgtcacacaaagtgtagtttgtgaagtgttttgactggacaaccttaatggccaagcgaatccccttgacacagcgatgaagatcatatggatgactgaagtagttgaaggtaacgacagggttgtcgttcacattggtgttgttcagcctgagttcacctactgaccaaggattggcaacttttgacaaaataaaacctcccttgaataattcaaccggtatgtctttcttgttcttgataaattcttgaacagcttctggtgatctttccttaggaggaattgtagacagctgcccaatctcagctgacatgataccatggtgacagtgaatgctatcattggactgactaaacccactgctagcctcaatgtagacacccattttggtgataccaacagtttctatgagtgactgattaactggtctattagaaaaaacaaacattgtgttcatgggattatctaccattcctttcccaacaaagtggttgtcaaggaccactgggatgctcaacttctggagttctgcttttggcccaattccactaagcattagcaactgaggagtcccaattgccccactagacattatcacttcactgtgcttatcatttgacagaatagcctcatgctgtttcccatgttcatcttggaaaataacccccacagcttttggtctctttccttttctatcaaacacaatcttttggacagtggcacagaccaaaacagtaagtttgtcatggttccctgaagcaagcagttcagcagccgtgtgacggcggccaaatctgtcgaaaatggttccaccaacctttgttccatagagatgatcataggtgaagccattaaagggtgacacaccagagtctagaagactgtctctaaatgctctctgataaggtgaaaactttggacggtggacaatttgcttctcaacccatggatatgattcatttactagcttggcatcccaccccaccttctttataaaccttgggtttgctctagtgtagaagcccagcattgatagaacttccacctccccaagacccttgccccttgaattgtagactccatcagttgaaatgaagtactggagaagctgaagttggtgaaatgtcggccaatgtaatgtggaagttctccagaaatgaaacattggggttggtgaaaggaacaccccctctttcaagcaccaaaacactgaagttctgagagagggttgcagccaaaggacaccctgctgtgcctcctccaactattatgtagtcataggcattattgcttgtcgtagttgaaattgatggtgatgagaatgagcttgcatttctgataaaagggtatctattttcatgccagtgctgattaccttgagatagaggtagaaagttccagagccatagaagtaggcacaagaagaatttgtaattgactgcaccaaatgaagccatggaatctcatgggccagagaaaaagcactcactctctgaattgaagctgcttcttcccaacctataagtggcttcctctcattggccttgttttgtgtgtacatcatataaatatgaaaaatactccatatatcctcttaccttgtcaagataatggtcacaataacataatctctcgagcc

SEQ ID NO: 3629 - DNA, 926 bp, Glycine max
acggccgcgagaagacgacagaagggggaataacgctaacctgaagaaaagagtgtaagagtaggaaacgagattgacgaaccctaagctgaaagaagaaaaaatgtctggcgtgaagagagcactgaggcagttcaccttcggaaccggcaagaccgccggtcgcaactcggcggggcgcataacgtccttccaccgcggcggcggagccaagcgcttgcaacgaaccgtcgatcacaaacggaataccgcttcttctctcggcgtcgtcgaaaggatcgagtacgaccctaaccgctcctccaaaatcgccctcgttcgctggatcgaaggcgtccatcaccgtcgccgccgcgctgcctccgccaacgccgcttcgcccaagctcctccatctcgatcccgccactaacgacgctaacagcattcgcggcgttttcgctctcaattcgatgctgccgcacactcacgctggaacatcctccagagagctttttctgtctgcgttggcgtccaaggccaagggatcagaatcggaatcggtttcttcgctcggaattccgaggttcgcggttgcggcggcgagggctccgttcttcgcgcagcgtgcgagaggggaggagacgttggaggttcggcattggagaaggaatagcgacgcgtgggcgcataggaacaaacgtaaagcagcgatttcgtggcaaagcattgctcgttgagttgactgatggtgttcagaattgtaaaactaaatggagggaagtgaaataaccttttgactgcgatttaaaataacatcaactgaataatgattaacttcggatgaatgacattttctggcgacctttttccttctattaacttcggatgaatgtcacatggatggcttaatagtcgatttatatatgattgtataatgttctgtgt

SEQ ID NO: 3630 - DNA, 1707 bp, Glycine max
ggaaaggatatcattcacatatgaggttgaatttgtgaaaagtgatataagatggccatcacgttgggatgcttatttgaagatggagggttcccgagttcattggttctcaatcttaaattcacttatggttatttctttcctggctggtattgtttttgttattttcctaagaactgtgagaagggacttgacgaggtatgaggaactggacaaagagactcaagatcagatgaacgaggagctctctggatggaaacttgttgtgggtgatgtgtttagggagcctgattgctcgaagcttctctgtgtgatggttggagatggggttcaaattcttggaatggctggtgttactattgtttttgcagcacttggattcatgtcacctgcatcccgaggaatgctactaacagggatgatcattttatatcttatcctgggaattgctgcaggctatgtcagcgttcgtgtttggaggaccattaagggaacaacagaagggtggagatcaatttcctggttagccgcatgtttttatcctggaattgctttcattattcttacagtgctgaattttattctatggagcagtaacagtactggcgccataccgatttccttgtattttgagctgttctttctctggttttgcatttctgtacctcttaccctcattggaggatttatggggacaaaagctcagcctattgaatatcctgtgcgcactaaccagattccaagggaaattcctgcacgtaaatacccatcgtggcttcttgttcttggtgctggaactcttccatttggaaccctcttcattgagcttttcttcatcctttccagtatttggcttgggaggttctattatgtgtttggtttcctgttggtagttcttctattgctaattgttgtttgtgctgaagtgtctgtggtcctcacttatatgcatctctgtgtggaagactggcggtggtggtggaaggcattcttcgcatcaggttctgtggctctttacgtcttcttatactccattaactacttggtgttcgacctgcggagtttgagtggacctgtctcagctaccctttaccttggttattcactactcatggccattgcaatcatgttgtctaccggcaccatcggcttccttatgtcattctactttgtgcattacttgttctcatcagtaaagatagattgaggttcttgctgtcattgcatattaactatgcaaaagattaattgatataacttccgctgagtccttgtagcttgatcacattgcggagtagggcaacggatgtttcattcattgtctgattttatattgcgatgggatctgcagtttgttctccttcttcttgtttcccaaagtagtgtactcattcaagtattctgctagtgtttgagatcattatgtttcaagtgttttagttaagagtttctttagaaggtttgtaattcaaaactgtcttatctcatttcaatactgtagaaaaatgatgttagatagatatatgctttcagaactcgttctgatgttcattgtgcttctgggtatttaatatttttagcttctttgggttaaaggatgggaaaatgacttagtataggttagggaaagtgacttagtattttatttaaactaactgtccgctcaattttggcttttataaaaaaaaaaaaaaaaaaaaaagggca

SEQ ID NO: 3631 - DNA, 1389 bp, Glycine max
  misc_feature (17)..(17): n is a, c, g, or t
  misc_feature (57)..(57): n is a, c, g, or t
  misc_feature (68)..(68): n is a, c, g, or t
  misc_feature (134)..(134): n is a, c, g, or t
  misc_feature (1362)..(1362): n is a, c, g, or t
atcagaatgggattaanatccagtggacggggttccctgttgggtacacaccccctngatggcagtgnctgattacatgcattaaccatctcaaattcaaagtcttggttcatgaatatgaaggaaatggtgtngaaatcattgggactggggaggaaggtatgggtgttatttctgaagctgacaagaagaaggtatccggatatgaaattgttggctttcaggttaccccttgcagtgttaagcgcgaccctgaagtcatgacaaaactccacatgtatgacaatatctactcgacaaactgtccatctgagctagacaagtaccaaccgattaaagagcaagagaggatatcatttacatatgaagttgagttcgtgaaaagtgatataagatggccatcgcgttgggatgcttacttaaagatggagggctcccgggtgcattggttctccatcctaaattcattgatggtgatctttttcctagccggtattgtctttgtcattttcttgagaactgtaagaagggacttgactcggtatgaggagttggacaaagaggcacaagctcagatgaatgaggagctttctggatggaagcttgttgtgggtgatgtatttagagagcctgatggttcgaagcttctctgtgtgatggttggggatggggttcagattcttggaatggctgctgtgactattgtttttgcagccctgggtttcatgtcaccagcttccaggggtatgctgcttaccgggatgataattttatatcttttcctgggaattgctgctggatatgtcagtgtacgtctatggaggaccattaagggaacctcggaagggtggagatccatttcctggttatctgcatgcttttttcctggaattgcttttattattctgacaggactgaattttcttctctggggcagcaaaagtactggtgctattcccatttccctgtattttgagttgctcttcctctggttctgcatctcagttccacttaccctcattggaggatttatggggacaaaagctcagcaaattgaatatcccgtgcgaactaaccagattccaagggagattcctgcacgtaaatatccatcatggcttcttgttcttggggcaggaactcttccgtttggaacccttttcattgagcttttctttattcccccctttccagcatctggcttgggaggttctattatgtatttggcttcttggtggctgctcttctattgctggttattgactgagctgcagtgtcagtggtcctcacatatatgcatctttgtgtggaagatggcaacggtggtggaagtcattctttgcttcaagctctgatgctctntatgccttgctgtactccattaactac

SEQ ID NO: 3632 - DNA, 1164 bp, Glycine max
ccctctcttccgtacggctgcgagaagacgacaggggggggaggatttatggggacaaaagctcagcaaattgaatatcctgtgcgaactaaccagattcctagggagattcctgcacgtaaatatccgtcatggcttcttgttcttggtgcaggaactcttccatttggaacccttttcattgagcttttctttatcctttccagtatctggcttgggaggttctattatgtatttggtttcttgttggttgttcttctattgctggttattgtttgtgctgaagtgtcagtggtcctcacatatatgcatctttgtgtggaagattggcagtggtggtggaagtcattctttgcttcaggctctgttgctctttatgtcttcctgtactccattaactacttggttttcgacctgcagagtttgagtggacctgtctcagctatactttatctcggctattccctgctcatggcaattgcaatcatgttgtcaactggaaccgttggcttccttatgtcattttactttgtgcactacttgttctcatcagtaaagatagattgaagtttgctttgctatctctcaccagctaaagcaaaaggcatgctggaagaggaatttttcttaaatagtgtaacttttgcttaattctttttgtagcttgatttgcagcatgttgagtggtgaaatagatgccttgctgattgcagtaaatagttgccactcaattttatgttgctatgcgaactacagtttgttcccctttctacctgtctctcccgtaagtttactcattcaactagtgtttggtatcattctgtttcatgtgatttagtttggtcaagttgcttgaggaagttgtaattgcacagactgtcttattccttattcattcaaatatcaagaaaaattaaagggatacttctagatttcttgacggtatccactgtgcttttgggagttcgaatattttgctttcaaggattggaaagtgacttcttcgtttacatgatttttcttagttttccacatatccggcttggcattatattactacttccagtccttattaaaaggtctgaatcaaaagtttcttggttctttttataagggttaatctaaaatgtctcttacggtaattatttttttacaataagtcag

SEQ ID NO: 3633 - DNA, 1191 bp, Glycine max
aattcggcaccagctggttagccgcatgtttttatcctggaatcgctgtcagcctccttagcccccccccctttattctatggagcagtaacagtactggcgccataccgatttccttgtattttgagctgttctttctctggttttgcatttctgtacctcttaccctcattggaggatttatggggacaaaagctcagcctattgaatatcctgtgcgcactaaccagattccaagggaaattcctgcacgtaaatacccatcgtggcttcttgttcttggtgctggaactcttccatttggaaccctcttcattgagcttttcttcatcctttccagtatttggcttgggaggttctattatgtgtttggtttcctgttggttgttcttctattgctaattattgtttgtgctgaagtgtctgtggtcctcacttatatgcatctctgtgtggaagactggcggtggtggtggaaggcattctttgcatcaggttctgtggctctttacgtcttcttgtactccattaattacttggtgttcgacctgcagagtttgagtggacctgtctcagctaccctttaccttggttattcactactcatggccattgcaatcatgttgtcaaccggcaccattggcttccttatgtcattctactttgtgcactacttgttctcatcagtaaagatagattgaggttcttgttgtcattgcatattaactatgaaaaaggttgattgatataacttgatcacattgcatagtagggcaacggatgtttaattcattgtctgattttatattgcgatgggatctgcagtttgttctccttctgcctgtttcccaaagtagtgtactcattcaagtattcaactagtgtttgagatcatgtttcaagtattttgttcaagtttctttagaaggttgtaattcaaactctcatctcatttcaatactttagaaaaatgatgttagatagatacatgctttcagaactcgttgtgatattcactgtgcttctgggtatttaatatttttagcttcttttgggttcaaggatgggaaagtgacttagtataggatagggaaagtgacttggtattgtactattaaaatattttattcaaacataattaattgtctgcaatttttgcttttgtaaaaaaagaaaaaaaaaaaaaaaaaa

SEQ ID NO: 3634 - DNA, 638 bp, Glycine max
  misc_feature (20)..(20): n is a, c, g, or t
  misc_feature (23)..(23): n is a, c, g, or t
  misc_feature (26)..(26): n is a, c, g, or t
  misc_feature (34)..(34): n is a, c, g, or t
ccacgcgtccgacggctgcnganaanacgacagnaagggggaaataaattaaaactaaaggaaaggccacatctaacgaggagcacacatcttagagaagaaatgaagcccatctttgccttgttcgtagtcttgtcgcttctcctggttgccaacatcaacttaagccatgcaagaaaagacctgggggattattggaagaaaatgatgaatgacgaacccatgcctgaagcaattaaagatcttattcaagatcaacaggtacaagatgcaacagcagatcattttataaggtacttcgatatgaagcctaatatcattttgtatcacacccatgttgtgtccaagaagcagcagcagcaaaaggcttttgaccacaagtttaaaccagtctcaaggaacggaaagtcatggttgaacaaaccataaaaaatggttgaaggctaaagctgttagaattaataataaaaagaaaatgaaagtacgtattaatcaagcaataaggaggtactgtattaagcaactaagattgtgcagtaattaaggttgctacttttaatttctccctatggaatgaatctctttattatccaaaaaaaaaaaaaaaaaaaaaaaaaaaaagcggccgctctagagga

SEQ ID NO: 3635 - DNA, 1649 bp, Glycine max
ccacgcggccggagtggcacttggcaggctttcatcttccttcaacaagcctttacgtcctctcttcaatgctggctcagtttactacaagtcctctttgcctgctgaagctgcgtacgacaatgagaaaagctgtgatacgggactggaactgataccctccgagaatttcacttctgtctctgtaatgcaagctattggctctatcattactaacactcggaatgaaggatatcccggtgcaagatattatgggggaaatgagtatattgacatggcagaaacactatgtcaaaaacgtgccttggaagcatttcggttggatccggctaaatggggagtgaacgtgcagcctctgtctggttcttctgccaattttcaagtttacactgcattgctaaaacctcatgatagaatcatgggacttgatctaccacatggagggcatctttctcatggataccagactgacaccaataaggtatctgcagtctccttattttttgagacaatgccatatagactgaacgaaaacacgggacacattgactatgatcagttggagagtacggcgaaactcttcaggccaaaattaatagttgctggagctacagcttatgcacgtctgtatgattatgcacgcattcgcaaggtgtgtgataaacagaaagctgtgctgttggcagatatggcacacatcagtggattagttgcagctggtgttatcccttcaccttttgattatgcagatgtagtgactaccacaactcacaaatcactccgtggccctcgcggagctatgatcttcttcaggaagggggtaaaagaaattaacgaaaaaggagaagaggtgatgtatgactatgaagacaaaatcaatagagctgtgtttcctggactgcaaagtggtcctcacttccactctattactggtttagctgttgcattgaagcaggctacaactccaaactatagagcataccaagagcaggttctccgtaattgctcaaaatttgcacaggcactgagtgagaagggctatgagcttgtttctggtggaactgagaatcatctacttttggtgaatctgaagagcaagggtattgatggctccagagttcagaaggtgttggaatcagttcacattgcagctaacaaaaacacagttccaggagatgtgtcagctatggttcctggtggtatcagaatgggaactcctgctcttacttctaggggatttgctgaggaggattttgttatggtggcagagttttttgatgcagctgtaaatttagctgtgaagatcaagtcagagacaaaaggatcaaaattgaaggacttcttggccacaattcagtcatcttcttactttcagtcagagattgcaaagcttcgccatgatgttgaggagtacgcaaaacaatttccaaccattggttttgataaagaaaccatgaagtacaacaaatgagaggaaaattttccattagacatttatgtcaaatcatatcatgtttcatttcccggaaaagctacgctagtaagctggctacgctagtaagctggcttgatcagcacaataaaagaaaaatttccattgctaattgaagaaagctggattcctttatttatcctaattccccggatcc

SEQ ID NO: 3636 - DNA, 1761 bp, Glycine max
ctgcgagaagacgacagaagggcgcccgcagtttcatcttcttcttcactctcttgctctcagtctcagactatttttctgaaagcatttcaaatggttgatagcaatccttcctctggatcacccgaagaaacacaaaatcccaacccagatgggaatgcacctgttgaaagtgatcttgcattggagaatctagcccaaaaagttcaagaatctctctctctggaaaaaagacataaattttgggaaacccaacctgttgggcagttcaaggatgtaggggactccagtttgccagaaggcccgattgaacttccaacccccttatctgaggtcaaacaagaaccatacaaccttcctgaccactatgaatgggttacttgtgacataaactctgaggagacgtgtgatgaggtatacaaccttcttgctcataattatgttgaggatgatgagaatatgtttcgatttaactactcaaaggaatttctgcgctgggctctgcaacctccgggttatttcaagagttggcatattggtgtccgtgttaaaagttccaagaagatggttgcctttataacaggtgttcctgctagaatccgagttcgtgatgaggttgttcatatggcagagatcaattttctgtgtgtccataaaaagcttcgaacaaagaggcttgctcctgtcatgatcaaagaggtcaccaggagggtgcatctggaaaatatgtggcaggcagcctacactgccggagtagttcttcctacacctatagcaacttgtcaatactggcacagatctttgaatcccaagaagctaattgatgttggtttttctcggcttggtgcacgaatgacaatgagtcgaaccatcaagctttacaagctaccagaatcaacaatcaccccagggtttaggaagatggaaattcatgatgttcctgcagttacaaggctaattaggaattatttgagtcattttgttgttgcacctgattttgatgaaaatgatgtcgagcattggcttcttccaagggatggcgttattgatagctatctggttgcaagtcctgagactcatgaggtcactgacttttgtagtttttacacacttccttcttctatccttggccaccaaaattataaaattttgaaagcagcatattcattttataatgtttccacagtcactcctttgcttcagctgatgaatgatgctctcattgtcgcaaaacacaaggattatgatgttttcaatgcattggatgtcatgcagaatgagaccttcttgagggaactgaagtttggaccaggtgatgggaaacttcattattatctttacaactaccgaataaggcatgcattgaagccatcagagcttgggcttgtgcttctgtagtctaaattttggaaatttgtcttgctatattgggattcattatggttttgctatagacattgtatggttgcaaattatgtggtgatccccggttagaccttaaattttgttttacctttcgaacaaacaagttttacatagtcctcgctggcaattctggaatgtcagtaatgccccaaactggtataacttacagattggtaattcctgtttacaaattttggatgatgtccttttaagtttgaatgtttgtcttctaacattctttttctgcaaagtatatgattgtgttcccttttttttgtgtgctgacaatgatgatgccttttaagtatgaatgtatgtaatggtgtatattggttt

SEQ ID NO: 3637 - DNA, 1830 bp, Glycine max
gccagcctcgacctagaccttcaatgattcgcagacaaataaagaactaatgagaccatttgtaataataataaaaatcacatgagataatgagatatgtttttataaataaataaggaacaaaaaagattgacaaattatatttcaaagaaataaacatattttaacccatccttatctgtagtatttaaagtgcagtagtgggtttagatgtttttttcgcatccttaaaaatgaaaagaagcactcactcgtgaaccccacgcagtgttcgataatcaaatcttctttctttttcttccgcagtcccaaccttcatggattctcactcacacatcattgcttggggctctggtgaagatggtcagctaggaatcggaagcaacgaagagaaagaatgggtctgcctcgtcaaagccctccagccccaccgtattcgctccgtcgtcgccggcagcagaaactccctcgccatcgctgacgacggcaaattgttcacttggggttggaaccaaagggccacacttgggcaccctgctgagaccaagtctgagaacaagactgagaacactcccagccaggtcaaggctctttccagtgttaaaattgttcaggcggctattggggggtggcactgtttggccgttgatgatcagggcagagcttatgcttggggtggaaatgaatacgggcagtgtggcgaagaacccgagcgcaaggatggcactggtagacctttaaggagagatatagagatccctcagcgctgtgctcctaagcttgttgttcggcaggttgctgcaggaggaactcactcagtggtacttacacgagaagggcatgtttggacatggggtcagccatggccgcctggtgacataaaacagatttcagtccctgttcgggttcaaggtcttgaaaatgtgaggctcattgctgttggagcatttcataatttggctcttcaagaggatggaactttatgggcatggggtaataatgaatatggacaacttggaactggagatactcagcctagatcacaacctattcgtgttcaaggactttctgatcttaccttggtagatattgcagctggtggatggcattctactgcattgacagatgaaggagaggtatatggctggggaaggggggagcatggcaggcttggatttggtgatagtgacaagagcagtaaaatggtaccccagaaggttcaacttttagctggagaagatattgttcaggtgtcctgtggaggtactcactcagttgcattaacccgggacgggcacatgttttcttttggtagaggtgaccatggacgtcttggatatggtaggaaagtcaccactggtcaaccaatggaggtacctatagacctccctcccccacaggatcccagtggcactgcaactgagggacattggatagctaaactagttgcttgtggtggccggcataccctggcaatagtagaatggaaatcaaatgaatcttaaaattgactcaaattctaaataaaacagaaactggaaagtggatgaggctaatgactgatttggaactcaattcaggtgctggaatttcactcgttctgcatgatatgatcttgcctttgtataatcatgcatatggcacaagcataaaattcatcaatatagtaacggggtttggttttggatggtcttaatttgcatattcatgcaggcgatttttttttttattcgtaggaattgaagactgttaaaaaaatttacaataattcacgtattttgttcaatcacctgagctaaactttgactcatgtagaaaatgtttagtgag

SEQ ID NO: 3638 - DNA, 1138 bp, Glycine max
tccggaattcccggctcgacccacgcgtccgacgggagtgtccagcttcccgtttgtggggtgcctcgccggtcagattatgatgagtttggtcacgatgagtttagcttcgggaacagaaccgttgctaatggggttgacaaggaagggccagtgctttcaaagcttggctcgagttccacagctgagcttcgccctaaagctcaaggtgaagccaaacctacttccatgccacccacaagtgttatgacaaggctcattttgattatggtttggaggaagctgattaggaaccccaacacatattccagcctctttggtctcacttggtctttgatctcattcaagtggaatgttgttatgccagcaattgttgctaaatcgatatcaattttatctgatgctggtcttgggatggcaatgtttagccttgggttattcatggcattgcagccaaagattattgcatgtggaaactcggttgcttcctttgctatggcagttcgttttcttactggtcctgcagtcatggctgttgcttcaatcgttgtagggctcaggggagttctattgcacattgctattgtacaggctgctctgcctcaagggattgtcccttttgtgtttgctaaggaatacaacgttcatcctgacatactaagcaccggggttatatttgggatgctaattgctcttcctattacgctagtttactacattttgcttgggctttgaagcatgttgaggaagcgaaaaaggaatcaagtcatgaagattaaaaaaaaagactaattgcagtgtggatcaaactacccttttgttatatttataggttaatttttttggcatcttctaacaatggtagaatttcgaaatgaagttagtgagagggggggagtgtgaccttgtaattaatctccaaacacaaaaacaatggtgagagttgaaatggaagcaaggagatagtagtatattttagggctatagctagctactaggaaacttttattttggtggttttagcctttttttactgtgaaccccactctcttatattttgcttcgtttaatggaaaaaaagaagagaaagtgaagcttgtttgtagttgtcgacacctttctctttcttttcacaagt

SEQ ID NO: 3639 - DNA, 1546 bp, Glycine max
ccacgcggccgagttaaacttcaggcccccacttcagtcttctacttttcctttcatcctgagacctccttgacactttcatttcgtcgcataacccttaaggcgccgcacacaccggcacggcctccctccctcgcgagtctcaccgccatcgttaatcacggttgtcgtcggagctctcgtagttgctcctcacagtcccagattgtcaaaaattgtggcaaatcatggaaaatactgcgggccataacgatgatagcaagcaaaaagaagcgcctaagcttgcggcgttgttgaaagaaatgaaggaaggacttgatactgtaaggcgtaaaattcaatctttaactgccacggtgaaagaaggccaatatcctacagcagatggatttagttatcttgaagctaaaaatttgctgcttttgaattattgtcaatcccttgtttattatttattgcggaaggctaagggattatcaatagaagatcatcctgttgttcgaagtgttgtagagataagattgtttttggaaaagattcggccaattgacaagaaacaacaataccagatccagaaactaatacaagctagtgaaaatgcaaccagaagtgatattcaaaacaaggagccagttgcatccaataagagcgaggacgtgtcaaagtatcgtcccaatcctgacatgcttgttagcaaagtagacctaaccttgcaggatggcaatgagtattatcaacctgtaaaatttgcgcctacttctatggatctagagagatcttcaaagtatgaaagaaatgccttgcgaagagaaaaagaaattctgaaacaagctaagcagagtgattatattaggacattgatgaatgatatggaggaaaaacctgaagagataagagattttgagggagctagcagagaagttgatagatatattgccaagatggacgaacgtgctcggcaagaggaggagctgttcacgcgtgttcctcttacgaaacaggagaggaaacgagaaaagtacttgaagaaatcaagaaatgggttgcaaggtctaacagaaagtttctatgatgaaatcaaaacattaccctttggtgataaaactggagagcaagtaatgggctctagtaatggtggtagaacaaacaatagactgaagaagcgaaagaggaaacattaaaggaagaaaaattgggttttgagctaaagggcggaaatgcatgctatctgcagaacagaccactgcatgctgttggaggaagtaatactagattcaacggaaaggaatgtaaaacctatagagttggtattggtgcattcctccgtgttgattgcagattttagttaaatcaactgtctttttattattatcatagccatcatgctaatcggctcggatttgagattttagaaaagatgaaatgagtgttttttttttttttttttgctattacaggcttgcacccaattttgtgatgcacttggattttttaaatatattaaggtggagttcagccttttcaaataaaaaggaaggccgcccca

SEQ ID NO: 3640 - DNA, 1166 bp, Glycine max
tcagctacgtaggcccccccccgtgattgttgagttgacgattgaagaaggaaggagagagagtgtgtgtgtgtgtgattcacattctgatcttgaattgaattcatctccaactccatggctccggcgatgaggatcgttttcggtcttctcacttttgtcaccgtcggaatgattataggcgctctctctcaattggccatcatacgaagattggaagactcttacggcaccgattctttgccatttagaagattgcgtggactcgacactgatcgtcaccttcaattgccaagaggtgttcctttttggaataatgacaaggaagcagaaatcttacgccttggatatgtcaaacctgaagtgcttaactggtctccacgaattattttacttcataacttcctgagcatggaggaatgtgattatctcagggctttagctctccctcgcctgcatatttcaactgttgtggatacaaaaactggaaagggaatcaagagtgatgtcaggactagctctggtatgtttttgaattctaaagagagaaaatatcctatggtacaagcaattgaaaaaagaatttctgtctattctcaaataccaattgaaaatggagagcttatgcaagtcctgaggtacgagaagaatcaatattacaaaccacatcatgactatttttctgatactttcaacttgaagcgtggtgggcagcgaatagccacaatgcttatgtatttaagtgacaatattgaaggaggagaaacatattttccattggctggttcaggtgaatgcagctgtggtgggaaacttgtcaaagggctatctgtgaagccgattaaaggaaatgcagtgcttttctggagtatgggactggatggacagtcagatccgaatagtgtgcatggaggatgtgaggtaatctctggggagaagtggtcagctaccaagtggttgaggcagacgactcacacttgattttttagctgtcaacatcttgtgcggtgtgactcaagaaaaaaaaaatcactaattggatttcccccgttatatttgtactcatgaaaaattagttattgatattataagcacttgatagtgttaaccttcgatcaataaactacagcataatctgatattattataaaaaaaaaaaaaaaaaa

SEQ ID NO: 3641 - DNA, 1924 bp, Glycine max
ttttttttttttttttttgcatttgaacagcaggtcatgcatatattacgtgaaaatgccatatcatacacactatccattatcagaaaagaaaccttattactgtatagttttctctctctctcttaaatacattctcttaaataccatctctgggattcttcagctatctcctttcatatacaagcaattgaactgtacactacagtatgaagtttccagcacactctcagacaacaggatcgtcaaaatttactctttctccagtagcgaataggcaatagaaaatagcagcaagaaaataaaggagcgatgtaagcaacagaaatcctgggaaggaaccaactagttcaacaaaaaacccagctcctactgttccaattatagcagccaatgttccagccgtatttgatattccatgtaaaacaccagaataccgtggtgcaatctcctgaaggttcacaagaaaaccagagtgactgaaggatttcaggccaaaagctaaagtaagccaagcagaaccaatcgcggggtttttagctgttgctaagccaatgaggcagagtccaggaccaacaaaaccaatgcactgcataatcttacgcgtcaaagtgacactagtaccactttgtatcatcatatccgaccacaagccagcaaagtaacccatgacagccatcaaagcccatggaactgcactaaaccatgctgcatgcctgagatccacacggtacactgagctgaagtatatgggcatccaagaaagaacaataaaaaaaccccaactgtgcatggcatttgcaatgattagagaccatgttggcagctttgaaagcaagcgcctgaaaggagggataactttaactttcttgggcttagctgtctccactgaaaaagacttttgccttctattcaatatatactccagctcatattttgatatctgaggactctggtcaggagtgcttgatgttgcagacaaccacaccaacacccaaagaaacccagacaatccaaaaatcacaaagggaccaaatataccaccttgtgacatgagaatgggagaaagtgtgagccctattgcacatccaagcataaatccagccattgagattcctacagctcttgatcgttcagtttgtggaaaccatctgacgaccatgttattcatggaaggaagagcaactccttcagcaacaccaagcaaagcacggacggtaagtagagctaagagagaggtctgagaagcccaaggggtaagaaaagtagcaagtgaccacaaggccactccccaagccatgaccactttgccaccatagtgatccaccaacacccctccagctataggggaaaccagatacccccacagaaacgatgactggacgattccggcgaaggctcggctccacccgttggcgagggacagcggcacgatggccaccgacatgacgacgcgatcggcgttgcagagagcgagagcgagagccagcatggccaccactttgactctctcggaagtgatgaactctgcaaaactcaacgactgttgttgctggctctcctcgggaccggaattgaagcgggcgtcgttggaggaaacgtagaggcggggaagggagcggagagaggcggatgagccattggcgaagaacttgaattccgttctcttgaggtggcgcttgggagagtgcaacgccgccgctactctggcgcggtgattttggggtagtgagagcggtttggcggcaagagtgacggcggaggacagcgctgccatggccgccgacggtggaagttttttttttcagtgactaaacagaacgacggcttggttggtgaggtggtggacaattacgcaaatcgccttgtcttttgcacatttttttagtgtaattttaaaaggggggggggcctacgtagctga

SEQ ID NO: 3642 - DNA, 2406 bp, Glycine max
ttttttttttttttttttttttttttttttttttttttttttttttttttttttttttttttttttttttttgaacaacaggtcgtgcatatattacgtaaaaatgccatatcatacactatccatgatcagcaaggacagaacagaaaagaaaccttattactgtatagttttttctctctcttttttaaatacattctcggaacccaagaaaacctaaaaactccaaatgcattatctcaatgcatatgggaaagcaaaaaaactatacatcaataaatgattttacactaggtagatggttagtttctgttttacacttcacaagcatgacagttagaacacatagccatctctgacattcttcagctatctccttaactcctttcatatacaagaaattgaactgtacagtacagtatgtagtttccagcactctcagacaacaggatcgtcaaaatttactctttctccagtagcgaataggcaatagaaaatagcagcaaggaagtaaaggagcgatgtaagcaacagaaatcctgggaaggaaccaactagctcaacaaaaagcccagctccaactgttccaaatatagcagccaatgttccagcagtatttgatattccatgtaaaacaccagaatactgcggtgcaatctcctgaaggttcacaagaaaaccagagtgactgaaggatttcaggccaaaagctaaagtaagccaagcagaacctattgagggggttttttgctgttgctaagccaatgaggcagagtccaggaccaataaaaccaatggactgcataatcttacgagtcaaagtgacacttgtaccactttgtatcatcatatccgaccacaagccagcaaagtaacccgtgacagccatcacagcccatggaactgcactaaaccatgccgcatgcctgagatccacacggtacacctataatggaaaaccatttatacatggttctaagtgttgatttctaaatatttttataatttgacaatcacaactaaatatgataaatcttactgagctgaagtatatgggcatccaagaaagaacagtaaaaaaaccccaactgtgcatggaatttgcaatgattagagaccatgttggccgctttgaaagcaagcgcctgaaaggagggatcactttaactttcttgggcttagctgtctccactgaaaaagacttgtgccttctattcgatatatactccagctcatattttgatatctgaggactccgatcaggagtgcttgacgttgcagacaaccacaccaacacccaaagaaacccagacaatccaaaaatcacaaagggaccaaatataccaccttgcgacatgagaatgggagaaagcgtgagccctattgcacatccaagctgaaatccagccatcgagattcctacagcccttgatcgttcggtttgtggaaaccatctggcaaccatgttattcatggaaggaagagcaactccttcagcaatgccaagcaaagcacggacagcaagtagagccaagagggaggtctgagaggcccaaggggtaagaaaagtagcaagtgaccacaaggccactccccaagccatgaccactttgccaccatagtgatccaccaatacccctccagctataggggaaaccagatacccccacagaaaagacgactgaacgattccggcgaaggcgcggctccacccgttggcgagggacagcggcacgatggccaccgacatgacgacgcgatcggcgttgcatagagcgagagcaagagccagcatggccaccactttgactctctcggaagtgatgaactcagcaaaactcgacgactgttgttgctggctctcctcgggacccgaattgaagtgagcgtcgttggaggaaacgcggaggcggcgggtaagggagtggacagaggcagctgagccattcgaaaaaaatttgaattccgctctcttgagatgaggtttgggagagtggaacgccgccgccgctctggcgcggtggtttaggggtagtgagaggggtttagcggcgagagtgacggcggaagacagcgttgccatggccgcggacggtggaagtttgttcttatcagtgactaaaaagaacgacgcggcttggttggtgtggtggttgacaattacgcaaatcgccttgtcttttgcacattgttttagtgtaattttaaagaagaatcatatgagtcgtaacgagtacgtggtcgccgcacgtgttttgtgatactaaaggctatattaaaatataaatagaaaaggactacactggcaatgtaaaatatcttacatggttactatgtaagattacgatttaagagtaggattaaatttagttctaaaatgtttaaatttgtaaaaatggatagaat

SEQ ID NO: 3643 - DNA, 2283 bp, Glycine max
ggtcttgaaatgaaattcattggagattcattaaaaagggaagtgcccaaatgtgcgtcttgggtacaaaagtataagctatatagtatatactaattaagatttggatgttgccttgcatgagatatttgttactaatcatagccttctacaagaagtgaataagaaagtatttcaaggaattgcccctcttagccaacccaccacatgcaaaagaaaaaaaatactataatatctttgtttaaaaaaatgaagctattggagcagaatacatgtattccagtattcccagtattccagttcgatctaacctgcagagttgcgaggtggtgctttaccaataagcactgcttcgccatttgcagcaagttcctccaagcgtttccaagtggcttcacgccctgccatgacttcacttttctttgactcttcttcctcaaacttttgtaaacattctttggatagatcggcatcaacatcattaaaaatcttccgcacatttaaggtcaaaccatggacagcttggttccaatgacttctagcatttctctccaatgcagggaagatgatgggcattatcacttttcggttttgtttgatcaagctcatgatgtgatcattgttccacaagaacaaggctctctctgccacctgaaaatgagggctattcaaacaacgtgcaatgcgacgaaacaatggcaccatacaacgctgaaattctgggggttgagttgcttccaagacttcttccaactcacccaggaacataacctcctttggactatttgttataggccagtacttcaacaatcccctaataattgtatcagcaagcttgcagtctttctctacaaattgggtaatgcaataagataactgttgatgatacattgctaagcactttggcttgtgcaacggaatcagtatacgaacaagaaacagtttgtgctcttccttcaatggcagtgcaaaacccccttctgtcgtcttctcgcagccgtagagctcagcaatcccattgtgcttctcagtctcaaatataaaattaaagaacacattattgatggccttcctgatgaaagggcgatgtgccatgaatttgccatagatgcggtgcagcgtcatcttcaagtactcacgctccctcggatcctcagagtcaaacaaatccagcagcttcaaaatgaaggactggtcaatgtatctcttggccagcttcgcatccagctcaggagatgccacgaacctcagaaaaagctcatacacaatctgcaaatgaggccaagcaggatccatcgaaggctcctcatcctccacgtcaacgccatcaacaatcttattctcgcgtggctgaggactgagtgtcctgaatatatttgcagacaccattttcacaacctcctgcatcatattctccacgaacttagcatttgcagaagtcacataatccaagagctccaccaacgtctgtctcttaatctccttctccttgatgtgcttggcggggtcagtgaagtcaaacaccacacaacacatcctaagtttcttgatgaacaaagttggcttctcagaagagggaacatctctgaacgcaggcaatgcctcataggaaccaaaattcccattattggggttgttgtgaatgttgttctcattcacagccaacggtaacggaactctgttaccatgattcggtcccgcagaggaagaattcccgggtttggtgccacctggggtaacactaacagactcactgctcttcgaagaagtggtgacaccatgatgtgtccttccacttccaccgtgttcggaacctttcgatgactttcgagggagtttactgaatatctgtttgaacataattcatcaaacaaacacggaacaaccctttaccccttttcttctaatcagacacaaatgttgttgtcttgtgcacttgtccgatgattgatacgatgttgttgttgtttgtgcacttgtcggaataaatgagaaagaagatacccttttacttatctgggtagaagaagaaaacccagtttcgtgattctacccattgtgatgatggagcaaacaaaattcgattttgatgccgaaaaccttttcacctctgcgatcagaaacagtgatggaggaaacagagatcagcgtcaacgatgatcagaaaacagagtgtttcagaattcttcggaattcaaatattaatcggagacacaatcttcttcttcttcttcgccgttgttgggcttgaaaagcgagagcgagacgaagaatgttctgcag

SEQ ID NO: 3644 - DNA, 1625 bp, Glycine max
cggctggagaagacgacagaaggggacaaaaaccattgctatggtggtgacaaagcaaggtttgtttcatcaaaagatggtggcacccattgctgtttcttctccaaagtccacacttttgcagaaccccatctattttggtgacctaagttcaagttttgttggagggtccttgaagtgtctttgcttcaatctaaaaccgaggccacaaagaagagaattgaccaacttggttgtagcttcagccaccccaagtgttacaaacagcaatgctagtggcaggttttacttcaacttcactggttttcctttcccacttggtccttttctcaacaggcgctctattaggactgaggctgtgaagggttgtatatggctgttcgaacaagagcaggcattaggattcagcagtgtttccacaaacatcagaatgacagttatcaaactaaaatctgggggcttatggatccatgcacccatagctccaactgatgagtgtattcagcttattaaggaattgggggctccagttgaatatattgttctccctacttttgcttatgagcacaaagtatttgttggtccattttctagaaaatttccccgtgctcaagtatgggtagcaccaaggcaatggagttggccattgaacttaccattggaattcttcggcatttttcgtgctaaaaccttggaagatgaagatttatctgctccttgggctggtgaaatagagcaaaagattctaagctcaccagaagttggaattggaccttatgtggaggtagctttctaccacaaaccttcaaaaacactattggtgacagatgctgttatttttgtcccaagacagccacctgagtgtataagcaaagaatccttattagcatcagcaaaaaatggcttggctgttaaacttcttagtaaaggaaaggaggtacctgacgagccagtagttgacgacaaaaggaaccgacaaaaaggatgggaaagaatggttctacagatcttgtttcttggtccatcaaaccttttagaacctaatgcaagctttgaacagatgtcacaaaagttgattgtttcacctattgtgaagactctggtcttcagtaaagttcctgagaaggttagagagtgggttgatagcatttcgcgagattggaggttcaagagaataatccctgctcactttgctgctccaataagtgcaagtaggtctgatttcagggctgcatttgcatttttggatgagtttttgggggaaagtaatgctgcatggccttcactttcccttctcttctcatcaatcatgggaaaggcagccagctattttcctccggatgacatgaggaccctatcatcccttgaccagtttttggtgtctgttggtgctgtgaaaaaaactgtttcaggcaggaaaaggtgagatgagaggtgcatcacaacttggccttgccaatacttgttaacttttcaaatgtaaaataagtataattttgttacattaggagctcgattcttaaggaaaatgtaaatgttgtttgacattggactacatatacatgttgaggaaacaaggaaatgttttacatggaaaaatctttggggccttaaaaaaaaaaaaa

SEQ ID NO: 3645 - DNA, 688 bp, Glycine max
caattttttttttttttttttgaatgtaaaaggtatcatttttattcagtaataatccgtcctctatagtttcaaataataaggcaaactaatattggtgacaaagtgatagtatcgtaaactagcaataatatcctcctaatcctgttttcagttcaccaagcaaactgaaaaacccttgcatcccaacttttgagatcacgagttaagaaccaaaatatattacaacaaaagaaatttacaaaaacccagccttgtcaccaggaacatctttggctaaagaaaatcaggactccattagcaagaataccaaaattactggttcttgaatgactccatattttttgagatgtccttgatctgctcagctagctcctgcctcttctgaacagctttgttagaaatatcttcaattctttttgatgtcctcactgcaaacctctgaaatgcagggctgttggcaagcccattgacaaccacttcattcaccacgtaagagagaaccctctgcacgaaattcgcaccaccggccatgattatttctcagcttcaaacttgattgagaggagacgaggggagattgattgaagatgtttctggaatcagaataaggcggcgaaagggcataaactgagcgtcgaggttcgtttatccccgcgtacctgcccgggcggccgctcgaaagggc

SEQ ID NO: 3646 - DNA, 1369 bp, Glycine max
ttattttttttttttttttttgaattttaaacatcttatgtacattataactggtgaatgatctacatacatttctgcaacataaagttatgatcatgcattccatagaaaaatagctccacctaatttcttcaaaagcaattggcacctgatattgatagctatctcatggaagcaatgcatacacttggcaataaaattgctgggcatgttgctgcattcattttatattattgttacagataggtatcccagaaaagtgtagatgacatgaagatcttgcatcattcttcaccattctcgttgtccggccttccatacacgacagaaaagtagtggctaattgttgtcaaagtgagaccagggaacctgtgaagttttccaggccgtggatcaatcttaacaaatggccatctcatgatttctgcagcctcacactcttcccatccatctccaattacacaaaagcgaacattgggatggttgaaacgctccttgatccatcggaaacattgaattttccccacttcccatgagctataaacatttccatgcgttattaagctgtccagatgaaagagcatgcatttcacaagtgagggaactaacgatccagatgtcactaaaacatttacatgctttgcattagttgagtttgagctggtgttagcaaaagcaatagaataaactgcatctttatcttcacccgaacactccttcaaaaaggtccgtgctgatgaaagccacctgtcagtgtattcatcagttttatcatacaattcatcccaaagttttattgtcttattatctaaaatattccgtaaaccctgtaagtacttttgggcaatgactcgatgcctatatgccagttttcttttgttggcatcatcatgtggggaaactaattcatcttcgttgaagtcataatcagataggtccctcccatcatcatattgggccagagcatcaagaaaaggcttattgtaattttcaatttgttcatagaagaaataatcatcacatatttgtagaatgagattttcccatgtcctcccgatttccacccccttctgcacatccttcagaccattgaaagcctcagcgtatgatgatttcagcaaggagttgagcagtacaagggtctcatccatgtcccacacgtagacatccaacctgggatggacacttttgtcgggaaacatcgctgtctcctcctctggcatgccagatgcagcagccattcccgcgtgtacccaaggaactcacctcacagtgtacttaggttaaggttgcagagcgcatgcgtacgaggaggacgatgaagttgacatgagtcagatcatcaaattggcgtcttctcgcagccgaa

SEQ ID NO: 3647 - DNA, 2210 bp, Glycine max
  misc_feature (2169)..(2169): n is a, c, g, or t
  misc_feature (2182)..(2184): n is a, c, g, or t
tttttttttttttgactgcaaaacaggtcattttttgcaattttaacataactacatgcattgtcacaaagtctaaaaacaatgttatatagcacaacttccacagatgcagacccataagttagaaacatggataaatacattataaatcactgacactggcatagctcgctatccaaaagtgtttttgtgaaactgagaaaatctagacgagtttcattaaaatgttaaccctcttaaagtgatgaacttttcttgtatctcggctacacgccggatattgttggctttcttcagctccaattttgacttttgcgataatccatgtttaatgtcatgaccaatggttgaaattgagttagcgacatttgttagctcggaagtcagctcagctttagtcttcttcatggtttcaaggccattagttatccggtttcgttttgcttgaagttgccgaatttgatcatcaatttctcgaatagttagagtgcttatgtccatttcagcctcttgctggcctattttgtccttcaattcgttgtactcttttctgagactaggaactttaagtttcttagcctctaggtcagctaaaaaattgtctacctcctcaatgtttttcttagcctccaggaaagcctcactggctaacggaacttgttccaccaacttcaacttaaacagttgatcaacactaagactaggatcttcgcgaatatgtgctgcaagggttgcaacttctgcaacatcactacgagagaccaaagaaggaaaatctatagcaagaagggaagaaagcttcttcttgcagctctcaatcatttcattatcatccaaaacggtaggaggagtcagatgatccgatggtgtagtctcaatttcaggcataacaagcatgtcctccaaggtatctagatagtcatccaaattcacaacttgatcaggtgttaaatggggtcgaccctgaactagtccaaaagacttcttcggggggcgaccgacacttcgtgtttttcgttttaacttctttcccagggtgccaatctcatctgtcgcatcttctccagcctccgatgatggtagagctaatagtgctagagatttgtgagtggggacactcaggcttcctgtttcttgttttaacttctttcttggggtgccaatttcatctgtggcatcttctccagtctctagtgattctatagcttttgtaggggtttgctgagttgagggaatctgccagctaaataaagcaaagaatgcttcaattttcatgtcaggataatttgattgaagatatctactaatatcagccttgcttcgaaactctgccttgcgacgagacttctcaagagatcttggaagagtaaggaatctatcagtaaaatatccagaattgttcatcctttttgccactttccagccccatacatcaccaggattaggccacccttcaggtgcatatggcaaacctacaccagaagaaaaaggtgacactggttgaagatcaaaggttttctcctttgtcacatccttacaagcattgctgtcaattggagtgtcattcttcaaggattccctttcatccgtagaattattaaaagcattgttgtcaactggagagtcattcttcaaggattccctttcatctgtagaattattacaagcattgttgtcaattggagtgtcattcttcaaggattccctttcatctgtagaattattacaagcattgttgtcaattggagtgtcattcttcaaggattccctttcatctgtagaattattacaagcattgttgtcaattggagtgtcattcttcaaggattccctttcatctgtagaattattacaagcattgttgtcaattggagtgtcattcttcaaggattccctttcatccttagaactggtgggagtgatagtgagagtgtctggttgagccatgtacggaagaagaagcgaatcgcggatgtgttacagagagaactgcgcgaaaattagaaaacgcgaagattagggttaggggaggaaagaaactgaactgtaccggcgaggcgttacatggtacgatgccggaggcgaattcggagatggggtcggagagtttcgacgagaggaggggtcccctgcggtcggcgtcgcgcagccgtagcgcgtgggtcgacnccgggaattccgnnngaccggggtacctgcccagggcggta

SEQ ID NO: 3648 - DNA, 1347 bp, Glycine max
agaagtgaaataggctgcatttaatttttcaaatacgattcttttgataacactcttaaacatttgaatttggaagtgaaaatatttcgtttcatatttggataacatataatatgaagagacacgcatttattttttatttatttatcgttactctccatgttgtgtggagactgaagcagcaaattaatcgggcgagcattgacgagcctgcagttagtcctaacttccccaggtcgaccagactgcaagtcacccattttcaacattccttccacaaatgccttgaaaaactcagttttgcgtctactaaataacctcacaaactcccttgtgtgggggaatgtgaagagtgtttgatcagaattgagaaagcccctcctagcagccaagtccttgaaatattggttatcaaagacgagaggcgtggaatcaaggttccctgtgacattttggtcaacatccagtggacatagcctgttaaggtattgtctatagctagggtcaatggcagggtcaggccttccagttccagattgattgtatagcctaaacatgacggagaaacaacgaccttggccaatagagtgagatcctgagagtgctactaggtctttcacagtaaggttatatttctggaagagatcaataagagagcttgcgttggctcttgggcttggcatgatgttgtttgagtcttcttgattagcactcaagctgtccaatcttcccaacctcacctcccactcaggtccacctgtcagagagacagcatctctagatgccataattatgatgtcagcacaggaaaccactccggggcagtccttctcgagcgcttccttcacttgatcgacaacttcatacgatctcagcgaatttatatttgagagggccaatttctcccccagcatcgttggtgtatcatcaagcagcatagaaccatcacacccgttgacaaagcaatcatggaactggaagcgcataacagaggcaacacttctgggttccctcataagggccttcttcatcacatctcggactatgagttccgcttttggacatgtttttgagtaaaacccaggtcggagatccgacgatgccacccaagctatgtgcagaagaaggaacatcagaaacaggggcatggccatggtcatgtataacaaacaaagatggcaccttgttttgattttccacactggagtggagagtgatcggaggagagagggtggctatatatggttactcactttggagtttggaggaggataaagtaattgtttttaattttaatgaaaaatcatttttggatgggggggggggcccctacgtagcctgactcga

SEQ ID NO: 3649 - DNA, 1265 bp, Glycine max
ttttttttttttttttttcggaagtgaaatagctgcattcaatttttcaaatacgattctgttgataacatagttgttctgaatttggaagtgaaatattttgtttcatagttggataacatataatctgaagagacatgcacttatttttatttatcgttactctccatgtcgcgtggagactgaagcagcaaattagccgggcgagcgttgacgaaccggcaattagtcctaacttccccaggacgaccagactgcaagtcacccatcttcaacattccttcgacaaatgctttgaaaaactcagtttggcgtctactaaataacctcacaaactcccttgtgtgaggggatgtgaagagtgtttgatcagagttgagaaagcccctcccagcaaccaaatccttgaaatattggttatcaaagacgagaggcgtggaatcaaggttcccagtgacattttggtcaacatccagtggacatatcctgttaagctcttgcctatagctaggatcaatggcaggatcaggccttccagttccagattgattgtatagcctaaacatgatggagaaacaacgaccttggccaatagagtgagatcctgagagtgctacaaggtctttcacgctgaggttatatttctggaagagatcaataagagagcttgcgttggctcttgggctcggcatgatgttgtttgagtcttcttgactcgcactcaagctgtccaatcttcccaacctcacctcccactcgggtccacctgtcagagcgacagcatctctggaagccatgattatgatgtcagcacaggaaaccactcctgggcagtccttctcgagcgcttgcttgacttgatcaacaactttatatgatctcagcgaatttatatttgagagggccattttctccccaagcatcgttgctgtgtcatcaagcaacatagacccatcacacccattcacaaagcaatcatggaactggaagcgcatgacagaggcaacacttctggcttccctcataagggctttcttcatcacatctcggactatgacttccgcttttggacatgtttttgagtaaaagccagctcggagatccgatgatgctacaagccaagctatgtgcagaacaaggaacatcagaaacagagccatgttcatgttcatgctcatcacaaacaaagatgtccccttgttttgatcagagtagctgaggagtgtggctatatatggttagtatcggggggggggcctacgtag

SEQ ID NO: 3650 - DNA, 585 bp, Glycine max
gcacgccgcctgggcttcagatttgtagttacttccaatggagctgttctgaggaaactaaacccttacttagaaagtgggaaggtgaagccaattgtagaccccaaaggtccattctcctttgataagcttgctgaagccttctcttaccttgaaacaaaccgagccactggaaaggttgttatacatccaatcccttgaatcaaataaaagggataggcaatttttctgtgtgtctagtaaacttcacattctgtgcaaatcagagtttagataaaaactcaaaaaaatataatgaacttcatttttacattcttagtactttaaattttccattacatttcacctagtttgaaagcaaaacattcttcaaatttgatccgtaaaagagagctcttcttagatacggggatagagtgtgtcgtctactcattcagttaatttgaaaacagcaacatgctctctggttttgttggataattcagtctgggatccatacaatgtccacattatgttttgaaattgccagtacaccaaagttcagaacatagaagatatgttctccattaaaaaaaaaattaaaaa

SEQ ID NO: 3651 - DNA, 1473 bp, Glycine max
tcagctacgtaggcccccccccgaaccaaccaaaaccaaagggtggttgaagcagagataagtgatatgcaaaacatgtctctaatagcttcactctcctccacaacttcacaactcacttcccttccttccctcccttcttcctcctctccactttctcgcaaatttcccctcactttccgggaaaaaaacagaactccaatcacacctcacaagctccctttttcagcaaggcctaccaccaccagagtggtgttggtgaagtctcaggccacagcacctgcttcttctgaggctgtggcagtgacacctgtgtcttctgagatgaaggcatgggtctatggggaatatgggggtgtggatgttctgaagctggactccaatgttactgtgcctgatgtgaaggaagatcaggttctaatcaaagttgttgctgctgctcttaaccctgttgatgccaagaggaggcagggaaagtttaaggccactgattctccccttccgactgttccgggctacgatgtagcgggtgtggtggtgaaggttggtagtcaagtgaaggactttaaagtgggtgatgaagtgtatggagatgtaaatgagaaagcactagaaggacctaagcaattcgggtctttggctgagtacacagctgttgaggagaaattgttggcatcaaaaccgaagaatttggactttgctcaagctgctgctcttcctctagcaattgagactgcttatgagggtttggagaggactggattttctcctggtaaatctattcttgttctaaatggttctggaggagttggtagcctagtgattcagctagctaagcaagtttttggagcttcaagagttgctgccacttcgagtactagaaatttggacctattgaaaagcttgggagctgatttggctattgactacacaaaagagaactttgaagatttgccagaaaaatttgatgtagtttatgatgccattgggcaatgtgacagggcagtgaaggctgtgaaagaaggcggcagtgtcgtggcactcacaggtgctgttacaccacctggcttcagatttgtagttacttccaatggagctgttctgaggaaactaaacccttacttagaaagtgggaaggtgaagccaattgtagaccccaaaggtccattctcctttgataagcttgctgaagccttctcttaccttgaaacaaaccgagccactggaaaggttgttatacatccaatcccttgaatcaaataaaagggataggcaatttttctgtgtgtctagtaaacttcacattctgtgcaaatcagagtttagataaaaactcaaaaaaatataatgaacttcatttttacattcttagtaaataaaaaaaaaaaaaacatttcacctagtttgaaagcaaaacattcttcaaatttgatccgtaaaaaaaaaaaaaaaaaaaaaaaaactcgagactat

SEQ ID NO: 3652 - DNA, 1511 bp, Glycine max
gtaccaaacaattacaaaacactaacgttataaccgaaccacaaaagggtgcttgaagttgaagcagagataagtgtctcaacaagtgatatgcaaagcatgtctctctgtgcttcactctcctccacagcttcacacctcacttcccttgcctccgtctcttcttccacctctccactttcccgcaaattttctctcactttccgggaaaaaaacagaaccccaattgcaccacctcacaagctccccttcttctcagcaaggcctgcccccaccagagtagtgttggtgaagtctcaggccacagcacctgcttcttctgaggctgtgaaggtgacaccggtgccttctgagatgaaggcatgggtgtatggagaatatgggggtgtggatgttctgaagctggactccaatgttgctgtgcctgatgtgaaggaggatcaggtgttaatcaaagttgttgctgctgctcttaaccctgttgatgccaagaggaggcagggaaagtttaaagccactgattctcctcttccgactgttccgggctatgatgttgcgggtgtggtggtgaaagttggtagtcaagtgaaggactttaaagtgggtgatgaagtgtatggagatgtaaatgagaaagcacttgaaggtcctaagcagttcggatctttggctgagtacacagctgttgaggagaaattgttggcaccaaaaccgaagaatttggactttgctcaagctgcttctcttcctctagcaattgagactgcttatgagggtttggagaggactggattttctcctggtaaatctattcttgttctaaatggttctggaggagttggaagcctagtgattcagctagctaagcaagtttatggagcttcaagagttgctgccacttcaagcactagaaatttggacctactgaaaagcttgggagctgatttggccattgactacacaaaagagaactttgaagatttgcccgaaaaatttgatgtagtttatgatgccattgggcaatgtgacagggcagtgaaggctgtgaaagaagatggcagtgtggtggcactcacaggtgctgttacaccacctggcttcagatttgtagttacttccaatggagaagttctgaggaaactaaacccttacttagaaagtgggaaggtgaagccaattgttgaccccaaaggtccattcccctttgataagcttgctgaagccttctcttaccttgaaacaaaccgagcaactggaaaggttgttatacatcccatcccttgaatcaagtaaaagggataggcaattttgccgtgtctgtctagtaaacttcatattctatgtaaatcagagtttagattaaagctaaaaaacaaaaataaagaacttcatttttacattcttagtgctttaaacttaccattacaattgtttgaaagcaaaacattcttaaaatttgacctactcattcagttaatttggaaaaaaaaaaaaaaaaaaaaaaataaaaa

SEQ ID NO: 3653 - DNA, 1049 bp, Glycine max
ttttttttttttttttatatcaaatgaaaaactccaaagctttatcaatatcaccatacaatcatcgtacacaaagagaattgcatgtgtacagattacaaaaggctatgaaacaccttaccctccttttgtgctaattacctaaacaactttcttcaacccatgcatacatgaaaaattaaagcaagccttaattagataaataggaaactatactaaagtgcacttgatccaatcaacttggttaacccaaaagtgattgccatggccatccaacccccaaacaagaccctcaaagcagacctcaacactggagccttacccaacacagcccctaaccaaccaaacaccaccaaagcaaaagtcacagcagcaacaatcactccaagcctcaccttatattcccttataaatgacgctgcaagcaatggcaccattgcaccaacagaaaaggccaaagctgaggctgctgctgcttgcaaagggtttggcaaactctctttctcttcattggtgtcttcctctggatctctcactcttctttggcccctttccttctccctcttcctttgaggaacctcaatgtctagttgtgagtaaacagacacaaactcacctatggccatgctacatgcccctgccaccaaccctgcaaaccctgataggatcatggccttgatgtcatgcttcactgctccaacacccatcatgattgatgctgttgagaccaacccatcattggctcccagaacagcggcgcggagccattgagatctttttgagtagtcaaaggtgtcctcatcagattcaatctctagagttgttgttgcttgttgttgttgttgctcaaggtcgtcattggttggaagggcaaatttggcttggttaaggttaagggatgcttgatttgatgacatgatgagaaagattgagctagttaatctagaaaaaaaaaaaaaaaagataaccaattaatagaggatgatgaagatgatgatggggaagaagaagaagaagaagaagaggaggagggtatgtggagaaagtgt

SEQ ID NO: 3654 - DNA, 843 bp, Glycine max
gtagtaacatgtatgttcggcaatctgaggaaagttttaaacaataagagacttgcattcgtgacacgacttcccgctggaaaaaatttcccgctgtttttttaagagaagatcgagcactacaatgccctaatcaccaacaacctccgttcaaatcctcgttcattcacaaaccgccacaggattagggaaaatcaagccgtaacattttccgcaagtcgctcgtggcgtcactaacaaccgcaatcttcttagtgatgaaagccggtaacggaacggagctaggaggtggagacatcaccaacatcgaatagcctgcatataaaccatctacgattgaagttaagtcctttttttcgacggtttccgtctgcggagttaacttctgatcgacgatttccgtctgcggcggtggatccggcgtcgtttgggtcaaaagttggccgcgtttgagtattttgacctgacccatgacgagttgctgctgcggcttgtttttgacttggggtttcggggataatgtgagccgggctgggctgacaacgccttgtgggcttggatcgggccgcttcttacggtttcgggaagtccgatgagacttattaggattcatgttgggagagtgagggattatggtctggtactggttagatgggtttttcctgagaaaatcgtgagggtgaagaacggcaagtggcatctggaagagagaaatgaaccacaaaaagagaacaaggttttgggctattggcgtaggatgaagataagaacagacaagttaaaaattcaactatccccttctgtcgtcttctcgcagccgtctcgagccgattcggctcgaga

SEQ ID NO: 3655 - DNA, 1112 bp, Glycine max
  misc_feature (39)..(39): n is a, c, g, or t
ttttttttttttttttttttttttttttttttttttttntttttttttttttttttttttttttttccaacaaactattttcttccttgtattccataaatcaacaattacaggaattccctaattaaatgacgaattcgtaaatataaatgctaacaaaagagatagaaacattaaacttaaaagactaggacacataattgagagaggaagaaaatgcttctatatcctaaatacttacaaagcattacacagatatacagaagcctattccttaaaactaataattagtatcacaaagtaattaatctaaaaagtacgaagactaatcccagtagtaacatgtatgtacggcaatctgaagaaagttctaaacaataagagacttgcattcgtgacacgaccttcccgctgaaaaaataagagaagatcgagcactacaatgccctaatcaccaacaacctccgttcaaatcctcgttcattcacaaaccgccacaggattagggaaaatcaagccgtaacattttccgcaagtcgctcgtggcgtcactaacaaccgcaatcttcttagtgatgaaagccggtaacggaacggagctaggaggtggagacatcaccaacatcgaatagcctgcatataaaccatctacgattgaagttaagtcctttttttcgacggtttccgtctgcggagttaacttctgatcgacgatttccgtctgcggcggtggatccggcgtcgtttgggtcaaaagttggccgcgtttgagtattttgacctgacccatgacgagttgctgctgcggcttgtttttgacttggggtttcggggataatgtgagccgggctgggctgacaacgccttgtgggcttggatcgggccgcttcttgcggtttcgggaagtccgatgagacttattaggattcatgttgggagagtgagggattatggtctggtactggttagatgggtttttcccgagaaaatcgtgagggtgaagaacggcaagtggcatctggaagagagaaatgaaccacaaaaagagaacaaggttttgggctattggcgtaggatgaagataagaacagacaagttaaaaattcaactat

SEQ ID NO: 3656 - DNA, 1486 bp, Glycine max
  misc_feature (28)..(28): n is a, c, g, or t
ttttttttttttttttactaagtttcanaactcaagatttttttattgttttttccaaaaaaataattaaacatgtacacaatggagaagaaaactacgtcacgtcatcctaatttgtttttagtcaaagttgtacaaatccaactcatgctttttaactcaataatcacaaagttcattcattatgtcaaattatcaattccttttacagagccagtgggaatgagggattcagttgtgaaatctgcattagcaataccataatgcaactacaaacctcatattttaggctttcagcgcgtatacatctaagatttcagttttgggaatgaagcaccagcaaaaggcttccacctgtgtcctgctaaacttgcagtgaatttcttaacttcatcagtttgtctctatagcaatttcattaacgtctatgtctgctatgttctctttcccaaatagagtgaaatgcacagtggccaatttggtttttcgattcagcttcttgagggtgcctgtaaaccctgaaaatgttccagatagaacacgaacggtggaacctggaacaaggagtttataattgattcgagtagatgaagcatctgtggctttgacctggttagaagcttttctagatccccttttagacttataatcaacaatagcatttaaaatatcatcgggttctaattctgtattgcgaatcccagagtctagggaagcttttttctcttcttgctcaaaagcttggtcagttttctcttgttcttcttttgcttgtctgaagatagcctccatatcttcagcagacactggcttcggtctattgatctgtctctttgtgtttccaaccttggaaccaagaaagcctccaacaccatcatactctcttatgaagtcatgtagttctttgttcatcacacatctcaagaaaacacaacctgggaacagttgctttggtttaacggagtaggagccattcttcaatctccttttcacattgacagatggagcatatatcttaaactccatatcgggataattcttggcgagcgagcgagcgaggagttgcgcaatgtcgtttcccttaaccctggagacccgaatgacccaccactgtggacccagcttggcgagattgtcgaggttcagctcgtccatccacgagcccttctgcttcttgggcttttccatgagcctctcctccaccacctccctccagttcttcgcgccgctcctcgtctccctcctctcgctcctcgcgcgcctcctctcgcgcgcgctgagctgcgacgcggactccacgggcgctgagggggtggaggaggctgagagggtgaagaagaagggtctcgttggcaggagcgagacggaagggagatggagtgcgtcgtggaagcaaggtgggttccatggaagaaacacccccctcatatcttcttctacagctcgggatagtcgttaaaatgggtctccccgcggccgctcgcgt

SEQ ID NO: 3657 - DNA, 1683 bp, Glycine max
aaagtaaaaaaataaaattatattcggacataagggaggaacttactgataaaaaaattaaaaaagtattcttgaataaaattggttggcagtaatagaaaagagcgtattttccgtatgatgagagtgtgtgagcattcacatttgacggaaacagggtagcgtgagagtcgagtcacctgccgaaatcctatagcaccattttgaccaaggcgatatagctaacagctattcgcccccccatactttctttaattttctccttctcccatggtgtaattgctccaactatggccgtggacctcatgacgaccggttacacccgaaacgacaacatcagtagtttcacaaccaaagccgaggaaaatgccgtccaagaagccgcttctggtctagagagcgtcgagaagctcatcagactcctctcccaaacccaagcccaagcccaagcccaccatcaattcaacaacaacaatagctctagtaatgaaatcgccatcgccatggactgcaaagccgtcgctgacgtggcagtctccaagttccagaaggtcatttccctcctcggccgaacccgtaccggccacgccaggttccgacgcgcccctctccccaaccaacaccaacacacccaacctccctccgaaccgcccgttctccacgctaccccgctgcaccagatcccacctccctcccttcaccaaatccccaaaaccgagaaacacctcaacgattcatcgtctaagacgcttcatttctcatacccctccgccgttacttccttcgtctcctccctcaccggcgacgccgccgacaacaaacaaccatccccggcggccacgaccacgacctcccactttcagatcacgagcctctctcacgtgtcgtccgcggggaagcctccgctttcgtcttcctctttcaagagaaagtgcagctctgagaatttaggttctggaaagtgcggtagctcctctagccgctgtcattgttccaaaaagaggaaaatgaggttgaagagggtagtgagggtaccagctataagcttgaagatggctgatattccaccagatgattattcttggaggaaatatggacagaaaccaattaaaggatcgcctcatccaaggggttactacaagtgcagtagtgtgagagggtgtccagcgcgaaaacatgtggaaagagctttggatgatccagctatgctggtggtaacatacgagggagagcacaatcacactgtctctgctgccgatgctactaatctcattctagaatcgtcttgaaattcgtagccaaaatcatcttttttccgtgacaaggtttagaaacgcaagccatcatttaatcaacgttacaagttttcaacggggtgcaattatggcgtgttgaattgaattgcaactttactactctagtcagtcaggggggcattaaaatctccaaagaaattagtagtgggtgttgttccctttccctgtacactattggattcttttttatctttattttttttttctcgttctcttcaaggctaaatggaacattgtgaatccgttgcatcattaaaaaaaatattgtcaaggatgattgtgatggtggatttggtaagggatttgaatctcgatttttttttattttttttttataaaaaaagcaagtgggtgttggttttaaaaa

SEQ ID NO: 3658 - DNA, 1163 bp, Glycine max
gagaactagtctcgagttttttttttggggttgtgtgtgtcttttggtggaggaatgcttgtcacctactcctttatacggctgcgagaagacgacagaagggggagtgagtgagagaaagaagagaaggagttgaagtggttgttgtattgtagtagtgtgtaaagtcttggtgatggatagacacaaatgcaagctttgttcaaggtctttcagcaatggcagagcccttggtgggcacatgaaggctcaccttgcttctctccctctccctctccctccaaagcttcactcttgtttctcttcctctgactcagaacaagaacaatctttaagggagaatcctaagaaaaccttgaggattctggatcctgaagacagagagagcgagacagagtctaataagaacccgactcgtcaacgatccaagcgcaactggaaatctaccatgcccaagctcagcctcggacaccccgaagccgaacctctcagctccgtctccgacacctcccccgaagaagacctcgccatgtgcctcatgatgctctcccgcgacacgtggcaggaacacaaactcgccaatgcaggtccacccaagactcgctgcagcagcggatcagagatcaagctcaagaacaaagtccgctccaagcacctctgccacgcttgtcacaaatcctttcgatcctctcgcgctcttgggagccacagaaccctgtgctctccccgtcaggaagcccaaaataacagcatcattagtaataacaacattaaggtttttgaatgccccttctgttacaagctgtttggttctggccaagcgctcggtggacacaagagatctcacctaattccttcttcctcttcaaccgttaatcattctgtcaagttgaaacagagcttcatagatctcaacttgcctgctccggccgaagacgacgatcttagcgttgtttctgatgcctaattcgatctggcatatgttttaattgtttaatgtttagttgtctggtggtgttactcataaagtgaatttttcttcttcttcttcttcttctttataaaagtagctgagaatatttcattatgtttattgaccgatcaaaagcttttgattctacaatggtagctgaatataactataagtttttttttttcaaggg

SEQ ID NO: 3659 - DNA, 1592 bp, Glycine max
tcagctacgtaggcccccccccaaatatcttcgattggaacaaccattactcgttcaattagtcaagttatagagaaaacaatatcatcagctattacagaatcattccagaagggggtgggagacaaggcattgaatcagctagaaaaatcagttagttcaaaacttgaagctacagtggctaggcagatacaggcacaatttcaaacctctggcaagcaagctcttcaggaagcactcaagactagtgtggaagcttcagtcgttcccgcatttgagatgtcttgcaaggctatgtttgagcaaattgatgttgcatttcaaaatggacttgtgaagcacacaactgctattcaacagcagttcgattctactcattctccactagccatgactttgagggatacaattaattcagcatcatcaatcacccaaactttgagtggacaattggctgatggccaacgtaaactgctagcaattgcaactaactccaaagtagctgcagatccctttgtagcgcaaatcaacaatggcttgcatgagatgactgaggatcctaccaaagaactatcaaggttgataagcgagggcaaatttgaggaagcatttacgggagcccttcatagaagtgacgtttcgatagtttcttggttatgttctcaggttgatttagcccgtattttggcaatggtgccactgccattaagccaaggagtacttctgtctcttctgcaacagttgtcctgtgacatcaatacagagacacccaaaaaattgacatggatgacagatgtggctgctgctataaacccggcagatccaaggattgcagcacatgtgcggcaaatattagatcaagtgtcccgaacactgggccatcatcggattttaccaactacctccccttctgaagcgagcacaatccgccttctcatgcatgtcataaactcggtcttgttgagctgtaaatgacattgttgtatttttatcatctgtgcagaaagtgttgagtatcaactttggtttgtatagatatttagatagtttggagaggggggatgaagtgaactactgtatgtagttgttttggtacaattgatttgtgtgaaatagtttcactttttttttgtatgcttaattgtttacattttgccctggccccctcctccttaggttgtctttacactttatagagatattattattgccttcaccctgatggacaaggaaaagtgtgacatcctcatgcaaagaagtcagcattgcaatgacagttatttccaagctgcctttggagtgtaaacaaaactccagggtaggcagcagttgaggctgggagtggctgtagcaagtattgactggtcattgtatcctgctacagcaggcttggccttgtaaaagattttgtgattcttaatagttgagaacatgggagtggcttcagaggctgtattgttttgctaggatattttatgtgggttgattcgggtggcagtttcctatagaggtagttaagaatgtccgcaacatttcagattatgtaaactttatactaaatatagccccagtagcaaattgagtttgacttg

SEQ ID NO: 3660 - DNA, 1466 bp, Glycine max
tctcgagccgaatcggctcgaggttcctggtctttacgaggtacctgaggacatgattacattctaacaccacacattcctgttatttctttctctctgcgttcttcttcaatgcaactctattctgttcggtgacacaacatcactctgaagaacgtcgcacgcaccacccttctctctcttcaacaactcagctctcagaacagatacagtttccactgagtaaatcgcaatgcaggtaactgagacgaggactgttcaagttaagcagctttcagatctagctggtgtgagagagattcacgagttcttctccttttctggagaaatcgagcatgttgagatcctgagtgaagatgggaaatcaaagactgcatatgtgacatttaaagatcccaaagcccttgaaattgcattattgttgtcgggagcaactatagtagaccaggttgtgaagataactccagctgagaactatgtaccaaatcgtgaaatggaggaagtaagggtggtggaaaatgctataaatgttgctccttctgagaattctgagaatgtctccttgagtattgaggaggggaaagccagccccaccaatagaagaatctaccttagtaaagcacaagatgcagttacaagtatgctggcaaaaggttcagcaataagacaagatgcagtgaacaaagctaaagcatttgatgaaaagcatcagttgactgccaatgcatctgcaaaggtcatttctttggacaagagagttggactcacagagaaattgacagtaggcattgctgcagtgaaccagaaagtcaagtctgtggatcagaggcttcaggtttcggataagacaatggcagcaataattgcagctgagaggaagataaataacactggatcagctgtcaaaacaagcagatatgtgactgctggaacagcatggtttaacggtgcttttagcaaggtggcaaaggctggacatgttgcaagtactaaaactagagaaaaatttcatttggctgtttcaaacttgacagcaaaggaaccgtcagtggctgctgcataggccacaatttttggtaatcaagtcatttcatcaggtctttcagaacatgtgtttgaaactatttggtctttcagagcatgcgctgctttctttctgcccttcaacagttagatgcatgtggcaagtgcggtgattcaatttaatcctattttttgtattcttttgtcactctgttgttttagttgttgcttctatatcatttagcacgagtgattttggcttttttcccttttgtgaaaaggaaattataggtgtgatgctactgcatttcttctgtcaaagttcaaaaaaattgtgcgtgtataacttgacatatggttcaaagatttccgtgggaaattatcatcttgcagactacaatttcatttctttgcttataaaactcgagactagttctcctcgt

SEQ ID NO: 3661 - DNA, 949 bp, Glycine max
tcgagtcagctacgtaggccccccccccaaaaataggtagtcccgcacatcatatacttatcattaacaagagaacgacggcgttccttgtacgcaaaggcgtcgttttaaaatatgccgccggcgaagaggggaaaagcaaaggcggagtctaaggtaacaacgccgtcggaaaaacctaatgattttccgtcttgtattcagagcgtgcctccttcctccgtcgctataaccatccacgccaaacctggtgccaaatccgcatctataactgatataagcgacgaagcggtgggagtgcaaattgacgcacctgcgagggatggcgaagcaaatgcggctcttctcgattacatcagttctgttttgggtgtgaaacgaagacaagtctccttaggcactggttctaagtcacgagataagacggtgatcgtggaagatgtaactcagcaatatgtttttgacgctttggataaagtctcgaagcagcattgatggcaaaaataaaaacgagtttttcttgctgcttgctttctccagaataagtgcagccagaatataatgctcttgcagtgttgcagtgtagagcggtgtattttgacctgttagttcgtattgcagtgtatattttgataatttcatgtagatttatgctggctagtggttatatctgtcatttgataaatgttaactttatgtggattgagtatcatatgacttataatccatttcttaagattttatatttatagttctaattgtgtaccaattatgttagttgtccatcaatggacgtggctcatttggcgtgactttgcaggaatagttaggggtttgatctccatagcacacatcattggagaggaaggaggagtcttaactcttaagtgtgataaagtcagaatagaattatctacaaagaataatttagaaaaaaaaaaaaaaaaaa

SEQ ID NO: 3662 - DNA, 784 bp, Glycine max
  misc_feature (762)..(764): n is a, c, g, or t
  misc_feature (777)..(782): n is a, c, g, or t
acattcgcgtcagctacgtaggccccccccgaagaagaaaacccagaatcaaatcaaaaggtaaaaaacaaattaaaagaaaaagggaaaagtatactacgcagaagaggtggttcaaagttcaatggctgagaagaaggaaatgattccgcaacaatttgacatcgatgccaaatgggacgcctgcattgatctcaccgtccgtcgcttcgtctactccgcaaccgccggtgcatttggcggtctcctatttttcaggagtcctgtgactcgatgggcatctattgcttttggtgctggagttggaattggatctgcatatgcagaatgttctcgtctgttcgatggacctccaacaaatttacccttacctaaggtctccgaaactgctactcaggactctgattagaagccataagggatcctggttcctggacggtggtgaatcagaattttcttgtgattgttgatgttccttacagcattattgctcttcaaaatgttgcactaccatgatttcataaatgaacgggacgtatattttattcctaagcttttacgcttttgatttcctgtaatcttaagtaatgtttatgtggagaaggattaaaaaggaagctttcttcagatgtgattttccatttgctctactttgaatccaatctaacttttaagtaaaatatgaaaaaaaaaaaatttgcaaagcccgcctcggattggtgatttaactgaatttccaggcaatgattcaatcagtttaannngttaaatcaaatnnnnnnca

SEQ ID NO: 3663 - DNA, 2748 bp, Glycine max
gatgaaatctatgctcaaatgactctgcaaccactgaattctgaaagagaagtttttcccatatctgattttgggctaaagcacagtaaacatcccagtgagttcttctgcaaaactttgactgctagtgacacgagcacgcatggcggcttttcggttccacgcagggcagcagagaagctctttcctccattggattacacaattcaacccccaactcaagagcttgttgttcgagatttgcatgataatacctggacatttagacatatataccggggtcaaccaaagagacacctgctcacaacaggatggagtttgtttgtaggctcaaaaaggcttagagctggtgattctgttcttttcatcagggatgagaaatcacaattgcgagttggcgtgaggcgtgttaatcgtcagcagacaacactgccatcatcagtactttctgctgatagcatgcacattggtgtgcttgctgctgcagctcatgctgctgccaatcgaagtccattcactattttctacaatccaagagcatgcccctcagaatttgttattcctctggccaaatacagaaaatctgtatttgggactcaggtctcagttggcatgagatttggcatgatgtttgagactgaagaatcgggtaagcgcagatatatgggtacaatagttggtatcagtgatgtggatcctttaaggtggcctggttctaaatggcgaaatattcaggtggagtgggatgagccagggtgtggtgataagcagaacagagttagtgtgtgggagattgagactcctgaaagcctttttatctttccttctttgacttcaggtctaaaacggccattaccatctggtcttttggaaaatgagtggggaactttgttaagaagacccttcataagagttccagaaaatggaaccatggagctctcaaactcaattccaaatctctactcagaacacatgatgagaatgcttttgaaaccccagctgattaacaataatggagcttttttatccgccatgcaacaagaatctgctgctacaagaggtcccttgcaagaaatgaagaccactctggcagcagaaaaccaaatgctgcttaaaaatctacatcctcaatctatccctgaccaacctaatgccttaaacatgcaatcactgttgaaaaatgatcagcctgaaaaatttcatcctcttgccaaaattgataatcatcttccttctgggatagttattgacaagccaaaattagaatgtgaggtattacctgaccgcgtgattgactatccttccatggaagggtgcaacaatgaaaaggtggcagtaaatcctgttaaccagcaaggcctagcaacccaattgccattccataatcaaaaccagagtccactactccctcaatccagtccatggcctatgcaacctctgatagaatcctccatgccccatcctcaaatgattggtatggctcaagctgattctgccatggtaaatggcctgtttcctcagcttgacattgatgaatggttggcgtatgcttcttcccaaccttttgctgggcagaacagaccaactggacctttttctgacttgcaagaacataactcacttcagcctcaagtagtgaatccccctttaccttcaatgaacaatgaagtatgggatcattatgtcaagaacttcaagttcttatctcaagcagaccagcttacatccatctgtcagccagggatgtatggcctcaatggcgtaccaagctcaaataatttgagggatctttccgctgagagcaataaccaaagtgagatttgtgtcaatgttgatgctagcaacagtgtaggcaccaccatggttgatccttctacttcaagcaccattttggatgagttttgcacgatgaaggacggagaatttcagaatcctcaagattgcatggttggcaacttgagttcaagccaggatgtccagtctcagataacctctgctagtctagccgagtcacatgcctatcctcttagagacatccctgacaactccggtggcacttcatcaagccatgttgattttgatgaaagcagcttcctgcagaataactcatggcagcaagtacctgcacccatccgaacctacacaaaggtgcaaaaggcaggttccgttggaagatcaatcgatgtgactactttcaagaactatgaggagttgatccgtgcaatcgaatgcatgtttggactcgatggcctgctgaatgacactaaaggctcaggatggaaattggtgtatgtagattatgagagtgatgttctacttgttggtgatgatccttgggaggaatttgtaggctgtgtccgctgcataagaattttatcaccttcagaagttcagcagatgagtgaagaggggatgaagcttctaaacagtggagctttgcaagggatgaatgtttgaatatcaggtggtggctgcatccaatgtcactaagccatgctttgtgatgttcttgtacaaggcaatgtttgaaaagcaaaggcatatgttgtggaagaagtcagtattattaacttgtatggaacaaaccttgaagatggaagagagtttgagttttattatcacacagatcaaaagttgtaagatgatgttccaatgagtcaagggtgttgcataccttatgttgtaagaaattcttgctggcaagtggacatattatgctttattattactacgcattgggacctttcc

SEQ ID NO: 3664 - DNA, 1312 bp, Glycine max
tcagctacgtaggccccccccccatttctttctctcttatgaaaattctattgaacccaaaaagagagaactttttttcttggtttgtgttttcattttgttgtggttttctaaagcgaagtgaaaaattcaatggcggaggttttaaccaaggcgagtttggtttcatcttcttggcatggggttagtcaacggcatcatcatcgaagggtttcaacggttctttcaaataatacatgtagcttccgttccggcgtgggaaagttctcttctttgaagatgaattctcaggttctcagatcttggtcctcttcttctgagtttcagggtaaaaagcttgtctttcatgtaaatataggattacccaatagggtcaattcgcggttgagagcttctactgggactcagatgaaccttagactagggaaagttcagaaatggtgggaaaaggggcttcaacccaacatgaaagaggtgacttcagcacaagactttgtggattcactgttaaacgcaggggacaagttggtggtggttgatttcttctctcctggttgtggtggctgcaaagcccttcatcctaagatatgccaatttgcagagatgaatcctgatgttcagttccttcaggtgaactatgaggagcataagtccatgtgttatagccttaatgtccatgttcttcccttcttccgattctatagaggcgctcacggtcgattatgtagctttagctgcaccaatgccacgatcaagaagttcaaagatgcattagccaaacacaccccagacagatgcagcttaggcccaaccaaagggttagaggagaaagaactcgaagctcttgctgccaacaaagatctttccttcacctactcaccaaaaccattacaaccttcacatgaaaacgaagagttggcaaccgaaactgcttctgctcctgctcttggttcaggatctcttccttcaccttcaatgaccctcaatgctgtggcctctaatgagagaaccttgaccacttctgggagatgatgtggtcagtttgtgagcaaaacgcattttctgaccctatcccttgtacagtgtagattttggtttggtgaagatgtcatattgatagtgtgtattcctcaaaggcatgtttattttaatccatgccttgctgaggttagagaaaattagaagctgtaggaaattattagttaatggtatttttttttttatgtatgagggaatcgtttcctatcctattgttgtaaaatgaatgccattttattcaccaatggatattttgtttctttttctaagccaa

SEQ ID NO: 3665 - DNA, 1583 bp, Glycine max
  misc_feature (1583)..(1583): n is a, c, g, or t
cggaattcggctcgagcgtcgatctggcatcaccttgacacttcttgtggataaagctcttttttttctgcactctaaaaaaaaaagcgtttctctctcattttctttctgtcgagaaaatttagtgaacccaaaaggagagaactttctttggtttgtgtttcattttgttgtggttttctgtaagattaaatggctgaggttttgaccaaggcgagtttggtttcctcttcttcttcctcatggcatggggttggtcaacggcatcatcgaagggtttcaacggtttccaacacttgtagcttcggttctggcgtgggaaagttctcttctttgaagatgaagtctcaggttctcagatcttggtcctcttcttctgagtttcagggtataaagcttgtctttcatgtaaatagaggattacccaatagggtcaattcgcgcttgagagcttcaactggggctcagatgagctttagactagggaaagttcagaaatggtgggaaaaggggcttcaacccaacatgaaggaggtgacttcggcacaagactttgtggattcactgttaagcgcaggggacaagttggtggtggttgatttcttctctcccggttgtggtggctgcaaagcccttcatcctaagatatgtcaatttgcagagatgaatcctgatgttcagttccttcaggtgaactatgaggagcataagtccatgtgttatagccttaatgtccatgttcttcccttcttccgattctatagaggtgctcatggtcgattatgtagctttagctgcaccaatgccacgatcaagaagtttaaagatgcattggccaaacacaccccagatagatgcagcttgggcccaaccaaagggttagaagagaaagagcttctagctcttgctgccaacaaagatctttccttcaccaactcaccagaacctttacaacctgcacatgcagatgaagagttgggaaccgaacctgctcctgctcctggttcaaaatctcttccttcaccttcaatgattctcaattctgaggtctctaaaaagagaaccttaaccacttcagggagatgatgtggtcagtttgtaagcaaaacccatcttctgaccccatcccttgtacagtgtagatctggtttggtgtaatatcttcacataatatacttgtgagaatgaagatatcattgcagattaactcacatagtatgatagtgtgtattcctcaaaggcatgtttttttgaatccatgcattgctgaggttagggaaattagaagctgtagaattactagttaatagttacttttttgcgtgtatgaggaatcgcttcttatcctattgttgtaaaatgaatgccattttattcaccaatggataatttgtttcttgttctgagcccgttatttcttgtaatagtttaatttatttcccctgttttgtatttttttagttgctgaagtattgccaggtgcatgttaaaatattaggtattgtcatatcggaaaaaaagatatgtaaaaggtattgtggtttttaaaaaaaaaaaaaaaaaaaaaaaaaaaaatttttttn

SEQ ID NO: 3666 - DNA, 1258 bp, Glycine max
tcgagtagctacgtaggcccccccccctcgatcagctacgtaggcccccccccggcagagaagatacaaaaattgatacgaggctgaacagaattaagaagagtgtttcgtttctcgtctgatggtcgtgagtggttccttcccactaacttcgaagcggagaagggtcaccagcttttgttccaccgacatggatgctgaaactgctaaggccaagcttgctgctgtgaaagaaagatttggacgagagatccatgtttttgaaacatcagttgtttctttatcttcaaaggctgcattatccaatggagaggagactgatgacttctatgagtttactgctgaagattattacaggcttttggctactaaaaaggaagataaattcttgaagactcgaaaaatccgagaagcagaagaggcagctcgtaggtcaagaataaccaaagctgtaattagagttcgcttccccgataatcacacgttggaggttaccttccacccatccgaaacaatccagagtttaattgatctcctcactaaagttattgcacagccagagcaaccattttatatatacactactccgcctaagaaggtgatcaatgacatgtctcgggatttttacactgctggcttttgtcctggtgccattgtgtacttctcatacaatgtcccaaaaggtgatagcacagtgggtgaccatactagtccttacctccaagaagagatattgtctttgaaggatttgcacgatgcaattgatcaaggccagcaatctgagcctgtagtacagtcagaaccagaacctgcagtggcaactcatccccatcccgtcgaagaacgcaaacctgctgagaaaaaggttgttaaaccaaagtggctaaaaatgtgatttcactttcttagacgtccagtgatcatattgttgcagcaaaggagcttcacttgggctctctttacattcatacatataaatggctcattgaggtcactattcttgtgggttgacattacatcttagttcaatgtatcatggcaatgtccacaagaacacatcatagttgccttttctcttcctcacccttgcttccttttcttccttctgctttacatgaatttgtagataatgtttgaaaatgttggataagattctcttggtgaatgcaaccgtctcagagcgggtgtatgtgttgtttcaatgttacatcatagctgtagaaaatttctttgatgcaaaaaaaaaaaaaaaaaaaaa

SEQ ID NO: 3667 - DNA, 1402 bp, Glycine max
tcgcggcgccgcgggccccccccccccgagaatcattgtgagagagagagagagagagagagagagagagagagagagagagagagagagagatggtgaaaatctcacttggtgggtacgatgatggggaaggacccagcaaccgaacccataagcgacgcagggaagaggatgatgatgatgaagaagaagagcaacaacaacaacgaagctttgaaatggtggacccttcaattggaactcaggagcaagaagatcacgctgctccaccccacgatggatcgaattctaacgcaaatggggctggaaccagtagcagggataggtccgttccaatcttcgtttccgaccctgatgtcctcgattgctgcatttgctatgaacccttggctgcccctgtgttccagtgtgagaatggacatattgcttgctctacttgctgtgtgagactcagtaacaagtgtcctatgtgtttaatgcccattggttataaccgttgccgggctattgagaaggtcttggagtgtattaaaatgtcatgcccaaatgcaaactatggctgcaaagagacatttagttacagcaggaaaaacaaccatgagaaggaatgcatctatctaccatgttcatgccctcttactggttgtgattttgttgcctcatccaaggagttattcctccacttcagccatagacatgtaggcttgggaacacggttcgcatatgataaatttttcactgtattcttaagtattaaccagagaacaattgttcttcaagagaaaaatgatggtaatctgtttattgttcacaataaccatgagcatctggggaacatagtccgcattagctgcattggccccaagtccatggcagagtttcagtatgaagtcttggctaggcatcaaggaaacgctctgatactacaatcttttaccaagatcgtgcaagggcaatatgctgatgctccatcaagtacgttccttttgattccgtcttgtttgtttggctctccacaactgaaactggatattcgcataaagtcacaccattaaaccttgggtggagattgatggaggctgtattttcgtttattgctgtatgtactggttttaaaatagtttattccatgtagctcagttgacttttgtcttgaaggttgcagtcattatgtaggaaactaaagaacttttttatgcatgcatatcatgtaaatatgaatatgcttaaactctattattacatatggattttgttcgtgtctcttaaaatacacaaaatgtgttgaaatgcaaaagttgttgctggtaaagtttttgtccagtcacattgggcagaacttttcattggattatatgggtattgtggtaacgaaatgtacttcaaaaaaaaaaaaaaaaaa

SEQ ID NO: 3668 - DNA, 568 bp, Glycine max
tacggctgcgagaagacgacagaagggcatagtttccaatctcacatccccttattgttaaaccctttgtttgcacaagaaaagagttacttcatcatcatcatcaacatgagtcgcttcaacaatcagcaagaatcccctgtatcatatcctccagcactgtatgttagtgccccaccacctatgggttatccttccaaaggtgatcctacagctgtagggtacccccaacaaagagttccagaagaaaccacaagcaggggtgatggattttggaagggatgttgtgctgctttatgctgctgctgggtcctggattgttgcttctgattgaatcatagcacagatttgtgtttgtcaccatgttttctttttcacattgccagtttcctatttgtattctttgtagtttagaagaataaggatctttgtcctcttggacagcttgtattttatccatttggttgatgctgttctttttccttgtactttgaatttttttatgatgtatttagttattattataagattttttttattattaataagagaaaaattatcattaaaa

SEQ ID NO: 3669 - DNA, 1263 bp, Glycine max
attgcaaagtgtttgctaactattcctgagactgagtctgcccataccataatttacctcatagtgtcgacatggtttgcgaggaagagttgttgattgaaaaagtgtgctcgatctatgaacaaatctcaagcctcgagagtctcaaaccttgcaagaatgtcgacatgcttttcaccaaactagtcctgacatgcatacccccaagcccaatcgaagtcacaaagctaaacaaaaccgttcaagacattcgatcccaccttataaaactatgtggtgaagccgagggacatttagagagccactactcaaccatcctaggctcataccaaaaccctcttcaccaccttaatattttcccctattattccaactacctcaaacttggtctccttgagttcactatccttagccaacactgcacccatgttccaaccaaagttgccttcgtgggttcgggaccccttcctcttacctcaattgtgttggcatcgaaccacttaccttccaccactttccacaactatgacatggacccttctgccaattccaacgccatgcgcttggtttcctcagaccctgacttgtccaagcgcatgttttttcacaccaacgacatattggaagtgtcgaccgctttgaaggagtacgaggttgtttacttggcagcacttgtggggatggacaaggaagggaagaaccgaatcattgatcacttggggaagcacatgaaccctggggcacttcttatgctgaggagtgctcatggggcaagggcttttctctaccctgtggttgagccttgtgatcttcgaggctttgaggttctctctgtgttccacccttccgatgaggtcgtcaattcggttgtcatcgcacgtaaattatatcatcctgtgcctatgcactctcttgatcagcaagcccttgttggctctatgatcctacctaacaagtgttccgagattcaagccttcaaccctctcaaccatgggaacatgattgaggaattggccgttgaggagcaactctcgtgaactgcatgcttttcttttatttatctactccttgtcttgctttagatgggagattactggggtcatgtggtagcaacttatagttacataaatatttccacttaattgtgtccgactgttttgtatcacatcgagcaaaacttaagtgttttacataatgttgttcttaaatttgcaataaatatgaaaagagattattatgtgttgtagaaaaaaaaaaaaaaaa

SEQ ID NO: 3670 - DNA, 1074 bp, Glycine max
aggtaccgcggctccacattctcagtctcagtctcagtctcagtctctacacacacctcagaagaacagaacagaaccaccacataacagtgcttttcaaaggcggtttgagcaatggcgttcttaaataaaattgggaatctgctcaagaattctgctgtcaagcacatcaatcaggatttttcggcgtctaccccttcacttttccaagcaattagatccatgtcatctgcaaagcttttcgtcggaggtatttcttacagcactgatgatatgagtttgcgagagtcttttgctcgctatggagaagtaattgatgtcaaggttattatggatcgtgaaactggcaggtcaagaggttttggctttgtaacttttgcaacaagtgaggatgcatcttctgccattcagggcatggatggccaggatcttcatggtcggaggatacgggtgaattatgctacagaaaggtcacgtccagggtttggtggtgatggtggatatggcagtggtggtggtggtggctacaatgggggtggaaactatggaagtggaggtggatatggcggtggtagtggctataataggggtggaaactatggaagtggcggttataatgttactagcagctatagtggtggcaatgctgaaactagttacactgggtggtggtaatgctagtaattaccaattcaatgaaaactcctggtggaagattttggctcagctaagcggtgaattcagcagcaaccaaaatgacacagcaggtgcagacaaggatgaattcattgagccacttgaagacaatgtgagggagaacaatgatggacctaccgactacgctcagaaccgctgatgagaattttcaccttgcctagagcaagtaacacctggagtttatgataaacccccccccccccaatttctttttccaccctcttgattttcatatgttcattggcttgaacttgatagtttgtctgctcaacgactatgtaaaatagatttttctaggagttgaactccatttataatccccttagttttcaaccaaaaaaaaaaaaaaaaccccac

SEQ ID NO: 3671 - DNA, 506 bp, Glycine max
cagacattcgactgaagccaaatgaagcctacattttggagcaaatgaagtcccaagatggatttatgcagaatacttttgggaccttggatgacataatgggtgcaatggtcaaaagggagcaaaatgagttgacattgttggatggagaaatgggatttgatgcctaccctgttggatcatgcaactgatttcttcttattcagcaagaatccaggagcattaaaatcgtggaacttgctcctgtccccggagccgagtgattgtgtagtagtttctttgatgtacaattattattatgttctgctactaaatttactttattggccaacattttgttgttatacttatggacttttgttagccatctgatccgttccatctcttttttttttcaatcttgtagtgtatccccataaaaaaatttctgtctatggtttagataaaataattgtaatatgaatgcttcttggtgctgggccaattttaaagattttaaaaacccc

SEQ ID NO: 3672 - DNA, 1335 bp, Glycine max
  misc_feature (1303)..(1303): n is a, c, g, or t
ccacgcgtccgtaccggcccgcggaagacgacggaagggggggtctagttagagtgaatccatgaccgtgaccatggcggctgcgtttacaagtacaagtgcaacactgagactgtcaaatgttggagagagcagaggtttgcagctgcgtaagtgtaaccctaatcctaataagctgaaggttatgggggggtttggaggttgttctggagtggcagtgggtgtgagagaaagaaaaggaattggaagggttagggttcgggttcgggcgagttcttcgtcggacgaggcagtgagtgcgcagtcaaaagtgactcagaaagtattctttgacgtcagtattggaaatccagttgggaagcttgtgggacgtattgtgattggactgtacggcgacgatgtcccccaaacggccgagaacttccgtgccctttgtactggagagaagggctttggctataagggctccaccttccatcgtgtcatcaaggatttcatgattcaaggaggagactttgacaaaggaaatggaactggaggcaaaagtatatatggtcgtactttcaaagatgagaattttaatttgtctcacactggaccgggtgttgttagcatggcaaatgcaggacccaacacaaatgggagtcagtttttcatatgcactgtcaagacaccttggctggatcagagacatgtagtatttgggcaagttttggaaggcatggatattgttaggttgatcgaatcacaggagacagataggggtgaccgtcctacaaagaaggtgaccatcagtgactgtggtgagcttccaaatgcttgaggtggttcttgtgtaattttgttggttattccttctattaacttgttgagttgagaagggaaagaggggcggggaagaagaaactttggctttcttaaattttagtctgactattcttaaaatatgttctgtaacaccttattttcacactgaacctacaaacttttagcagccacatgtattctggtagaactatagtttgagttgtcgtcgggttggacaatttaataccccatttgaatggtatcttcttaagccaaagtgcagtttccatggggaattggatggctagagaattattggagtcttctacaagatgcatcatcaaatgtggaattcatttaattgaatttggaaagaatgcacttctttaaatgcttctcgtgatgctttagcaggcgatcaatagaacgtgtaataatttagattagaaatgttaaaaataatttttttattctattgaagaatgttaggaaaaanaaaaaaaaaaaaaaaaaaaaaaaaaaaaaaaa

SEQ ID NO: 3673 - DNA, 1976 bp, Glycine max
aaaaaattaacattgaattttgacctgttacataagagtttgggatcaagaatcatggtgaatcacctatctttctataaataccaccaaagggacccccccccgatgagttctaatatatcattcaaaagtttttgaaatgttgtcaccccttcttctatttctatgcctaactcttcctttgtttttgttgtccttcttcaaataccgtaaaaccttcaagaatccaccacttccaccaggtcctagaggccttcccataatagggaatcttcatcaactagatagtccttctcttcatgagcagctatggcatctctcaaagaaatatggtcctttattttcccttcaatttggattaaggccagccatagttgtttcctctccaaaattggccaaagaggtaatgaaagacaatgaccttgagtgctgtggacgacctaaattactaggccaacagaaactaacctataatgggttagacatgggattttcctcatacgatagttattggagagaaatcagaaaaatttgtgttgtccatgtccttagctccaaacgtgtccaaagctttacctcaataagacattttgaggtcaagcagatgataaaaaaaatatctaggcatgcctcatcttcaaaagttacaaatttaaatgaagtgcttatatctcttattagtactattgtatgtagaattgttttggggagaaggtatgaagaggagggatctgaaggtagcagattccataagttgttcaatgagtgtgaagctatgttgggtaacttctttgtttcagattatattcctttcatgggttggattgataaactcaggggactggatgcacgtcttgaacgcaatttcaaggagatggataagttctaccaagaagccattgatgaacacatgaattctaagaaaaaaactccagaggaagaggatttagttgatgtcttacttcaactgaaagagaacaacacgtttcccatagatctcaccaatgataacatcaaagcagtgctcttgaacttacttgtaggagctacaggtacaactgaagtcacaacaatctgggccatgactgaactaataaaaaatccaagcattatgaagaaagtgcaagaagaaattagaggcttaagtggtaagaaagatttcttggatgaagatgatattcaaaagttttcctacttaagggcagtgataaaagagacacttagattgcacttaccagcaccactacttataccaagagaaacaaataaaaaatgcatgttagatggctacgaaattccagccaagacattattatatgtgaatgcttgggcaattcatagagatcctaaggcttggaaagatccagaagagtttatacccgagaggtttttaaattgcgacatagatctttatggacaagattttgagtttattccattcggtgctggtcgtagattgtgccctggtatgaatatggcatttgctgcattggatcttatacttgctaatcttctttattcctttgactgggaattgccacaaggaatgaaaaaggaagacattgatactgaagtgttgccaggagttacacagcataagaagaatcctctgtgtgttgtggccaagtgctatatgtaaaatccaaaagtcgtaactactgctgaaaaaaataaaataaaataattaatgattgtactcttccaacgaagattattaaataaagatgtaagcactccaaaataaaaatatttctgttgtgtttaatcttatgatctcctcttaggtttaatttaattatacatgcatccctttttttttacattactttaagttcttcaccgctaacagtattaattaacgttccaaaaatgtccctcccctttatttccaacacatacctaaccctagttccaatgtactccttccatggcaataaaacattctctctctatttgttacttcaatttgatatctt

SEQ ID NO: 3674 - DNA, 1316 bp, Glycine max
  misc_feature (1044)..(1044): n is a, c, g, or t
tcagctacgtaggcccccccccctttctttatttttatttttaatctatacattgacggtttaacttagaaatttattacatcatcaacaaatctaaagaaatagtcacatgtaatttttggataaattatatttgtaatccttgtatattcaaatagtcgctgatgtcaaattagttgatgaaaaattaaaaaaaataatttaatttaaaattacaagtaactatcccatcaaatttcataatcgtgaatcaccattgaattggataactttgttgttatgtcattaattaacattattatttgataacatgaaattaaagtaaaagtgaaaaaaaaaaaaagtttggaaacgactaaaagcatgaatctaaaaaagaaatcttatttaacactggcaacagaaaagagtacttgggtgtaaattgattttcattgattcattcaattattaactgtggttttctttttacagaacttacttgtaggagctacaggtacaactgaagtcacaacaatctgggccatgactgaactaataaaaaatccaagcattatgaagaaagtgcaagaagaaattagaggcttaagtggtaagaaagatttcttggatgaagatgatattcaaaagttttcctacttaagggcagtgataaaagagacacttagattgcacttaccagcaccactacttataccaagagaaacaaataaaaaatgcatgttagatggctacgaaattccagccaagacattattatatgtgaatgcttgggcaattcatagagatcctaaggcttggaaagatccagaagagtttatacctgagaggtttttaaattgcgacatagatctttatggacaagattttgagtttattccattcggtgctggtcgtagattgtgccctggtatgaatatggcatttgctgcattggatcttatacttgctaatcttctttattcctttgactgggaattgccacaaggaatgaaaaaggaagacattgatactgaagtgttgccaggagttacacagcataangaagaatcctctgtgtgttgtggccaagtgctatatgtaaaatccaaaagtcgtaactactgctgaaaaaaataaaataaaataattaatgattgtactcttccaacgaagattattaaataaagatgtaagcactccaaaataaaaatatttctgttgtgtttaatcttatgatctcctcttaggtttaatttaattatacatgcatccctttttttttaaaaaaaaaaaaaaaaaaaaaaaaaaaaaaaaaaaaaaaaaaaaaaaaaaaa

SEQ ID NO: 3675 - DNA, 1017 bp, Glycine max
acggctgcgagctctctctctctcggtggtgtgcctttgcagtagtactttgttcggtagctacttcgcttctaccctccattccattctctgaagtgcaggaacaatgtctgagaaaatcacagctgaaaaccttttaaacacccttgtggaaacacttactgagaagcaaaaatctggatcattttttgaagaagacaagtcaagctcagtgagctaccaattcaacagactgtttggacgccagaaacctgtgcaccatattttagggggtggaaaatctgctgatgtcttgttatggaggaacaagaagatctctgctagcgttttatcggcagcaacagctatatgggtgctttttgaatggcttaattataatttcataactattttattctttgttgtggctcttggtatgcttggacagtttctttggacaaatgcatccggcttgtttagcaggaagccatctaaagttccccgttttgtcctcccagatggtatcttcgtgaatattgcaactgtagttggtgctgaggttaaccgtggtttgaggtttctccaagatgtttcttgtggaggaagcctaaaacaatttcttattgttgtagtaagcttatgggctggtgctgtgattgggagctggtgcaattttttgactgtcatgtatattggttttgttgctgcacatacactcccagttctctatgaaaggtatgaggatcaagttgacaactttgtgtacaaggtctttgatcagatgcaaaatcactatcagaagctggatactggtttgctcagcaaaatccccaagggaaagctcaaaggaaagaagtatgaatagattcttccttacgtaaatggtttgattttcaatatccctttctctaacttgtgatggaattgggaaaggctgaaggatgtaatgtaaatagggaacaattctatgtaggggtctttagaatttgttgtgtctcattatttgactgggatcaaggcttcattgatgactgttgc

SEQ ID NO: 3676 - DNA, 1845 bp, Glycine max
tcgagtcagctacgtaggccccccccccggagcacccagactgggcggtgaggacttgcgaacactcactcgccactgctcacgaaacgtcgaaaccctaaaacctcgatttttcccaatccattccacacacaatatggcttcagatgctgacatggaggactatggcttcgagtactctgatgaggagcaagaagagcaagacgttgatatcgagaatcaatattacaattcaaaaggtatggttgaaagtgatcccgaaggtgcgcttgctggttttgctcaggtagtgcaaatggaacaagaaaaagcagaatggggatttaaagctctaaaacagactgtcaagctacattatcgactgggaaggcataaagagatgatgaaagcctatagggagatgctgacatatattaagtcagcagtgactcgtaactatagtgaaaaatgcataaacagcattatggactatgtctcgggttcagcaagccagaactttggccttctccaggaattctaccagactactctgaggtcacttgaagaagcaaagaatgagagattgtggtttaagacaaatctgaagctttgcaagatatattttgatattggtgaatatgggcgcatgagtaagatcttgaaggaacttcacaaatcctgtcaaaaagaagatggcacagatgaccataagaaaggaacccaacttttggaggtatatgctgtagagattcaaatgtacactgagaccaagaacaacaaaaaacttaagcaactttaccagaaagcactcactattaagtcagcaattccccatccaaggataatgggaataatccatgaatgtggtgggaaaatgcatatggctgagcgccagtgggcagatgcagctactgatttctttgatgctttcaagaattatgatgaagctggtagtcagagacgtatccaatgtttgaaataccttgttcttgccaacatgttgatggagtctgaagtaaatccatttgatggacaggaagctaagccatacaagaatgaccccgaaattttggtaatgacaaacttaatagcagcttatcaacggaatgaaatatcggaattcgagaaaatcctgaagagtaacagaagaaccatcatggatgatccatttatcagaaattacattgaggatctgctaaagaatattagaacccaagtcttgctgaagcttatcaaaccatatacaaggatcaggatcccttttatatctaaagtaattatgttcccactgccatcgaacaaattaaaggaatacccaagaaaaaattgtagagcttaagttgatgttactttttcatttgataataagatttatttgttaaattgaatagatacttatggttaatctaatactctttatacaacaaaaaaaaaaaaaaatttgcaggaacttaatgttcctgagcatgatgttgagcagctattggtgtcactgattttggataatagaatccaagggcatattgatcaagtgaaccggttcttagaacgctctgataggtcgaaaggaatgaagaagtacactgcagttgacaaatggaacacgcagcttaaatctctttatcaaactattaacaacagagtttcttaaaacgtgtatcgtggaagtgttatatttcttgttttccccagcttgcagttttgtcatgtgaatcattgtaagcttcaatggtgagggagatgatgggagcgtattaccagtttaccactatagaggaattcaggtcaaaccaacttgtgattcatgttttatattataggaaagtataattgttttgaaacattcatgattcaaaaaaaaaaaaa

SEQ ID NO: 3677 - DNA, 992 bp, Glycine max
ttggtcatgggttcgaatccgaacacagcctctttgcatatgcaaggaaaacttaagcaactttaccagaaagcactcactattaagtcagcaattccccatccaaggataatgggaataatccatgaatgtggtgggaaaatgcatatggctgagcgccagtgggcagatgcagctactgatttctttgatgctttcaagaattatgatgaagctggtagtcagagacgtatccaatgtttgaaataccttgttcttgccaacatgttgatggagtctgaagtaaatccatttgatggacaggaagctaagccatacaagaatgaccccgaaattttggtaatgacaaacttaatagcagcttatcaacggaatgaaatatcggaattcgagaaaatcctgaagagtaacagaagaaccatcatggatgatccatttatcagaaattacattgaggatctgctaaagaatattagaacccaagtcttgctgaagcttatcaaaccatatacaaggatcaggatcccttttatatctaaagaacttaatgttcctgagcatgatgttgagcagctattggtgtcactgattttggataatagaattcaagggcatattgatcaagtgaaccggctcttagaacgcgctgataggtcgaaaggaatgaaaaagtacactgcagttgacaaatggaacacgcagcttaaatctctttatcaaactattaacaacagagtttgttaaaacgtgtatcatggaagtgttatatttcttgttttccccaacttgcagttttgccatgtgaattattgtaagctacactgaggggaggagggagatgggagtgtattaccactatagcggaattcaggtcaaaccaacttgtggttcttgttttatattatagaaaaatataattgtttgaaacattcatgattcaatttttttggggccaatgcatgatctgtatatctgcatattacttaaagcac

SEQ ID NO: 3678 - DNA, 1735 bp, Glycine max
  misc_feature (1674)..(1674): n is a, c, g, or t
tagtagtgcaatgaatcgaagctgaaacgcttcatcaccggattctcgctctcaactcagataccaactcggagtttcggactcatcgcctccgattcaaaaccctaactcggacctcaaactcaatcgatttcatacaacatggcttcggatgctgatatggaggactatggatttgagtactcagatgaggagcaagaggaacaggatgttgatattgagaatcaatattacaattcaaaaggtttggtcgaaagtgatccagaaggtgcacttgctggttttgctgaggtagtgcgcatggaacaagagaaggcagaatggggatttaaagctctaaagcaaactgtgaagctctattatagacttggaaggtataaagagatgatggaagcctacagggagatgttgacttacattaagtcggcagtgactcgtaactatagtgaaaaatgcataaacagcattatggactatgtctctggttcagctagtcagaactttggccttctgcaggaattctatcagacaacactgcaagcccttgaagaagcaaagaatgagagattatggtttaagacaaatcttaagctttgtaagatcttctttgatattggggaatatgggcggatgagtaagatattgaaggaacttcacaaatcttgtcaaagggaagatggtacagatgatcacaagaaaggaacccaacttttggaggtttatgcaatagaaattcaaatgtacacagagacgaagaacaacaaaaaactcaagcaactttaccagaaagcactcactattaagtcagcaattccccatccgcggataatgggaataatccatgaatgtggagggaaaatgcatatggcagagcgccagtgggctgaagcagctacagatttttttgaagcttttaagaattatgatgaagctgggaatcataggcgtatccaatgcttgaagtaccttgttcttgccaacatgttgatggagtctgaagtaaatccttttgatgggcaggaggctaagccatacaagaatgaccctgaaattttggcaatgacaaacttgatagcagcctatcagcggaatgaaatattggaatttgagaaaatcttgaagagtaacagaagaaccatcatggatgatccatttatcagaaactacattgaggatctgctaaagaacatcagaactcaagtcttgctgaagctcatcaaaccatatacaaggatcaggatcccatttatatccaaggaacttaatgtgcctgagcatgatgttgagcagctactggtgtcgcttattttggataacagaattcaaggacacattgatcaagtcaaccggctcttagaacgctctgataggtcaaaaggaatgaaaaagtatactgccgtagacaaatggaacacacaacttaaatctctttaccaaactatcagcaacagagttggttaaaccgtggtgtctaacgggagagttatctgttttattgtccccgctgcagttttgttatgtgaattaatgtatctattatggagagttagggatgtgtattgcaccaatagtgaaccaaagcgagacccaacttgtgattcatgttctattttataaaatataattgtttgaaacattcacgattgattcaagggtgatagaatgcttgcatanaaaggaaagacttggggcaaataaatataatctttttttcccttgtgtgtttggccttttg

SEQ ID NO: 3679 - DNA, 1020 bp, Glycine max
tccccacgcgtccgggctgcgagaagacgacagaaggggaacgctagaaagaatgtaactaaaactattctaattgcgtctcagtttctctcaggttggcttcccctctcccctatcgctctctccctaatcgcatctcaacttgtcgtcgtcggtgattcattctccctaatcataaccctaatcgcatcttaaatcgaactcaatcagagacaaaacaaagttgttgattctgttacaaaacatagcacggtggacaaacgttaaacaaggctacagatctttgattcagttgaaagcagattgaaggggagtaaaacaggaacagagcaacctgcagaattactctatcaaggtgccataaacttgctatatccgtgtctccaatctctttgaaccgtgagagaacagccatggacagacgcacgaacaccaccaggccagtggcattgtcttccccttctatcactgccaccaccaccataacaattttgaactcggagctatcatcctcttcatctcagcaggaacaacagcaaccagaagtcctcttcctccccctcaatcgcaagaagaagaaggtctcttggaaagagggcactgtagacaacgagttcatgcagaagaagagttccaagaagtgctgtatcttccataaacagaagccctttgacgaagatgatagtgatgaggatgaacatcactctgatgaacaccctcacgatagtgggttttgctgtaagaatcatgatgaagctggcccaagcagttagggaactgattaagctgagaggttattaatgaaccaaaagaggcatatattttgtagagtaaatgattcaagaaacccttgaacttgagtttgtaagtcaggaaatatttaaaatcgcgacattggaactagaggaacattcagtttcagtttgagtgtcacaaataattggcctagtttactaccaaattggtttcactaacttatgtcatagatgcagttgttaaaagatctatgatgtaatcatg

SEQ ID NO: 3680 - DNA, 2405 bp, Glycine max
gaagattcttcttcaagcttctgatcaatcaaaattttatagtggagattgcttcatcttccagtatacatatcctggagacgacagagcggggcggcttatacgaacgtggattggcaagaatagcgttgaggaagatcgagcttcagctaattcattggcaagcaaaatggttgagtcaatgaagtttcttgcttcccaggctcgtatatatgaaggcaacgaaccaattcaatttcattctatccttcaaagtttcattgtttttaagggtgggcttagtgaaggatataagacttacattgcacaaaaggaaattcctgatgatacatacaatgagaatggtgttgcattattctgcatccagggctctggaccagacaatatgcaagccatacaagttgaacccgttgcatcttccttgaattcctcttactgttacatacttcataatgggcctgctgtctttacttggtctggaaactctacaagtgcagaaaaccaggaacttgttgagaggatgctggatttgataaagccaaatttacaatccaaaccacaaagggaagcttctgaatctgaacagttttgggatttgttaggaggaaaatcagaatatcccagtcaaaagattcttagagagcctgaaagtggatcctcacctattctcttgccacttctcgaatgcgtatggataggtgggtttacccactgatctaaagctctagtctctgcatacatgatttaagcccaagtgacacgtgattagtattgaaatagatgctagtttgatcaacctgacactgttgaaaaatgtgaccgaggtatacaacttctcccaggatgatttgatgactgaagacattttcgtcttggattgtcactcggaaatctttgtctgggttggccagcaggttgactccaagagtagaatgcaggctctatcaattggtgagaaatttcttgagcatgattttcttctagaaaagttatctcgtgtagctccagtatatgttgtcatggaagggagtgagccacctttcttcacacgcttctttaaatgggattctgcaaaagctgcaatgctgggaaactcatttcaaaggaagctgacaattgtgaaaagtgggggtgctccagttttggataaacccaaacggagaacatcagcatcttatgggggaaggtcgagtagtgtgccagataaatcctcccagcgttcctctcgcagcatgtctgtcagtcctgatcgtgttcgtgtgagggggcggtctccagcctttaatgctctagcagctaattttgagaaccctaattctaggaacctttcaaccccacctccagtaattagaaagctgtatcctaaatctgtgacaacagattctgcaatactggcgccaaaatcttctgccatagctgcacttagttcttcttttgaacaaccaccttcagcacgagaaaccatgatacctcgctcacttaaagtgagtccagtaatgcccaaatcaaaccctgagaaaaatgacaaggagaattctgtgagcaccagagtggaatctcttaccatacaggaagatgtgaaagaggatgaagttgaagatgaggaaggtcttgtgatttacccatatgaacgccttaaaataatgtccacagatcctgtaccaaatattgatgtgactaagcgagagacttatctatcatctgcggagttcaaagagaaatttgggatgtccaaggatgccttttacaagttacccaaatggaaacaaaacaaactcaaaatggctgttcagttattctgattcttgaaagttttcttagccttctgtcagctccctgcagttaggttgcagtgaggaactaaacatgtggaagtaaaagggacagcatcagtgttttttttagcatagctgcatctgctcccaagaaacttttcatgaagagaaactagagattttctacctctacccatctctttgcaatggtttgaatgtttagcgttatttctttgatgagttagctgcgtggcattaatttttttatagggcagagtttgtttgtgagcttgcttttttatttttattttcattttttggggtctcatgttagtcttcattttattttttaatttaaaatttgttttggtaaagcaatttggcttgcaaatgcggtctacttaggttgtattgatattgaggatgaagtgtgtacagtgagtgtaacaatcagtcaactcgtaatttgttttggaaataaagtgtgattctttgttgtcaatttcaaaaaaaaaaaaaaaaaaaaaaaaaaaaaaaaagaaaaaaaaaaaaaaaaaaaaaaaaaaaaaaaaaaaaaaaaaaaaaaaaaaaaaaaaaaaaaaaaaaaaaaaaaaaaaaaaaaaaaaaaaa

SEQ ID NO: 3681 - DNA, 2194 bp, Glycine max
gatgtggtatttttagtaccacaaaataaataatcgcttcagctacgcgcatcccccccctccgacagaacacaaggcacagcacagcgcagcgccgcctcaacatctcaactttcccttcgatctcattctcaggtgttgttgaagcttcctgtgttggcttggtatccctgcaagttctgctgtagcagattccaaggtgaaggtgtcacgttaaagtttctttcatgtttgaacaggctactatccatttgggagcaactgagctgcttggagagtatttttcttcctctaggaaaaattacagaccctcaccacagagacttagttgtatgaacggttggccaccttccattatccttgaaggagattgttcaaggatacagactacctttgaggttgaaattgcggctgcatataatttgaattccagcattttctgcctctgaatatctctggaactttgtaagtcaacaaacatggctttacagaacattggtgctgcaaacagtgatgatgccttctacaggtataagatgcctaagatgattaccaaaattgagggcagaggtaatggcatcaaaactaatgttgtcaatatggttgacattgcaaaggcattggcaaggcctgcgtcttacacgaccaagtattttggttgtgaacttggggcccagtcgaaatttgatgagaagaccggaacttctcacgtcaatggagcacatgatactactaagcttgctggccttcttgagaacttcattaagaaatatgtccagtgttatggttgtggaaatcctgaaactgagatcataatcactaagaaccaaatgatccagctgaaatgcgctgcttgtggttttgtgtctgatgttgatatgagagacaagctgactaccttcatcattaagaaccctccagaagttaagaaaggatccaaagacaagaaggccatgaggagagctgagaaggagagacagaaggaaggtgaattagctgatgaggaacagaagaaagtgaagaaagaggttaagaagaaaggctcttcatcttctaaggatggcactgctaaatcaacctcttctaagaaaaaagcaagtggctctgatgaagaccacacttcacctactcacagtcaaattgacgagaaagaggaggctccagatgaagatgatgacgacgacgtgcaatggctgacagatacatcacttgatgctgcccgtcaacgtatccaagaacagttaagtgctgtgacagctgatatggttatgctttctacagatgaaccagagaagaagaaaaaaacaataagtaacagaaatggtggttctcacaatggtaactcaatgcactacgggaccctggttggtgaagtgaaagcaaatttcaagaaaggtgttggggcaaatgaattgctgtcccatcttgcagcacttcctgcacctgctcaagaaaagatgagtgcactggttgaagctctatttgatggaattgataaaggttttgctaaagaagctgataagaagaagaactactttgctgctgctgttgctgaggagggatcccagctgttattgcttcatgctattgaagaattttcttgcaagtctacttccaatgctttaaaggaggttgccctggttctaaagacattctacgatgctgatgtgttggaggaagagcacatagtgcagtggtatcaaaagggactgaagggcaataacaagaactctaagatttggaagaatgctcaacctttcattgattggcttcagagtgcagaatcagaaaccgaggaagaataattttcccacattctccgtttcttatgtttgcttgcttttgtcatgtcctttatttccaataaaagggtcttgttggccccatgcgttgtggaactactatacttgtctgaagggtgtatgcttgctggactagtatagcatgtatgcgtcagtgagttttgtgatgtgtggttctaatgtattttggttattggttgtttatgattatgttttatattttaataaaacgtgtcttgataataaaaaacaaataaaaattcatgatttttcaaacatgtggttgatacgaacatcctctagctgcgtagggaattactataagacagattacaatgtcttttttcttatacccctattagttttgctggattgttgggaaggttttgatt

SEQ ID NO: 3682 - DNA, 2203 bp, Glycine max
  misc_feature (1)..(1): n is a, c, g, or t
ntctgctgcgagaagacgacagaagccgacagcgcagagccgcctcaacatctgaaacagactctatccctaatccctatcttcttctctgctctctccgcacgctttggctcctctgatctcagtttctggttttgaattgtaggtgttgttggcttggtatccgtgcaagttctgctgtagccgatttgaaggtgaaggtgtcaccttaaagtttctttcatgtttgatcaggctactatccatttgggagcaactgagctgcttggagagtatttttcttcttctagaaaaaattacagaccctcatcccagagagttagctgtatgcattgcgagacatatcagaaattcattcagttttctggttgcggttggccaccttccattatacttgagggagattcttcaagggcacaagctaccttagaggctgaaattgcggctgcgtataatttgaattctggcatttgctgcatctgaatatctctgaaactttgtaagtcaacatggctttacagaacattggtgctgcaaacagtgatgatgccttctacaggtataagatgcctaggatgattaccaaaattgagggcagaggtaacggcatcaaaactaatgttgtcaatatggttgatattgccaaggcattggcaaggcctgcgtcttacacgaccaagtattttggttgtgaacttggggcccagtcaaaatttgatgagaagaccggcacttctcacgtcaatggagcacatgatactgttaagcttgctggccttcttgagaacttcattaagaaatatgttcagtgttatggttgtggaaatcctgaaactgagatcataatcactaagaaccaaatgatccagctgaaatgcgctgcttgtggttttgtgtctgatgttgatatgagagacaagctgactaccttcatcattaagaaccctccagaggttaagaaaggatccaaagacaagaaggccatgaggagagctgagaaggagagactgaaggaaggtgaaatggctgatgaggaacagaagaaagtgaagaaagaggttaagaagaaaggctcttcatcttcaaaagatggcactgctaaatccacctcttcaaagaagaaagcaagtggctctgatgaagaccgcacttcacctactcacagtcaaattgatgagaaagaggaggctccagatgaagatgatggtgatgatgacgtgcaatggctgacagatacatcacttgatgctgctcgtcaacgtatccaagaacagttaagtgctgtgacagctgatatggttatgctttctacagatgaaccagagaagaagaaaaaagcagcaagtaacggaaatggcggttctcagaatggtaactcaatgcactatgggaccctggttggggaagtgaaagctaatttgaagaaaggtattggagcgaatgaattgctgtcccatctttcagcacatcctgcacctgctcaagaaaagatgagtgctctggttgaagctctattcgagggaactgagaaaggttttgctaaagaagctgataagaagaagaactactttgctgctgctgttgccgaagagggatcccagctgttattgcttcatgctattgaagaattttcttgcaagtctacttccaatgctttgaaggaggttgccctggttctaaaggcactctatgatgctgatgtgttggaggaagagcacatagtgcagtggtatcaaaagggactgaagggcgataacaagaactctaagattttgaagaatgctcaacctttcattgattggcttcagagtgcagaatcagaaaccgaggaagaataatttttcctacattctccgttacttatgtttacttgattgtgtcatgttctttatttccaataaaggttattgtaggccccatgtgttgttgaactactatactgtgcgaatggtgcatgcttgctggaccagtatgtatgcctcagtgcgttttgtgatgtgcggttctaatgtaattttgtttttggttgttgatgattatgttatatgttgtcttgataatataatagtagtactgcttttctgttgtgtctaatcaagattgtttaatcatgtggttgatatgaacatcctctagctgcggcgggacttactataagagtttgccaatgaagaaaaaaaattggaaaccacgagcggccgcc

SEQ ID NO: 3683 - DNA, 2042 bp, Glycine max
tacggctgcgagaagtcgactcagcggcgtggcgccgaacacagaacagaaggccacagcgccgcctcatctcttctgctctctcattacgctctttcctccgatctcaggtgttgtttaagcttcctgtgttggcttggtatccttgcaagttcttctgtagcagattccaaggtgaaggtgtcacgttaaagtttctttcatgtttgaacaggctactatccatttgggagcaactgagctgcttggattgtatttttcttcttctagaaaaaattacagaccctcaccacccagacttagttgtatgaacggttggccaccttccattatccttgaaggagattgttcaaggatacaggttaccttagaggctgaaatcacagctgcgtataatttgaattccagcatttgctgcctctgaatatctctggaactttgtaagtcaacaaacatggctttacagaacattggtgctgcaaacagtgatgatgccttctacaggtataagatgcctaggatgattaccaaaattgagggcagaggtaatggcatcaaaactaatgttgtcaatatggttgacattgcaaaggcactggcaaggcctgcgtcttacacgaccaagtattttggttgtgagcttggggcccagtcgaaatttgatgagaagaccggcacttctcacgtcaatggagcacacgatactgctaagcttgctggccttcttgagaacttcattaagaaatatgtccagtgttatggttgtggaaatcctgaaactgagatcataattactaagaatcaaatgatccagctgaaatgcgcagcttgtggttttgtgtctgatgttgatatgagagacaagctgactaccttcatcattaagaaccctccagaagttaagaaaggatccaaagacaagaaggccatgaggagagctgagaaggagagactgaaggaaggtgaattagctgatgaggaacagaagaaagtgaagaaagaggttaagaagaaaggctcttcatcttctaaggatggcactaaatccacctcttcaaagaagaaagcaagtggctctgatgaagaccgcacttcacctactcacagtcaaattgatgagaaagaggaggctctagatgaggatgatgacgatgatgtgcaatggcagacagatacgtcacttgatgctgctcgtcaacgtatccaagaacaattaagtgctgtgacagctgatatggttatgctttctacagatgaaccagagaagaaaaaagaagcaagtaatggaaatgatggttctcagaatggtaactcaatgcactgcaggaccttggttggtgaagtgaaagcaaatttgaagaaaggtgttggagcaaatgaattgctgtcgcaacttgcagcacatcctgtacctgctcaagaaaagatgagtgctctggttgaagctttgttcgagggaactgagaaaggttttgctaaagaagctgataaaaagaagaactacttttctgttgctgttgcggatgagggatcccagccgttgttgcttcatgctattgaagagttttcttgcaagtctacttcaaatgctttgaaggaggttgccctggttctaaaggcactctacgatgctgatgtgttagaggaagaacacatagtgcagtggtatcaaaagggactgaagggtgataacaagaactctaggatttggaagaatgctcaacctttcattgattggcttcagaatgcagaatcagaaaccgaggaagaataatttgtcctacattctccgttacttatgtttgcttgcttgtgttatgtcctttatttccaattaagggtcttgttggccccatgtgttgttcaactactatacttgctaaaaacttggtgtgaggggtgcatggttgctggactagtatagcatgtacgcgtcagtgagttttgtgttgtgttgttctaatgtattttggtttttggttggtgatgattatgttttctgttttaataaaacgtgtcttgataatttaactcgttctctc

SEQ ID NO: 3684 - DNA, 619 bp, Glycine max
aggttgggagaggttggtgaggtgtggggatggcttttgcggtgacgcctaagataataccggctagattcgaaagggggaattatggaggaggggatcggctaaggctgaagcaagtgaagtgtggtattgacggaggtgtgtcgaattccaactacgtggtgccgctggacaatttctccaactcatcctgcataacacgtcctttagccgagatactcagagacctcaataagagaatccccgatactatcgtcaactgggacaatatcacccagtgatgggctccattggcgatccagtttcagctgctgaggaaattgctttctgcaaaacttgtgcccggtttggtcttagcttgtatttgtatcatgaagatgaaatgaccagtttttaagcttctaaatttttgttttggttggatgtgaatagaggtggctgttaggtacttctataaagcactgtcaagtattgtggaaaacttgaagccatgtcttctttttatgaggatccgatgcttatgtgtattcaggtttcttttattgctcaggtacatttatggctttaagttttgtaagttatggtggcctaaagccttccattaataaatgaaccatta

SEQ ID NO: 3685 - DNA, 1603 bp, Glycine max
  misc_feature (1596)..(1599): n is a, c, g, or t
tggcatggattgttgagcattcacatgcctgcatattctgattctattattaagggggtctctacagtcatggtttcatactccagttggaatggtgtaaggatgcatgcaaatcgtgatctagtcactggtttcctcaagaatacccttaagtttaaggggtttgtcatctcagattggcaaggtattgacagactcacatcaccacccagttcaaattacacatactctgtccaggcttccattgaagctggtgttgatatggtgatggtcccatttgaatatggtaagttcattcaggatcttacactcttggtcaagagcaatatcattccaatggagcgcattgatgatgctgtggagagaattttgcttgtaaagttcaccatgggtctttttgagaatcctctagctgataccagcttagtcaatgagcttggaagccaggaacacagagacctagcaagggaagcagtgagaaaatctcttgtgctgcttaagaatgggaaaaatgaaagtgcttctcttctgcctcttccaaagaaagtcccaaaaatcctagttgctggatctcatgctgataatttgggttaccaatgtggtgggtggacaatcaaatggcaaggattcagtggcaacagtgacacaagaggaacaactattctcaatgccataaaatcagcagttgatacaagcacagaagtagtctttcgtgacaaccctgacaatgagtttgttaagtccaataacttcgaatatgccattgttgtagttggtgagcctccttatgctgagactgctggggacagtacgacacttacaatgatggaatctggcccaaatgtcatcaacaatgtctgtgggactgttaagtgtgttgttgtcatcatttctggcagaccgattgtcattgaaccatacatttcttctatagatgcattggtggctgcatggttaccaggcactgaaggccaaggcatgacggacgtcctttttggtgactatggtttcactggtaagcttgcgaggacatggttcaaatccgtagatcaactcccaatgaatgttggggatcctcactatgatcctctttttccttttggtttcggactaacaaccgaatccgtcaaggacctggtagcaaggtcaacctcagctgctgttggtgcaagggcttgtatatttaccattatagtgaccctaatcatcagcttatacttacctggttaagcacaatttatgggagctttattggagcgggaggctagagaactaacttgggatacttcccggcttagtcttattctagtgtaattcattgtataccattgagacattattattcataaactagtaatttgagcacattctttttcataattggaacttggtttatcagactatttaggtattaaatctactaggcgttaagtagttaagttatttgttagagtactgcaaaaatgttgatttgtgttccgtgcctctactcgaatcaccggaattaattcttcaaatgcaagtcttttttgtatatagcccaaaatcaaaataattaggaagcaaatgtcctctaggattggtactatttccctnnnnggtt

SEQ ID NO: 3686 - DNA, 1710 bp, Glycine max
  misc_feature (1519)..(1519): n is a, c, g, or t
  misc_feature (1632)..(1632): n is a, c, g, or t
gcattctcgaatttaacacgaagttttcctcgtactcattgttacattctataaatcaagttcgatacaaccccatcgctaaatcagtgtgcaagcattccaatcgctcccaaaatcttttctaatttgttcataactcaataattctcatcatgggctccttgattgttccaggtgaacatgatcacaaactaaagcttgtttctcttccctttgtatcaaccagtcacctcattcccgtagtagacatagctaggctctttgccattcatggtgttgatgtcaccataatcaccaccacagccactgccgccattttccaaagctctatcgatcgcgaccgtgaccgcggccacgctattagaacccacgttgtcaagttcccatgtgaacaagttgggttgccagaaggagtagagagcttcaactccaacactcctcgggatttggtccacaaaatctaccagggactcaccattctccaagaccaataccaacaactcttccatgacttgcagcctgatttcttgttcaccgacatgttctacccctggactgtggatgctgctgctaagttgggaattccacggctcatttatgttagtggaggttaccttgctcactcttctcagaacacaattgaaccattctcacctcacgcggtggttacctcacaccaaggtagattcggatactgagagttttctgctggctggattgccccatgaattgaatatgacgcgtttgcagctaccggattggcttagagcaccgacaggttatacttatttgatgaacatgatgaaagactcggagagaaagagctctggatcgccgttgaatcctttttttgagcttgagggagattatgaggagcattacaagaaggccatgggaactaaaaggtggagtgttggaccagtttccttttgggtgaaccaagatgctttggataaggccgatagagggcatgccaaagaagagcaaggggaaggagaagaagggtggctcacatggcttgattccaagacagagaactctgttctctatgtgagttttgggagcatgaacaagttccctactcctcaccttgttgaaatagctcatgcccttgaggattcagaccatgatttcatttgggtggttaggaaaaagggtgaaagtgaagacggggaaggcaatgactttctccaagagtttgataagagagtgaaagcaagcaacaaggggtatctaatatggggttgggcaccacaacttctcatactagagcatcatgccattggagctgtggtgacacactgtggatggaacacaataatcgaaagtgttaatgctggtttgccaatggctacttggcctctgtttgctgagcagttttacaatgagaagttgctggctgaggtgctgagaaattggggtgccagtgggggcaaaggaatggaggaattggaatgagtttggagatgaggtggtaaaaagggaagagataggaaatgccattggtgttttgatgggntggtgaagagtctatagaaatgaggagaagagcaaaagcacttagtgatgctgctaagaaagctttcccaggttggtgggtcttctcactacatttgaagaactgatcccagnagttgagtcacttcaactgcagaaggcacccacaaagtagccaacctctttggggataatgggcatccattcagacct

SEQ ID NO: 3687 - DNA, 2280 bp, Glycine max
gtgtcttacttccttccttcctcttttcagaatcaatggttacctctctggctatcataatcagctacgtaggccccccccccaaacttgccttgccaagcagcaccaccaccacccaccctgttattcttcatgtggcgaaattcacaacataacgtatccatttcgactaaaaggcgacccaatcggctgcggcgatcaagattacgaattagattgcgttgaaaacgtgacagtaatgactctattttcagggaaattccacgtgcaggaaataaattacaagaggtacgagatccggttgaccgatgctggtgtggtggaggacattgcttgctcaattcctcgttatttctttaatctctacaatttcacttacatcggtggtcttaactattctgcatatggtccgttaagtttctcggggtatcctcagtatgcggtgtttctaaactgcactaccccagtcaccgatgatcctcgatacgtagctgtgaaggtcaacggtaattgtgattcgagttccgtaggccatatctatgccattctggtcacagacgatgatgatcgctttgggtttacactgacggacatcaaggttgggtgccgattgaaggttgctacatttgcaaactggaaatataataacagggaggttaacgtttcttattctgatatcaacaagtggctgcaccacggaatttggatgtcttggttctttccagttatttgtagggaccgatgcggaaagggtgtgagttgctacatcgatcaaaccacgcgagaaactcgatgtgcagatagctactgccaaatctttggcattcaaacatacaagtgcggaattcgtaatcagattcttgaatatatgcggcaaattcttggctacacagtaggttatcttaaaagcgttataatgggatatgtaaatagaataagatatcgtgagcaactaacaagctgggatagtgaagcagaattctttgaacaaaatgctatagcaatattcctggcaaccagattgctatttggaatcacacttttactaatgctatatatctatatgtggcgacgtagacattattcaatgtatgaaaacattgaaatttttttgctagatagcaatctaaatcctattaggtacgaatacagagaaataagaaaaatgaccaaagatttcaaagtgaaattgggtgaaggaggtttcggctctgtatacaaaggaaaacttcgaagcgggctagatgtggcaataaagatgttgaccaaatccaaaactagaggacaagattttatcagtgaagtggctacaattggaagaatacatcacgtgaatgtggtgcgtcttatcggatattgtgctgaaggagaaaagcatgctctagtttatgaattcatgcctaatggttcattggataaatacattttctctaaagaagaaagtgtctccttaagttatgacaaaacatatgaaatatgtcttggcatagctcgtgggattgcttatttgcatcaagattgtgatgtgcaaattctacattttgatatcaagcctcataatattcttctagatgataacttcattccaaaggtttcggattttggacttgcaaagctatatcctatcaaagataagtcaattattttaactggactaagaggaacttttggttacatggctccagaattattctacaaaaatattggtggagtgtcatataaggcagacgtctatagctttggaatgcttttgatggaaatgggaagtagaaggaggaactcaaatcctcacacagagcactcaagccaacatttcttccccttttggatctatgatcattttatggaagaaaaggatattcacatggaagaggtctcggaagaggataagattctagtgaaaaagatgttcatagtttccctttggtgtatacaattaaaaccaaatgatcgtccttcaatgaagaaggttgtagagatgcttgaaggaaaggttgaaaatattgatatgcctccaaagcctgttttttatccccatgaaacaacaatcgactctgatcaagcatcatggagtgattcaactagttcttgcaagaacattgacaaaaccaagtccaatttttcactggagaacaactcttgacaaactatggttatgaataaattcaatctccaaaattaagagaaaatatgttatgtgttagaataattctacagcatcaattaattataaatcagcatatatataataaatttattgatttttataataattaattt

SEQ ID NO: 3688 - DNA, 1336 bp, Glycine max
acgagtcagacaaaaggagagtgacccaagcacagagtaagttataggactttttatgtcattttcacaaatctcaatatgattagctatttttctcctgcctccgaccaacctcaaactcttcttttaacaaggttttgttggtaacaaaatccgggaatcatgttgctaattctctgcttaaatttaaaacaattgaagtttacagttggtattagtaactatcagaaaattctggcaatttactatatccataacatcactcttgtttatttcagggctcgagcccaagcactgatgacatggaatgtgacatgcacatactcacaatttctggctcaaaaaactccctcttgttgtgtctcactttcatctttctataatgatacccttgttccctgcctaacatgtgcatgtggctgccaaagtaactcatctcagtcagggacttgtgtagatccagatacaccacatttggcatcagttgttgctggctctgggaagaataacttttcacctttggttcaatgtactcatcatatgtgcccagtccgtatccactggcatgttaagcttaactacaaggagtactggcgtgtgaaggttactattactaattttaattacaggatgaattattctgaatggaacatggttgttcaacatccaaactttgacaatctgactcaactgttcagtttcaactacaagtcattgactccttatggttcaataaatgatactgcaatgctatggggagttaagttctataatgattttctcaaccaagctggccctaatggcaatgttcaatcagagctactcttccgaaaggataaagcaacttttacttttgataagggttgggcttttcctcgaagggtctacttcaacggtgacaactgtgtaatgccaccacctgattcttatccgtggttacctaatgctggtgctaggcaagaggtttccttgttttctttagtgatagcatctttggtagccttggtattttatgctcacgcataaagtttcaatctgtggtacacttagccttgtaatagaaaattttcagtcagaccagttttgactcatctgtgatgtcaatttggtatttgaagcatatgggaggatgacatccaagattagatcacgtgtcccatgatttgttacaagaggatttacattggtggtagaatttgctattgttttttgtgtttgttgtaattcaatgatgtatgtatcgttattatattgtaaactgtaattataataaatatacacaacgagatgtcacgtgaaaatatggacttgatgaatcatatgtggatttgaaatg

SEQ ID NO: 3689 - DNA, 1058 bp, Glycine max
  misc_feature (1023)..(1023): n is a, c, g, or t
aaactgggacaaaccagacactcagtttctgcctcttatttttttccactctctctctctttatttttcttttcctcactttctctctctactttttctctttatttctagtcttctctgtctatcatagatcttgaactatcctggcaagaactcagagcactaacatcttgcagccacaaaaatgggcttctttctgttaccaaaagcaactccttgcattttgttcttggctctgctgtcttgtacttgctttacttctacagatgcttatgatccactcgacccaaatgggaatatcacaatcaaatgggatattataagttggaccccagatggatatgtggctgttgttacgatgaacaacttccaacaatatcgtcatatcgcttcacctggctggtcaatgggatggacatgggcaaaaaaggaggtaatatggagcatgatgggagggcagaccactgaacaaggggattgttcaaaatttaagggaggcattccacattgctgtaagaaagatccgacggttgtagatttgctacctggaacaccttacaatcaacaaattgcaaattgctgcaaaggtggggtgctcagttcatgggtgcaggatccaaccaatgcagtttcctcatttcaagtcagtgttggtagagctggaaccacaaatagaactgtcaaagtcccaaaaaacttcaccttgaaagcaccaggaccaggttatacttgtgggccagctaagattgtggcacccactaaattcattacttcagacaaaaggagagtgacccaagcactgatgacatggaatgtgacatgcacatactcacaatttctggctcagaaaactccctcttgttgtgtctcactttcatctttctataatgatacccttgttccctgcccaacatgtgcatgtggctgccaaagtaactcatctcagttcagggacttgtgtagatccagatacaccacatttggcatcaagttgttgctggctctgggaagaataactttttnacctttggttcaatgtactcatcatatgtgcccag

SEQ ID NO: 3690 - DNA, 1865 bp, Glycine max
cccacgcgtccggtttcctcaaatccaatccataaccgcgcgctgccgaagatcattgttggcctcgcttctctctctctgcgatgcattcatttcttcgttcttctccaccatttaatacatattattatactacaaaaacataacctccagaacacatttatatattcccttgttgcatatatactttgttgttgttgttgttgttgttcttcttgtaaatggcgaatgcatctgggttcttcagcccttcggttccccacttcaaagtgagggttaagcctctcaccactgccattggattctccgccaaagtcgtttgcgttggaaacatcgaaggagctgaaaaacatgcttccaccgtttccccttcttcccaatctccaatacccaggcttgtcagcaaagggtgcaagttagttggatgtggctctgctgtgccagctcttcagatttctaatgacgatctttcgaaaatggttgatactaatgatgaatggatatctgttcgcaccgggattcgtagacggcgtgttctttcaggcaaagataacttgacaggtttagcagtagaggcagctaggaaagctcttgagatggcaaaggtagaccctgatgatcttgacctaatattgatgtgcacatctacgccagaggatctttttggtagtgctccacagattcaaaaacaacttggctgcaaagcaaatccattgtcttatgacattacagctgcatgtagtggatttgtgttgggtttaatatcagctgcttgtcacattaggggaggtggatttaataatgttctagttattggggcggatgctctctcacgatatgttgattggacagacagagggacctgtattctttttggggatgctgctggtgctgtactagtacaggcctgcaacagtgaagaagatggtttatttggttttgatttgcatagtgatggcagtggtcaaaggcacttgaatgcttccattaaagaaaatgagtcaaataatgcattggattcaaatggttctgtggttggctttcctcccaagcagtcctcatattcatgcattcaaatgaacggcaaagaagtctttcgctttgctgtacgatgtgtaccacagtcaattgaatctgcccttgaaaaggctggtctccctgcatctagcattgattggctacttctccatcaggcaaaccagaggattattgacgcagttgccactcggttagaactcccctcagaacgggtgatatcaaacttagctaattatggtaacacaagtgcagcttccattcccttggctttagatgaagcggttcgaagtggtaaggttaaggcaggccaaactattgcaacggccggcttcggtgccggtcttacttggggttcagcaattattcgttggggctgaatgcttttcttttacggcagaattgcaaatagagaagaatcagttgcaagtgcagctgtccaaataccccacattcttacacaattgtagaaaatggggtttggggaatttgcaaaaggattgatatcattaacatccagcactccctgaaattgtccctttcttttgtcttaaatttattttgtcttaaatttacattttccttgggcttcctttctcaattaccaatttttctttttccgagtcatgtatttgtcattcagatttattttaaacgaggcttactatttatgtttgtcaatggtacttgtaattaaaaatgcagcatgccaactgtttgcttgcttgtacttcaaaaaaaaaaaacaacactaagccaccactttgttttagttatttgttttttgatctaatgaattaaaatgggaagcaaaaaaaaaaaaaaaaaaa

SEQ ID NO: 3691 - DNA, 959 bp, Glycine max
  misc_feature (919)..(919): n is a, c, g, or t
  misc_feature (922)..(922): n is a, c, g, or t
  misc_feature (925)..(925): n is a, c, g, or t
  misc_feature (932)..(932): n is a, c, g, or t
attatcgaagcgcaaaacgagtagcaggatctgttgtttttgttctttttcgttttctacgaggaaggaaaataacaataacagaggaagaaagaaaattacacagtttcaatttcagtatcagctacactttttagaaatggctactctatcaagcttcatcgctacgccgaagaatcccaatacccactttctctcaggttcctcattgacgatggacaaatgcttcttgaaaatcagctccagtgaacactttccaggttcctctttaaagactaaagcaacacgtaaccagccacttgttattcgagcaggtggtgatggtggaagaccaagtagtggaagtggttttgttggtggttttgtattgggaggactaattgttggagcattgggttgtctatatgcacctcagataagcagggcactagctggagctgacagtaaagacttaatgaggaaacttccaaaattcatgtatgatgaagaaaaagctctagagaggactcgcaaggtgctaactgagaaaatagcacagttgaactctgccatagatggtgtttctgcacagttgcggccagatgaagactcaaatgaaattgccctgaactcagaggaaattgaagcttccatataattaaagcaatttacgatgtctaagcacagattatcatctctttttcgtagttaagaaaatactaactttggttattggattaaagttttaggagttaagtttgcttatgacatttaactatttctttttataatggttcgttgtttacatatggtatatctagtgagaatactggtttattgtgagaaataagaactataaatttgaattttgatcaagattaaaaaaaagaaagaaaagaaagaaagaaaagaaaaaaagagggccgcgccgtcttctagnggnatnccagagncttacgtacggcccgtgccatgcgacg

SEQ ID NO: 3692 - DNA, 922 bp, Glycine max
atttcgaaaaaaaaacgagaagtaggatctgttgttcttcgttttctacgaggaagcaaaataacaataacagaggaagaaagaaaatcacacagtttcagtttcagtttcagcttcgctttgtagaaatggctactctatcaagcttcattgctacgccgaagaatcccaagacccactttctctcaggttcctcattcatgtcgatggacaaatgcttcttgaaaatcagcaccagcggacactttacagatttctctttaagggctaaagcaacatgtaacaaaccacttgttattcaagctggtggtgatggtggaagaccaagtagtggaagtatttttgttggtggttttgtattgggaggactaattgctggagcattgggttgtctatatgcacctcagataagcagggcactagctggagctgacagtaaagacttaatgaggaaacttccaaaattcatgtatgatgaagaaaaagcactggagaggactcgcgaggtgctaactgagaaaatagcgcagttgaactctgccatagatggtgtttctgcacagttgcggccagatgaagactcaaatgaaattgccgtgaactcagaggaaattgaaacaccaatcagcgatgaaagtgaaatcgaagtcaacaaataaaaagctgttgtcatttactccaagttgatgtcacaaattgcttttgcatcattgaatctattaatgtatgtacttgacacaagttggttccagcaaacgtagattatgttctgttgctgaacaagtctccgttaaatagacaatttgttacattgacaagttataccaataattcatttaatttactgtcccataaaaaaaaaaaaaaaaaaaaaaaaaaaaaaaaaaaaaaaaaaaaaaaaaaaaaaaaaaaaaaaaaaaaa

SEQ ID NO: 3693 - DNA, 1207 bp, Glycine max
ccacgcgtccgcaaacttgcttggtggctctgttatcatgtttcaaatggttccagcatcagctacgtaggccccccccccccccccttcttcggtgctgtatcatatctgacagttgctgttactcccttctgcattgtgtttgctgtgctttggggaatttatcgccgtgtatcatttgcttggattggtcaagatattcttggcatcacattgataatcacagttcttcagattgtgcggataccaaatctcaaggttggaactgttcttctcagttgtgccttcctatacgacatcttctgggtgtttgtctctaaatggtggttccatgagagtgtgatgatagtggtagctcgaggtgataggagtggagaagatggtatccctatgctactcaagataccacgtatgtttgatccttggggtggttacagcatcattggttttggggacatcatcttaccagggcttctagtagcattttcactaaggtatgattggttggcaaagaagaaccttcgagatgggtacttcttgtgggcaatgaccgcttatggtttaggtctccttatcacatacgtggctttgaacttaatggatggacatggtcaaccagctttgctttatatagtcccatttacacttggaacctttctgtcattgggaaagaagagaggtgaactcaaggttttatggacaagaggggaaccaaaaataccttgccctcacatccaagaggatcaatcaacaaaccagtaatccccagcaggaatagcatcctaggtgttagtttacaggagacttatagcagcaaatcttgaagactttgtaacatctgtaactttgtcataaccaaatttcggccaaatgatattatagcatgtacttaaaatcagcacctgagacttgagataccccacaactgttggatgttagaggaccccatgtcaaactgtttattgtaagaatagatcctgttctaatagaagatggactgaggtgaggagatccaaaagattccatttcctgattctggctttgacttggggacatgatttttatagttaccttttacaactttgcttcagtgaggctctggctaaaatgatgtatttatcaaagcaagtggcaaaaagccaaatgacatgcatagacaactttcaatcaatggatagaagactggaaaatgatgatttgaaactta

SEQ ID NO: 3694 - DNA, 1481 bp, Glycine max
agaaaatgttggttccagtggttatgtggaaatcagtactgtagcagcaattttatttgttgtgattgcttcttgcttcttggttatgctgcgtccgttattggcactctggttcgttgaagttctggtggttctcttttgcattggtggcatagagggtctgcaaacttgtttggtggctctgttatcatgtttcagatggtttcaacaacccgctcaaacatttgtgaagatacccttctttggagctgtctcatatctgacagttgctgttactccattctgcatagtgtttgccgtggtttgggcagtttatcgccgtgcatcgtttgcttggattggtcaagatatccttggtatcacattgataattacagttcttcagattgttcgcataccaaatctcaaggttggaactgttcttctcagttgtgccttcctatatgacatcttctgggtgtttgtctctaaacggtggttccatgagagtgtgatgatagtggtagctcgaggtgataagagtggagaagatggtatccccatgcttctcaagataccacgtctgtttgatccttggggtggttacagtatcatcggatttggggacataatcttaccaggacttatagtggcattttcactaaggtatgattggttggcaaagaagaaccttcgggctggatacttcttgtgggcaatgtctgcctatggtttaggtctcctcatcacatatgtggctttgaacttgatggatgggcatggtcagccagctttgctttatatagtcccatttacactaggcacctttttgtcattgggaaaaaagagaggggagctcaagattttatggacaagaggggaaccagaaaggcattgtcctcatatccaagaggataaccaatcaattgacagccaccattgatgggcacttcagcagcagatttgtaccctcccaagtattagtttatagaagagtgatagggtctcttaggacattatgtaacagttgtaactttgttgtaacagaatttcagccaaatggtatgacagcatagacttaaaagttaaatcagcagctaagacatgagagatatatcacccaattgttctgatattccacgggattcaccaatctgtgtattgtaaccttattttttgtgagatagaagatgaagaatcaatttcctggttgatgatggctttgcattaaggagagtttgatcaaaaaccatgtctttaccaagtaaatgccaagaagcaaagtggcatgcttaggaaactccaatcatacaaggaaggactgttgaaaggctgctaacactgagaagctgctgtttactatatatagccataacttgtgtttgtattattattattaactactgttattattgtagtatacttgtatgaaatttgaacatgaagttagctaaattttaatttctacaagatttttcaaaaaaaactcgagactagtctct

SEQ ID NO: 3695 - DNA, 1515 bp, Glycine max
  misc_feature (1464)..(1465): n is a, c, g, or t
  misc_feature (1475)..(1475): n is a, c, g, or t
ggctcgagctaaattaaataaacaaaataaaaaaaataaagttaaaacttgtgtgtctgttttagtgttttctctctctctccctctccaccccaattcccattgtacgttcttcttcttcttttctttctttccaaaataaaatcttttacccttcacacccccacccctttgggtttctctcctcaattttgcatctggcggcttctcagttctcaccaccatcatggtttcacttggagctacctgtgctctgtgctgttctatgttcatggtgtttgtcactttgagtttggctggggacatagtacaccctgatagtattgctcccagaaggcctggctgtgacaacaactttgtcctggttaaagtccctacttggattgatggtgtggaaagctgtgagtatgttggcgttggtgcaagatttggccctacattagaatcaaaagaaaaacatgctaaccatactagagttgcgatagcggaccctcctgattgttgtagcaagcctaagaataagctcactggcgagatcattttggtgcaccgaggacaatgtagtttcacaaccaaggcaaatatagctgaagaagctggtgcttcagccatcctcattataaattatcgtacagaacttttcaagatggtttgtgaagcgaatgaaactgatgttgatattggaatacctgctgtcatgcttccacaagatgctggtgaaaacttgaaaaatcacatactaaacaattcagtagtgtcggtgcagttgtattctccactgcgtccattggttgatgttgcagaagtgtttttatggcttatggctgtcggtaccattctctgtgcttcttactggtctgcctggactgcaagagagtctgccattgagcaggagaagctattaaaggatgcttcagatgaatacataaatgcagagaatgctggttctagtgcatatgtggaaatcagtactgcagcggcaatatcatttgttgtgattgcttcttgtttcttggttatgctttacaaattaatggcatattggtttgttgaagttctggtggttctattttgcattggtggggttgagggactacaaacttgcttggtggctctgttgtcatgtttcaaatggttccagcatgctgcacaaacatttgttaaagtacccttcttcggtgctgtatcatatctgacagttgctgttactcccttctgcattgtgtttgctgtgctttggggaatttatcgccgtgtatcatttgcttggattggtcaagatattcttggcatcacattgataatcacagttcttcagattgtgcggataccaaatctcaaggttggaactgttcttctcagttgtgccttcctatacgacatcttctgggtgggtttgtctctaaatgggtggttccattgagagtgtgatgataagtggtagcttcgaggtgataggagggnnaaaagaaggnattccctatgctactcaagataccacgtattgtttgatcc

SEQ ID NO: 3696 - DNA, 1216 bp, Glycine max
tttaaatagccccatttacacttggaacctttttgtcatccgcgctccggagaggtgaactcaaggttttatggacaagaggggaaccaaaaataccttgccctcacatccaagagaatcaatcaacaaaccagtaatccccagcaggaatagcatcctaggtgttagtttacaggagacttatagcaaatcttagaagactttgtaacatctgtaactttgtcataaccaaatttcagccaaatgattatagcatgtacttaaaatcgacaccttagacttgagataccccacaactgttggatgttggaagaccccatgccaaactgtttattgtaagaatagatcttgttctaaaatagaagatggactgaggtgaggagattcaagagattccacttcctgattctggctttgccttggggacatgatttttatagttaccttttacaactttacttcaatgaggctctgactaaaataatgcattgaaacttatgaactggaaaatgaagactggagaataaagcaaacggcaaaaagccaaatgacatgcatcgacaactttcaaccaatggagagaagacgggaaaataatgaattgaaacttgtgaactgtgaagttaaagatggctaaattatattttggaagaatactccttgtatgaaattaatgatgtatcaaatattcttgcagtgctgaatcaggctcggttgtcaccacagcttttattccaactggatagctacacacaaaggacttccaaataatctctataaagtttataaaaaatcaggaagattatttggtatattagaattagccccatagtccaaagacatggatctttcatttctcctctccaatctttagatttaattccaaatcattattaatcactgtaaattttttacactagcactcaatcatgtatcttgaagagtattatcacatcttgaaaaggaaaactcttcaatggtttgttaatgcaagattgagtaatagtataatttacacttttttttgtttcagttaaaactacataagtcataaggaacaaaggagcctttaaatcaaaacttaaaaaaagaacaaaccaaaagaaaattcacaagaaaaatataatccacacaagctcagaaccctttttatttctttcctgtacgtacaagagaaagcccccagcaactaatagcatcagagctaaacaccaac

SEQ ID NO: 3697 - DNA, 786 bp, Glycine max
cccacgcgtccgcccacgcgtccgtacggctgcgagaagacgacagaagggggggatagcaaaatcgtttctccaatttaatcaccattgtacaacccaattcccttcgtcgttttcgattaagagagcaatggcacgtaccaagcaaaccgctcgcaagtccaccggaggaaaggctccgaggaagcaattggcaaccaaagccgctcgcaagtcagccccggcgaccggcggagtgaagaagccccaccgcttcaggccaggaacggtggctctgagggagattcgaaagtaccagaagagcaccgaacttctgatccgaaaactcccattccagaggctcgtcagagaaatcgctcaggatttcaaaaccgatctccgctttcagagcagcgccgtttcggctcttcaggaagccgcggaggcttatctcgttggactctttgaggacactaacctctgcgctattcacgctaagcgagttaccattatgcccaaggacattcaactcgctcgcagaatcagaggcgagagagcttaagtttagggtttcgtgtcatttgacattaaaattaggttactgcttattgtaattcgtgttttcttcaaatgcctctttattgtaagattcatcttatttcatcaggtatattcccatatggatctgcacaactgagtttatgttgaaaaacgagataattctctaattttatatatccttcggtgatgatagcaaaaaaaaaaaaaaaagaattctgcagcccggggatcccctaagttctaaac

SEQ ID NO: 3698 - DNA, 1064 bp, Glycine max
cccacgcgtccgcctctccggccgcacccgcgcccgtacggctgcgagaagacgacagaagggggcacagcaaaacaattttcaaactcaattaccattccataacctaaatctcctctttgtttccgagtcagagagcaatggcacgtaccaagcaaaccgctcgcaagtccaccggcggaaaggcgccgaggaagcaattggcgactaaagccgctcgcaagtcagctccggccaccggcggagtgaagaagccccaccgcttcaggcccggaacggtggctctgagggagatcagaaagtaccagaagagcactgaacttctgatccgaaaactcccattccagaggctcgtcagagaaatcgctcaggatttcaaaacagatcttcgtttccagagcagcgctgtttctgcgcttcaggaagccgcagaggcttatctcgttggactcttcgaggacaccaacctctgcgctattcacgccaagagagtcaccattatgcccaaggatattcaacttgctcgcagaatcagaggcgagagagcttaaaattaggtttcattgtgtgatctagaattaaaattaggttactgcttattgtaattcgtatttttcaatcgcctttttgttgtaatattcatcttatttcgaagtatatgctcatatggatctgaacattttaacttatgtcagaaaaaaagataattctctaattcttatgggaaaaaaaaaaaaaaaaaaaaaaaaaaaaaaaaaaactcgagactagttctctctctctggctactgagtttccacactgcataccttaggtcttccgaattcgaagttaatttgcaagatggctaaggaaaaggctcagatcaacattgtggtggttggtcatgtggaccctgaggaggcaaccaccattaacgagctgaagaagcctgttgtggagaaagaagctccagggcatgccatatgagggcatgcacgtacggcctcggaggggaaccagaaaattatgttaacaaaataatctggaaccctaatgtatcagtgtcatcatcagtgtgtagt

SEQ ID NO: 3699 - DNA, 906 bp, Glycine max
tacggctgcgagaagacgacagaaggggggatctagggttgctcaaacctaaaagactaaactcacgggtccatacgttttccttcatccagatctggcagactagtatccgatcctctgtcctctcgaagctttcatcgttcaacatattctcaccatctcagtcatgggcctgctatcttgttttaggtctaccgtcctgagaaaatgttccaaaggaagctctggcatgtcaagattcctgtatacgaacaattttcaacgaaacttgatttcgtctggtggcaatgaatcgtattatgggtattttaacaggagatcatacacttcactttatatgggaactggaactgtgggtgggattacaagtgctagaatcagggtgccaaatgtaggatgtgaaggattcatgtgctcaagtcatctgtcaatcactcaaagaaattcaagattgatccattctactagcaagattgttccaaattctgaaattcagaatataactactgagatggtgaagacaccagaggtctcaagatggatggatcaagtcatccctacaatagccccttgtgatgcagcagaaccatggcaactagggtttcaagatgcagcaacacctataatgcaaggaataatagacttacatcacgatatctttttcttcgtcattcagattggagtttttgtatcatgggtcttgcttcgtgctttatggcatttcaggtctaaaatgaatccaatccctcaaagaattgttcatggaacaacaatcgagattctttggaccatatttcctagtgtcatactaatgttcattgctataccatcgtttgctttgttatactcaatggatgatattgtagtggatccggccattactatcaaagctattggacatcaatg

SEQ ID NO: 3700 - DNA, 909 bp, Glycine max
gagatcgcgccccgcgctgcaaaatcacatttcctttcatttcttcgttatttcctaatcccaatggctcaagcactatcaacttcatcactactactatcacaaaaaacagggtcctacgtcaaaccacagaacaatgtaattgtaccctgcatggcctcttttccatcaaggaaggaatttccaaggctaggaagggtgagagctcaggcttctggtgataacaaagacaactctgtggaagtacaacatgttaacaagggtgaccaaggaaccgcggttgagaagaagccacgtagaactgccatggacatttcaccatttggtatcttggacccgtggtcacccatgaggagcatgcgccagatattggacaccatggaccgagttttcgaagataccatgacattccctggaagaaacataggaggaggggagatccgtgccccttgggacatcaaagatgaagaacatgaaatcagaatgaggtttgacatgccgggtcttgccaaggaagatgttaaggtatcagtggaggatgatatgcttgttataaaaggtggccacaaaagtgaacaagaacatggtggagatgattcttggtcaagcaggacctatagttcctatgatacccgtttaaagctgccggataattgcgagaaggacaaggttaaggcagagttgaaaaatggtgtgctttatatcaccattcctaagaccaaggttgaacgtaaggttattgatgtccaagttcagtgagatatgcttgggctttgtattatgcaacacggttttttaccatgtttttacgtttttaacatatatacacccattataagggttaaatatgttgtattaagcgtagagaagtttaaataaaactgctgttgtataattttctaatgtcaa

SEQ ID NO: 3701 - DNA, 1323 bp, Glycine max
tcgagtcagctacgtaggccccccccccatagcagtagtgagtggagagcgagaggcataacataacataagaccacaaagctgtgttgcgcgttgaagagcgaagaaggaagaagatgtcgggtatgggagatgggtacgtgggcaccgcccaagacgcggtgaggattcgacggttggagaagcagagagaagcggagcgtcgcaaaatccaagagctgaaaaccaagtctgcctccgccaaggaccaacccggtcttctccaattcggttccagcacttccgagattctagagactgcctttaagaaggaaactgtgggtttggtcactagagagcagtatgtagaaaagagggttaatattcagagcaaaattgaggaagaagagaaggagaaacttcagaagcaacaacaagaagaggaggagcttcaattacaaaagcggaaaaagaggaagatcaggggcaattctcgattgtcctttgctgaggatattgacaatgaaccccaagaggacgaaccacatcacaataatctggaggcaaatagattacggtgtggtaagcttggcaaagaccctactgttgaaactagctttctacctgacaggagtgctgaggattcttgttcagtgagcgagaggctgaggagcaagctgagcgtgaaaggctgcgcaaacagtggcttcgtgagcaggagcaaattcgaaatgagcctcttgaaatcacatacagctattgggatggaactggccacaggcgtgtgatccaggtacgcaagggtgacagcataggagagtttcttcgagcagttcaacagcaacttgctcctgaattccgagagattcgaacaacatcagtagaaaatttgttatacgtgaaagaagaccttatcattcctcatcaacatagcttctatgagctaattgtgaacaaagctagaggcaaaagtggaccgctttttcattttgatgtgcatgaggatgtacgaacaattgctgatgccactatagagaaggatgagtctcatgctgggaaggttgtagaaaggcattggtatgaaaagaacaagcatatatttcctgcttcaagatgggagatatatgatccaacgaagaaatgggaacgttatactatccacggggattgatttgaggctgccaaataatttgcattagcatttcctgtattgacatttaatttggtcatgcgtttgtacgccttggtgataattatgcttttgttagtcatttcagtgttctgttattcattacagacaacatggacaattagtcagatctatattacagtggatttcgtgtc

SEQ ID NO: 3702 - DNA, 799 bp, Glycine max
atatatatgtaggctgcgaaagtcgtcacaaggacaaataagttaaggttccacgttagtaattttttggtgtttgaattgaagttaaagggccatggcttcaggatccaaatcagtagcctctatcctcttggcactgaatctagtgctgtacttcattgtgcttgtaattgcttcttgggcagtgaatcatgggattcaaaggtctggcgaaacagcatctgttttgtccattccggctcgcatatttccaatatatttcccaatgggaaacatgacaactggttttttcgtaattttgtctctggttgctggtgttgtgggattcaccacctcactcactggattgcaaaacattttccagtggaatgctcccaacttacatgcagcagccatgtcttcattgactacatgggcactcactctactagccatgggatttgcatgcaaagagattgaacttggctggacagactccaacctgcgcaccttagaaacgatcacgatcattgtaagcgcaacacaactattatgcacgggagttatccatgttggagtttcagaagttgttgcgcagagaatgggaggaagagtatgagtttcagctggtgcaggcttatacgaatactatctttcaggaaaattatcctctatgactgcagaattaattgtaactctttctttgcacagagttgtttcattcattcatgtacgataaaaatatttaattgtaactatatactttagtttcatttgaggaaacttataaatatactttttcacaaaaaaaaaaaaaaaa

SEQ ID NO: 3703 - DNA, 1828 bp, Glycine max
aattcggctcgaggtgggttgcgtgaacgctatgagttgcatcatggagtcaaaatatcagatagtgcacttgtttcagcagcagttcttgcagatcgatacattacagaacgcttcttacctgacaaagccattgatcttgttgatgaagctgctgcaaaactgaagatggagatcacctctaagcctacggaattggatgagatagacagggctatattgaaattggagatggaaaagctctctttgaaaaatgacactgacaaggcatctaaagaaagattaagtaagcttgaaaacgatttgagtttacttaaacagaagcaaaaagaattgacagaacaatgggacagcgaaaaagtttttatgactcggataaggtcaatcaaagaagagattgatagagtcaacctagagatggaagctgctgagcgtgattatgacccgaaccgtgctgctgagcttaagtatggaactttgatgtcccttcagcgccaattagaagaagctgaaaagaacctaagtgacttccgaaactctggacaatctttactccgagaagaggtcactgaccttgatattacagagattgttagcaaatggaccggtataccattatcaaacctccaacaaacagagagagaaaagttagtcttgctggaacaggttcttcacaagagggtggttggtcaggatactgctgtaaaatctgtcgctgatgcaattcgccgttcaagggctggattgtctgatccaaatcggccaattgcaagcttcatgttcatgggtccgactggtgttggcaaaactgagcttgccaaggctttggctggttacttgtttaacactgaaaatgctcttgttagaattgatatgagtgagtacatggagaaacatgctgtttcacgtctagttggagcccctcctggttatgttggttatgaagaaggcggtcagctaactgaagtggtcaggagaagaccctactctgtggtactatttgatgaaatagagaaggcacatcacgatgtcttcaacatcttgttacagttgttggatgacggaaggattactgactctcaaggaaggacggttagcttcacaaattgtgttgtgattatgacttcaaacattggttcccagtacatacttgacactcttcgtagtacacaagatgataaaactgcagtctatgatcagatgaaaagacaagttgttgagttggctaggcaaactttccatccagagttcatgaatcgcattgatgaatatattgttttccagcctctggattccgaacagatcagcaaaatagtggagctccagatggagcgagtgaaaaacaggctcaagcagaagaaaattgatcttcattacacagaaaaagctgttaaacttcttggtgtactgggttttgatccaaattttggagctagaccagttaaaagagtgatacagcaattggttgaaaatgaaattgctatgggagttctaaggggagatttcaaagaagaggactcaatcattgttgatgctgatgtgactctatcaggcaaagaacgttctcctctaaataaactgcttattaagaagttggacagccctgatgcggatgccatggtcgtcaatgattaattttgcctactagcttcagttagataaaagcagagttttaaaaaaaaaatggtaaaactccatagggtacgaacgtagtgctttttttttttgtgtgtaactattgtcttgaggatattgtgtttaaaaataattgttgattcaggttttattcgagactcgggtactttttttttaaaaaaaaaaaaaaaaa

SEQ ID NO: 3704 - DNA, 745 bp, Glycine max
gctcgagctctcaacaaaacccaccgttttctgcgaaaatcaaacccacactcaccactctccaatctcccattctcccctctttctccaactcagcgcaaccgtcacgattgcgcccaaaatctcgatcttcactgcgaggcgtgttttgtgagcacggaatacgaatatggatcaccaagaggatgaaagtaacagcaaacaagacgatgaggaagctgttgctcgccttgaggaaataaaaaaatccattgaggcgaagctggctttacggcaaagcaatttgaatccagaaaggcctgactcaggatttttaaggacattggattctagcattaagcgcaacactgctgttattaagaaactgaagcagattaatgaagaacagcgtgaagctctgatggacgagttgcgaagtgtcaacttaagcaaatttgtcagtgaagccgtggctgctatatgtgatgccaagcttagaagttctgatatacaagctgcagttcagatctgttctttgcttcatcaaaggtacaaggactttgcaccaagcctggttcaagggcttctgaaagtcttctctcctggaaaacctggtgatgaatcagatacagacagaaatttgaaggcaatgaagaagcgcagctctctaaagcttctactggaactcttttttgttggagttattgaaagatggtggcattttttatcaatatcataaaaagatcttaccagtgggggaacagct

SEQ ID NO: 3705 - DNA, 1743 bp, Glycine max
tcagctacgtaggccccccccccttatggttgagcgtttgatccttgatgatcttgtacactgggctgtcaattacaagattgatgggttcagatttgatcttatgggccatataatgaagagcacaatggtgaaagcaaaaactgctctccaatgtttaacaaaagaaaaggatggacttgatggttcaagcatctacatatatggtgaaggatgggactttggtgaagttgccaaaaatggccgtggggtaaatgcttctcagttcaatctcccaggaacacaaattgggagctttaatgaccgaattcgagatgccatacttggtggatctccgtttggccaccctctacaacagggttttgtgactgggctactcttgcagcctaatggccatgaccatggaacagaagctaatgcgaaatccatgcttgctgcatcaatggatcacatccagattggaatggctgcaaacttgaaggattttgtgctaaccaattctgaaggggaagaggtaaaagggtcagaaatattaacatatggtgggacacctgttgcatatgcctcatgccccatagagacaatcaattatgtttctgctcatgacaatgaaaccctatttgacattgtgagcttaaagactccaatggatatcagtgtatctgagagatgcaggataaaccatttggcaaccagtattatagcattatcacagggtataccattttttcattctggagatgagatactccgctcaaaatcactggatcgagattcttacaattctggtgattggttcaacagacttgacttcacatacaatagtaataattggggtgtaggacttcctccacaagagaaaaatgaaaagaactggccactaatcaaaccaagactggcaaacccatccttcaggcctcagaagactgacatccttgctacggtggacaatttcttgaacctgctgtgtataagatactcttcaccacttttccgcttgaagacagctaacactatccaggaacgagtacgctttcacaacactggaccatcatgggtttgtggagtcatagtgatgagcattgaagatggtcacaatggctttcctgggttgtctcagttggatcccatatattcgttcattgtggttgttttcaatgcgagtccaaaagaagtatcatttgttagccctgccctgcaattgagaaatctccagttgcatcccatacaggtatcatcatctgacgaccttgttaagagctcaagatatgaggcatcttctggctgttttgttgtgcctcgaaggacaacagctgtgtttgtggagccaaggaaaacgtgagtcactgcttcaatcaaacattgatttaagccaagaaagaatgtaaaagttgccttgggatactaatggggtgatgatgctagttttggttcatgaggatggattcttttgtgaccttcacacactgaacacgtttggatgttcccaaataatctcctcttaagccagggatggaacctgaaataaacaataagatattagttgcaaagggaacgaatgaaactgaaattaagcaaaaaactttaacttattatagactatagaggtcagactttcagctaaatgtgattgcagtcctgagtcagcatatcttccactcatgtctaatctaaaggattagcaaatgtggaaatgcaaaaaaagcaaattctccataaaatacagttcttgaaagggtgtcc

SEQ ID NO: 3706 - DNA, 1349 bp, Glycine max
tcgagtagctacgtaggccccccccccaagaagtagatgagcgtgatttggtaggcgagtctcgtagccatcgtgattgcaacatcgaaatggaaacgccgaagagatttgaaggtaaggtagccatcgtgactgcttccacacagggaatcggcttagcaatagccgagaggcttggcctcgagggtgcatctgtcgtcatctcttctcgcaaacagcaaaatgttgatgcggccgcggaacaactgagggccaaaggaattcaagtgttgggggttgtttgccatgtttcaagtgctcagcaaaggaagaatttgatcgacaaaactgtccagaagtatggaaagatagatgttgttgtgtccaatgctgctgcaaatccttctgttgatgccatcttgcaaacaaaagactcggtccttgacaagctatgggagataaatgtcaaagccactatacttcttctgaaggacgcagtgcctcacttgcagaagggttcttctgttgttatcatttcctcaattgcaggttttaacccgccaccttctctggctatgtatggagtgaccaaaacagcccttcttggacttactaaagccctggctgctgagatggccccaaacactcgtgtaaactgtgttgctcctggttttgtgccaaccaattttgcttcattcattacaagtaacgatgctgtgaagaaagaactggaagagaagacattacttggaaggcttggtacaacagaagacatgggtgctgcagcagcttttttggcatctgacgatgctgcttatataacaggagagaccattgtagttgctgggggaacgccttccaggttgtagattccactatcaatcttctctgttgtgggccagccccacacattcctgaagctcttgttcgtctgaaattattacatgattgaggattatgtgttactggcatgagattactaggctatgtttgccattactaatgaaataataaaagttatcactttttaagagggggaaaacacacaaagatatgcacaataagagagtaatagggaattacatggtggaaaaagaaaaagtatcaaacacgtgcatttatccgaaagtgccctccctagctccaggtaagtggaaagtggcaactcacgggtatttgtctactactacttgaaatgccgagggaacttttgaagagaaatcttcattgctgtctgcaagagcaatgcgttgtactaatttggtttcagtaactcttttatttttccaagatttagactctgtttgatttggtgttgaattacgttcaacgacaaaaatttctcccaacaattaaaaaaaaaaaaaaaa

SEQ ID NO: 3707 - DNA, 609 bp, Glycine max
aaactaagagacattacagtttgtattattgtagaagagagagggagagagatggagttgagcatgaaagtgttggtgaaagttgcttcgttgcttttcctattgggattcactgcaacagttgttgatgctcgcttcgatccaagttcattcatcactcagtttctccccaatgctgaagccaacaattactatgttaaatccacaacaaaagcgtgctgtaacagctgtccttgcacaaaatcaatccctccacagtgtcgttgttcagatattggagaaacatgtcactctgcatgcaaaacttgtatttgcactcgctcaattcctccacagtgtcattgcagtgacataaccaacttctgttatgaaccttgcaactcctctgaaaccgaagctcactaggaatattgagcatgttccagtgactaacatgtttgacagagtcactaggctttgttttcatctagctagtacttatgatgtatgggaataaataactactgaatgaataaaagctactaggccaagcagtttgttttctacaaattgctggtcgtggtgtttgttttaattttaaaaagtcgtggtgtttgttttaaaaaaaaa

SEQ ID NO: 3708 - DNA, 1835 bp, Glycine max
ggaaaggataaacgaaggaagttgggcctttgaaaatggtttggcactttcctaccgaaagagagagatgggtggggacgtatcgtatggccttatgaggagctacctcacctcacacaccaatagcatatgaagagagagtagaagtgaagataagcacagagagtgtcatctactcacctctactaccataaaaaaagaaaaacaaaaagccttcagagtcgactattcatcctttcttattcttaattaccgtgccttatccacccccaactatatttcagccagccgcggcgacacaacaacgccgacaccctcatttccactaccaactattctctctcgttctctgatttctgaaatccctcacccatggcttcctcttccctctctctctcactctctctcaccctttgccttgtttccactctctgctacgctcacacatcttccctaaccctacctgtgacaaaagaccattcaacacaccaatacctaacaatcctctcttatggcacccctgttgagtctgcaaaatttgtgcttgatctcggaggctcactcctctgggctgattgtgcatccagaaccaccccatcttccaccctcgcccccattttccaccgttcaattcgctgcctcacagcaaagggtcctgaaattgagacccacaggtggctctcgagtcttgcaaatcctatagatcaagatcagccatgtcaaattacagcagagaacagcatcacggggaaaagggtcaccgaaggagagcttgtggaagacctagtgattcatcgttctcacgagcttctcttcacgtgctcgcccacttttcttttgaatggtttagccactgatgctaaaggcattataggtcttgataaatctcgtatttctttctcatcacaagtttttcactcacttaaaatccagagaaaaatcactctttgcctttctcccacttctggtgttattcaatttggaaaaatgacgcataaatcccaaactgaatctgaaattttcagatctcttactttcacaccccttgtcgcaaaccaagacccgacacagacccagtcttcaatcaacgttaattccgtcaaaatcaacggcaaaaaggttgcttttgacacccccttaggtgggggcgcgcagctgagcacggtcgtgccttacaccactctccaaacctcgatctatgataacttcgaaagcgcttatttgaaagccgcttcgtctatggacatgaaaagggtcgatccagtttccccctttgggctttgcttcgaatccaatggcgttggaagctcccaagtggggcccaacgtgccgatcattgatctggtgctgcagagcgagatggtgaagtggagcatatacggaagaaactctatggtgcaggtgagcgacgatgttatgtgcttagggtttgttgatggaggtgagaatcccaggaaccctattgtgattggagggtatcaattggaggatgtgttggtgcagattgattttgatacttccatggtgggattcagtccttcgcttctgacgaagcatgctacttgctctcatttcaaaccctagttttcggtgaatcgtgatgattatagtttattattatccatcccccatagtttttctttagattaagaagagttttgaggagttcaacccgttctgtaataaccccttaaaataataattctttcttttttgctctcccgcggtattatctgtataaactgcttaagtggcctatgttaaatggcgatggcatttttgatggcatttttatttgaaattgaaatacttctccagtaaggaaaatttggttt

SEQ ID NO: 3709 - DNA, 1805 bp, Glycine max
acaactcacatgcctacttagtttatttttttgtgtgtgtttatgaagagagagaagaagtgaagataagcacaaggagtgtcatctagtcagctactaccaaattttcagagtggactattcttcctttattatattcttaattaccgtgccttatccgaccctctcataccaaacccaacccaacccaaccaactatatttccgaccccccgcggccggccaggcacgaccacaccctcaaaaccatttccaactaccaactactctctctatcactctcccatggcttcctcttccctctttctctcactctctctcaccctttgccttgtttcctctctctgctatgctcacaaatcttccttaaccctacctgtgacaaaagacgattcaacccaccaatacctaacaaccctctcttatggcacccctgttgagtctgcaaaattcgtgcttgatctcggaggctcaatcctctgggctgactgtgcatccagaaccaccccatcttccacccttgccccaatcttccaccgttcaattcgctgcctcacggcaaagggtcctgaaattgagacacatagatggctctcgagtctcgcaaatcccatagatcaagatcagccgtgtcaaattcctgcagagaacagcatctcggggaaaagggtcaccgaaggagagcttgtggaagacttagtgattaatcgctctcacgagcttctcttcacttgctcacccactcttctcttgaacggtttagctaccggtgccaaaggcatggtaggtcttgatcgatctcgcacttctttttcgtctcaggtttttcactcacttggaactcagagaaaaatcactctttgtctctcttcctcttctgggattgttcaatttgggaatgtggcgcatgaatcccaacccgggtctgaaattttcagatctcttacttttacaccccttgtcgcgaaccaagaccaaacacagacacacccttccatcaacgttaactccgtcaaaatcaacggcaaaaaggtttctttcgacacccccttgggtgggggtgctcagctgagcacggtggtgccttacaccactctccaaacctcgatctatgcaaacttcgaaagcgcttatttgaaagccgcttcgtctatgagcatgaaaagggtcgatccagtttccccctttgggctctgcttcgaatccaacggcgttggaagctcccaagtggggcccaacgtgccggtcattgatctggtcctgcagagcgagatggtgaagtggagcatacacggaagaaactccatggtgcaggtgaacgacgatgttatgtgcttagggtttgttgatggaggtgagaatccgaggaaccctattgtgattggagggtatcaattggaggatgtgttggtgcagattgattttgatacttccatggtgggattcagtccttcgcttctgacgaagcatgctacttgctctcatttcaaaccctagttttcggtgaatcgtgatgattatagtttattattatccataccacatagtttttctttagattaagaagagttttgaggagtttaacacgttctgtaataacccttttattttttttttctttcttttttgctctcctgcggtattatctgtataaactgcttaagtggcctatgttaaatggcgatggcatttttgatggcatttttatttgaaattgaaatacttctccagtaaggaaaatttggttgagttatgacttgtgacttgtgagtattgccccctttgatgtaagcatatgattggctg

SEQ ID NO: 3710 - DNA, 1309 bp, Glycine max
tccgggccgcccccccctccgtacggctgcgagaagacgacagaagggaacccagatgtgtgttcgcatcaatactatgcagcgcattcgcatggaattaggggttttggaaaagaggatagttgccaatctcagcagttctagatccactaatgcggatatagcaaatggggtgagcttgaagttcaagctttccgcatctgctgctgtggaaggcatccatcaactctgcgagtgcatagcatacaaaatcgttttccatgaactctggcatgttatttgggatggcctttatgttggagaagttgcatctgctaggattgagccttttctccaggagcttgagcaatacttggagattgtatcatctacagtgcatgataaagttagaacacgtgtaattgttaaagtaatgcaggcttcttttgatgggtttctgttggttttgttagccggaggtccatcacgtgctttctctctgcaagattctggtattatagaggaagatttcaagtttctgactggcttgttctggtccaatggagatggattgccagctgaattgatagaaaagcattctaccactgtcaaaggtgtacttcccttgtttcgtgctgatactgagcacataattcagcagttcagtcaacttactatggaaatgtacggttctacagccaaatcccggcttccattgcctccaacagcagatcaatggagtccaacagaaccgaacacacttttgcgagtcttgtgtaataggaatgatgaggcagctgcaaagttccttaagaagaattacaacttacctaagaagctctaacaattgacaagtaaccactactctgatatgccacgcctttccacccaatataaatttgaagtttgttcgttatgtgttgtgaaaccctggcctagtttttgaggatgtgattcaggtaaaggtggtacggtatgcattatacacttactgatcaactctaggaaatatgatgctttatcatcaataatgctcaaaagtataaattgtacaggagtgattcttttgcctttgctaatttgttggcttgttttcagctcgtgccaaaacacaatcactgacaccatggtaatacagagaagtatttacaattagttattatttgtttttataatttcaaaattaatggtctatttatttgtgctgcattgtaatttccccccacaaactacttcagcttgatcttgatcttgtaaatgaaatgaaattatttatttgtgcgaaaaaaaaaaaaaaaaaaaaaaaaaaaaaagcggcccctctggggga

SEQ ID NO: 3711 - DNA, 941 bp, Glycine max
  misc_feature (914)..(914): n is a, c, g, or t
  misc_feature (934)..(940): n is a, c, g, or t
ccctttcgtccgtacggctgcgagaagacgacagttcggggagtcgagaaacggcgcactccgtctgttcctcaccgtcaccggcgcgcgcaccctctgttccagcgactcctaattaagttgggaaataaaaaagacttcaaatttcccagatggctgcagcctttgcttccagatgctctcgtgtgggccgttctctgtctggtggattaagcaacagttcccctggtttatttacctcatcacatggcatgacatgcaacaatttgttttctcagcaacaacgtaccttcatacagatgaggactgttctcaaggttgtcgataactcaggtgctaaaaaggtgatgtgcatacaggcattgaaagggaagaaaggggcaagattaggtgacacaataatagcatctgtgaaggaagcacatcctaatggaaaagtgaagaaagggaaggttgtatatggggtagttgtgcgtgcagcaatgcaaaagggacgttgtgatggcagtgaggtcaagtttgatgataatgctgtggtgcttgttgacaagcaaggacaacctattggaaccagagtttttggaccagtgcctcatgagctaaggcaaaagaagcatgtcaagattcttaccttggcagggcacattgcataaatgagacaaaagggttgtccttaaattttgttatgaattccaatgtcacatctaccatttttatatttggatattttagtgtgatgtgcaagttttagtactttatcagtttatgaggagtaaaacaggtgtagaaggcttctacttgaataactagaatttgatttggtttctagcctaaaaatgaactagagacacgaaagtgatgtgtgtttcatatgtaacatatcaacttatttatgattatgatttttttataanaaaaaaaaaaaaaaaaaaannnnnnna

SEQ ID NO: 3712 - DNA, 1696 bp, Glycine max
  misc_feature (11)..(11): n is a, c, g, or t
aggctgcgagnagacgacagaaggggaatgatcagtggtgtctcaactcctggacgaggaaactgacgtagcttgtatcgacctttgtgaattgatggagattccattttcttcacgacaaactttcacaaaccttattaaatatcatcactttctcccttcccttcccttctttctcagctttgatttagagagacaaagagagcgaaagatgttgcagtgcatttttcttctgtcagattccggagaggtaatgctagagaaacagcttagtgggcaccgcgtagatcgctccatatgtgcctggttctgggaccaagccatttctcaacctgattccttcaagcaacaaccagttattgcttctcctacccattatctattccaagtttttcgcgagggaatcacctttttggcctgcactcaagtcgaaatgccgccattgatggccattgagttcctttgtagggtagctgatgttctcaatgattatcttggggggttgaatgaagacttgatcaaagacaactttatcattgtatatgagctgctggatgagatgatagacaatggcttccctctaactacggaacctaatatcctgcaagagatgatagctccaccgaatattgttagcaaagtcagtgttgtgactggcagcagctccaatgtgagtgacacccttccaggtgctactgcgtctcttgttccctggagaacggcagacacaaagtatgccaacaatgaagtttatgtagatcttgttgaagaaatggatgcaacaataaacagggatggagttctggtgaaatgtgagatcaatggtgaggttcaagtgaattcccatatcacaggtcttcctgatttgactctttcatttgcaaatccttcaatccttgatgatgtgaggttccatccctgtgttagatatcggccctgggaatccaatcaaattctttcattcgtgcctcctgatggacgatttaagcttatgagttacagagttggaaaattgaagaacaccccaatatatgttaagccacaattcacttcagatggtggaagatgccgtgttagtgtattggttggcataagaaatgatcctggaaagacaattgataatgttactgtgcagtttcaacttccttcttgcatcttatcagctgatctgagttcaaattatggaatagtaaacatccttgctaacaagatatgctcttggtccattggtcggatcccaaaggataaggccccttcaatgtcgggaacattggtgctggagactggattggagcgtcttcatgtctttcccacatttcaagtgggttttaggattatgggtgttgccctctctggtctgcaaatagataaactagatctaaagaccgtaccttaccgtttttataaaggttttcgagctcttactcgggcaggggaatttgaagtcaggtcataattttgtatttaccattgagtgatctaagacttgtaatgattctggacatgaaattttgttgcatgtacccggctagtttcattgtaaagagttgatagtgttctcttcagatttcaaattattttctttttagtagtgaaatttgtctcggctatttctggatttatgagagaatcgcacgaagttgtattttgaatctgatttctttcattaacggttgatattgttgagaatgaaaaa

SEQ ID NO: 3713 - DNA, 2406 bp, Glycine max
ccacgcgtccgcaaatgttggagccttttgtgcatctgttttgaagcaagccattcaataatataatgatgattcttcatgttaaatctttgcccttctgattaaccttgcaacttcgagaaatttcaaccacctctctctcccaaaatctcagagtgtgctgcttcagtgtctggtatcaaagatggcaacattgactgcttcaagtaacttagtctctagaaattctcatgtccatcatggaccaacaactgcttcatatgagtctaaagcagtagcaatgggacttagatctctaaagcagacaaatactcatagtggacttagaatttttaacccggtggatgagctacttaacagaaccccaattaaaaccaatgcaatgcaagctatgaggaagggacctcaaggcaagaatgcctggcctaaaggtataatcacatgtggcatgactttcataattataggaacggaggtggctccatggtgcaaaactggtgggttaggagatgttcttggaggtctaccaccagcattggcaggtttcgggcatcgagtaatgactattgtgccacgctatgaccagtacaaagatgcatgggatacaggtgttgtaattgaggtgaaagtaggagatagaacagaaaaggttcgcttcttccattgctataagaggggagttgatcgtgtctttgtggatcacccttggtttcttgaaaaggtctggggcaaaactggacaaaaactttatggaccaactacaggagatgattacgaagacaaccaactgcgttttagcctcttttgccaggctgctttggaagccccaagggttctgagtcttaattccagtaaatatttctctggaccatatggtgaagatgtcattttcgtcgccaatgattggcacactgcccttatcccctgctacttgaaaagtatgtaccagccaaggggcatctatatgaatgcccgggttgttttttgtatccacaacattgcttaccaaggaagatttgcattcgccgacttctcacttctaaatctcccagaccaatttaagagctcctttgactttattgatgggcatgttaaaccagtggttggaaggaaaatcaattggttgaaagctggacttatagaatcatggtttgtgataactgttagcccaaactatgctaaagaactggtgtcaggtccagacaagggagtggaattggacaacatccttcgcaaaattgatgatgatggtcgtttggttggaattgtgaatggcatggatgttcaggagtggaatccaaccactgacaaatatatagctgtcaaatatgatgtttcaacagtattggaagcaaaggctcttctgaaagaagccctccaagcagaagttggattgccagtcgacagaaatattcctctcattggtttcattggtaggcttgaagagcaaaaaggttctgatattcttgcagaagccattccccaatttatcaagcagaatgttcagttggtagccctaggaacaggaaaaaaacaaatggaaaagcagcttgaggaacttgaaatatcataccctgataaggccagaggagtggcaaaattcaatgttcccctagcccacatgataatagctggagctgattttatattggttcctagcagatttgagccttgtggtctcattcagttacaagctatgcgctatggatctgtaccaattgttgcctcaacaggtggattagttgacactgtcaaagaaggcttcactggatttcagatgggtgccttcagtgttgaatgtgatgctgtggatccagctgatgtggatgctatagcaaagactgtcaaaagggcccttgcagtctatggaactccagcttttacagaaataataaagaactgcatggctcaagatctttcctggaaggggcctgctaagaagtgggaggaagtgctgctaagcctgggagttcctggcagtgaacctggaagtgatggagaagaaattgctccacaggcaaaggaaaatgtggcaacaccataataatgagaacaaagatgtgagggaatcttagtctcatgaagttcccccagctccttgcttcttattaatattatgttttatccttcttccaatttttgttttcttctaaatatattatagaaatgtacatggacacggaaattacactattcaaatcagtgtagtgagtgcatgtcttcaagattagcataaattaaagcgtttcttaatagcctagatatgacacaggctatgttgggcaaacaaggagttgtgctgtatatccaacttgtactgctttgtgcttattgtatctgcatgtttggctccaaaaggtgcgtttataaaacgtaattttacccctcaaaaaaaaaaaaaaaaaa

SEQ ID NO: 3714 - DNA, 1545 bp, Glycine max
ttgacgcgtgggcggacgcgtgggcggacgcgtgggtttttgttgccaatgattggcacactgcccttatcccctgctacttgaaaagtatgtaccagtcaaggggcatctatacgaatgcccgggttgttttttgtatccacaacattgcttaccaaggaagatttgcattcgccgacttctcacttctaaatctcccagaccaatttaagagctcctttgactttattgatgggcatgttaaaccagtggttggaaggaaaatcaattggttgaaagctggacttatagaatcatggtttgtgataaccgttagtccaaactatgctaaagaactggtgtcaggtccagacaaaggagtggaattggacaacatcattcgcaaaattgatgatgatggtcgcttggttggaattgtgaatggcatggatgttcaggagtggaatccaaccactgacaaatatatagctgtcaaatatgatgtttcaacagtattggaagcaaaggctcttctgaaagaagccctccaagcagaagttggattgccagtcgacagaaatattcctctcattggtttcattggtaggcttgaagagccaaaaggttctgatattcttgcagaagccattccccaatttatcaagcagaatgttcagttggtagccctaggaacaggaaaaaaacaaatggaaaagcagcttgaggaacttgaaatatcataccctgataaggccagaggagtggcaaaattcaatgttcccctagcccacatgataatagctggagctgattttatattggttcctagcagatttgagccttgtggtctcattcagttacaagctatgcgctatggatctgtaccaattgttgcctcaacaggtggattagttgacactgtcaaagaaggcttcactggatttcagatgggtgccttcaatgttgaatgtgatgctgtggatccggctgatgtggatgctatatcaaagactgtcaaaagggcccttgcagtctatggaactccagcttttacagaaattatcaagaactgcatggctcaagatctttcatggaaggggcctgctaaggagtgggaggaagtgctgctaagcttgggagttcctggcagtgaacctggaagtgatggagaagaaattgctccacaggcaaaggaaaatgtggcaacaccataataataagaacaaagatgtgagggaagcctctcctagtctgagtctcgtgaagttctcccagccccttgcttgttattaatattatgttttatatccttcttccaaatttttgttttcttctaaatagattatagaaatgtacatggacacggaaattacactattcgaatcagtgtaatgagtgcaggtctttcaagattagcataaattaaagcgtttcttaatagtctagatatgacacaggttcccaggctatatttggctccaaaaggtgggtttttttttttatataattttattttgatcctgttcatgtctcgaatctaagacaatattaaacatgggttatatc

SEQ ID NO: 3715 - DNA, 1448 bp, Glycine max
gaggttagcttttctgagtcgcagcatcagcagtagcatggaatccgaatccaagaacgacacccaagtcgctccggccttaatcgccgttcaccccgaccaatcctccgtcgccgtcgcagtgggcccgcacctccgggtcttcgacctccttagcggttctgcagcttctttaaccgacgactctgatggcgccgtcccgttccacaaggacaacatcagagccattcgcttcggcgcaaaaggaaaactcttcgtgtccgcaggtgacgataaaaccctcaaggtctggtcaacacagtcctggcgttgcatcaccaccgtgtcctccgagaagagagtaactgcagtagcaatcagcgacgacggaacattcgtgtgcttcgccgacaaattcggcgttgtttgggttgtggatctcgatcctccgttacacgatgataagaaaccggcaccgcttctttctcactattgcagtatcatcactagcttggaattttcaccggatggtcgctatattttaagcgcagatcgtgatttcaaaattcgagttactaattttcccaagaagcctttaaatggagctcaacagatacaaagtttctgtctcggtcatacagagtttgtttcctgccttgccttcattcaggctcaggaatgccctcaaggctttcttctatctggcagtggtgattccacagttcgattgtggaatattgactctggagcacttcttgatacttgcgaggttgcaattaagggtcttttagagtctaatggtaaggccgaggagcgtggccatgctgttactgatttatgtaccgtactggatggtttgcttgttgcagtggccattcagagcttgcaaggaatagtattgttgagttgcaatgtttctgcacaaactctttccgttgccaaggtggtttctgttgctggagaggcctttgtccctacctgcttggggagcagcccatctatagggaaattgtggatggttacaggtgtctctggtctacctggttttaattatccctctttggcttgtgtgcgagtaatttccagtattgatgttgagaaagagccagttgttctgggagatgataacattcctgggggagaaaaactactagaaacgttgcaaggatctgcatccgttgatgacaatgcttttctagcagcagctgaagcagtcaaaacagcaatgtgcaacctattgataaaaaaacaatacccttcagagaatagagaatataggaagaaaagcagaaatgatagaaaactcaagggttagttagtattttatttatttttgttttattaatgtatgaagcagcttagaacgattttcttgaatcacaagtttccaaagactatttttgacaaaaaaaaaaaaaaaattattttctgataaactgtgaatctgaaatattaaaatcagttcgcca

SEQ ID NO: 3716 - DNA, 1999 bp, Glycine max
  misc_feature (1994)..(1994): n is a, c, g, or t
aattcggctcgagaatctaaccaatactataataatgctttgctttgttttgctacccctcctcctcctcctcctcctctcatagcctctctccatcaaatgatcaatcacttaacagctgcctcccactgcccgtacatcttgtttctctcctttgtgggaattcactgtgtctagatgctactaacacatttttaaggagcatcattcatcattgtttttgtgttcaatgcggataagtgctttaactaaccagctgtgaaggcttgtcggttgtgtagtagtagtttacaactttacatacataagtgataagtccttcactgaaagaaagcactgcattaaggccaagtcaccactctcctcttccattggtggatctttttttttctctcttttaatagggaaaccattggtgtgtgtttcagctttgctgacccttctgttgtttctgccaatctctgttagtatttagacccttttgatatacgaagccttcaattacaatgctttacttcctcatatctttcgtctcctttctcatcctttccaagtctttcaccagcaggcctttctcatcaggggagagagggatcaaaccagggtcaattgggttttgggggagtctttcaagttggttagtttctaggctcaagaaaggaagcacaacaggcaccaccccttttagtttttttcagttttctcttggcatgttattgaaaaagaatagtttagtgtctaaggtggagaatgaggaggaggaggggaatgtttctctcttggatttgcctgatttgccattggaatgcatccttgagcacctttcaccagctgaattatgcagggtggcaacagtgtgcacatctctgagggatagatgtaggagtgatcatttatggaagaaacacatggagaggaaatggggtaaggtgtttggtgatgctgcttataggcaatggaaatggcatgtagcttccaagaacagagaaaaaatctcctccaaccagcacaatcagaaaggaatatttgctttccttcgtggtggttttctccccttcatatggatcaaagcaaaatcagaaaagggcacagagtcaagtagctcattaccagaagattcaatagcagctttatatctttctcttgaaagtggcaaattttggttccctgctcaagtctataaccgtgagaatggtcatgctgggttcatgctctcatgttatgatgcccaactatgctatgattctcgatccgacacttttctggcaaggtactcgcctcatgggagatggacaactgaggaaaacatacaatgggaccggctaagagtgccaccaattgctacttctccacatgctcttcacatctctgactgtttggatgacttgagacctggagatcacattgagattcagtggagaagaaacaaagaatttccttatggttggtggtatggtgtcattggtcatttggaacaatgtcaaggacatgggaaccattgccattgtcactataatgatatagtgattttggagttcacacagtacactgctgggtccagatggagacaaaccgtgataaacagaaagcatcatatagaaaaaggcaatgaaatagatggtttttatggaggaatcaggaagctgcatagcaaggaagaaattgcaaggtggaagaacctctggccaactaaaattgtgatacatgattgacttgattagaatttttgtaaattaagcagtcacccttcctaaaatgtgaaggattacttttgtcacagaacgatgtcattcctaacaataggtataaacttggaaagagtttatggaagaattttcagaggctgtaacatctgtagcacgacataacaaatagtggatatgttgcagctttcttatacgtgtctatatataattttatagaagaacattggtgcatagtgcaaaaaaaaaaaaagcttatcaaccgggcggaccctcgagggggggcccggntaccc

SEQ ID NO: 3717 - DNA, 2180 bp, Glycine max
cgatttgacgcttggtgagttgcttaagtataagtctgaggaaggggtgagagtgttgttgctggtttgggatgataaaacttcgcatgataaggttttcctcaagacggctggtgtgatggggactcatgatgaggaaaccaggaagttttttaagcattcttctgttatgtgtgttctgtcgcctcggtatgccagcaataaaatgagcttcttgaagcaacaggttgttcccgcggtcttcacacaccaccaaaaatgtgtgattgtggacacacaggctgctggtaataaccggaagataactgcttttataggaggtcttgatctatgtgatggtcgctatgacacacccgagcatcgtctgtttcgtaatcttgacgatgtatttgatggcgatttccacaatcctacatttcctgctggaacaagagttcccagacaaccttggcatgatttgcactgcagaatagatggacctgctgcatatgatgttcttattaattttgagcagcgatggagaaaagcaactaagtggaaagagtttgcaatccttttcaaaaaaacctctcaatggcatgatgatgctttaataagaatagaacgcatctcatggatattaagtccttctggtgctgctaccttaaaggataaatcggattattatactgttccagaggatgaccctttagtgtgggtttctagtgaagacgatcctgaaaactggcatgttcagatcttccgatccattgactcaggatccctgaaaggatttcccaaacgtgttgatgttgctctgtcccaggttcattaactagtgttttacttgcttgttcatcctatttcttctgtacagaaaactcaaaatatgttgagtgaactctgtactagcttgcaaaccaaacctagatattgagtttagaatcttatacattgaattgattagaatcatatcctgcactttctagttaacataattttggatgcagaatcttatctgtgctaaaaatttggttatagtcagctgcgttcgccccccccccattcaagcgatcagatctgctcaacactttatttatattgaaaaccaatacttcattggatcatcgtatgcatggccagcttataaagatgcaggggctgataatctcatcccaatggaattggcactgaaaattgctagtaaaattagagctaaggagagatttgctgtctacattgttttaccaatgtggccagaaggtgatcctaaaactggggctatgcaagaaatcctcttttggcagggccaaacgatgcaaatgatgtatgatgcagttgctagagaattgaaatcaatgcagcttactgatgtgcacccacaagattacctcaatttttattgccttggtaatcgggaacactttaatgaagatagttcaagcacaaatggtgcacaggtctcaacagcatataaatatcgccgttttatgatttatgtgcatgctaaagggatgatcgtcgatgatgagtatgttataattggatctgctaatataaaccaaagatctatggctggtactaaagatactgagatagctatgggtgcatatcaaccccattacacgtggtcagcaaagaaaagacatccacatggccagatttatggttacagaatgtcactttggggagagcatcttggcatgttagatgaaacttttgaagaaccagagagattggagtgtgtgcataaagtgaataaaattgcagacaacaattggaaattattcgcttctgaagatttctcacttttgcagggacatcttcttaagtatcctgtacaggtagattccgatgggaagattagatccctacctgactgtgagaatttccccgatgccgggggtaagatactgggggctcactccacgacaattccagatatcctaacaacttaaactcctgaattcatgtcgttgaagatttgtaaagattgtgatttgttgcctgccccttcctgagaaagaggacagaaaaagaagttgggggtaaagttatgtagctttctgtacttaaaaatgattgttcagatcacttgtaaatctttcacacagaattgattcatattttgaaaggatcaccagtttatagatatccgttaccctgtcctcctttatttggtcaaaaaaaaaattaaaaaa

SEQ ID NO: 3718 - DNA, 1178 bp, Glycine max
gtaagctcggaattcggctcgagggaagaggtggatgcacttccggctatatatgctactgaaagtattagattcaaatatcatgttgtttgagatttgaatctaatactttcaatcgcatgttgggaaaagataaaactgccacgtccttggaagaggtggatgcacttccggctatatatgctactgtgttaaaattctcgtcatctgcgccatatgggtcaattccatcctatcgtataccttttcttcttggtgaaccttacaataaagattctgcatctcaagatgcctccctaagtattgttcctgttgatgttggaaatgattcccaggaagaggaaaaatatagagctattgttgagattgatttggagcccagggaacccacaccaggtatagttgatgttcacattgaaacaaatgcagaaaatagtcaaatcatccaaggtcaacttcaaggaatcacagtaggcatagaagacatgtttctcaaggctattgtcccaacagacatcccagaagatgaaatacctcgatacaactttgacttgttcaatactttatgggaggcatgtggctcatcctccagcactggccgggagacatttcagttgaaaggaggcaaagggattgctgccatcagtggaactcaatcagtcaagcttcttgatgtccctgcaacctctttgatccaggcaactgagcgccatttggcacgctttgtcgtaggtgtgagtggggagccacttattgatgccatatgggaagggggaatcattcaaaatgtcatttgggaagatgcttctcctgatgctacttctgttgctaatcatgatacgggtccactccgtcttacttacaatgatgaagagtatgagaagggggctattagcaatagtagaaaaagaaacctgggttgttttcttgttctaatatttcttccaccgcggttccatctccttttccaaatggaagttggtgatgtttcaactttagttggtattcgtacagatcattggccgagcttggcctacattgatgattatttagaagctttgtatctgtcataagagctttcgtttcccctacattgatgcctgtagaaagatgaataatcctcaatcagtttatcgaaacatatgtcctttcttttcaaaaaaaaaaaaaacccaccc

SEQ ID NO: 3719 - DNA, 1326 bp, Glycine max
ttttttttttttttttaaaataaaaagtggaaatgaacgaaaatctttatctggaaaataaaaggtcgatattttacattttcgagaagaaaaaagaatccccctcttgaaatacgcacaagacaagacaaccctaaacataacataaactgaaaacaatagacatcactattacaataaaaaaaaaaaaaaaattaaaacaagagaagacgtgggtgttgtgctacaactcaagatcaatacatgatcaacatttcattgtcagcggaagccatgattggtattccattccaagcataatccatgaagccacaatcattgaacaactgagtggtcgtctcctgtgcctcatcgaacatcatcaagcagttgttgttggtggagttaatgaaacttatcatttcgttcagagagttcaatctgttgctcagttcccccatttgagccctcagaatcgcgttctcagcttccacgttgaggtacatctgcgtcgtgatgcttatgtttgtgttgatttgtgcgttctcctttttaagctgatccaattgggcactcagaccttccaggtgctgctgtttccttatcctcgatctacgtgccgattccctattggacaacattctcttcctcttcctctgttccatgatgtctctgtctccttcagaaccagagttttgaagagaactggaaccagatgaataggttccacttccaccaggagaagccatgcagtagtctgctatttgaacaataataaccctaatctgctagctaggtttaatgattgaatttgaaaaaagaacactggtacgtactatgtttatactatgtacgaggttaatttatttagttcatgagaaaacgtagaaccagtggaggaaaacaacagagaaagattgcaccaagtgtgtcctgcgtcttagggaagagtttatggtgaagccagagaggaggatctcggagatcactggagaagacatttgtgttgtctctcaatcattcataactgcataacatgtaagtatgaacaaaaattataacaatccaattcaagagaaaaagaatcaaactttgagaggaacaaggtaattgatgatatgtgggataagaaggtttctgtgaaggagataattatagagggaagaaaaaatctagaggttggaaaagggtgtcaaagactatgggcaggaagaagaacttttcaattctagaggcaacagagaagaagaagaagatgatgataagaaggaatatgcaaagagattggatagattttgaccaatttttaggaggaggatagattgagaaggggaagaggttttgaat

SEQ ID NO: 3720 - DNA, 753 bp, Glycine max
tccccacgcgtccgtacggctgcgagaagacgacagaagggggaaataaaccaacatcaaaccaagccattttttcttctcccttgtagcaatgaaacaccactccttgtcatttaaatggcttcttctgattttcctcacacactcaacccttctcaccgcaacacactcgttgacaattccaaggatgagtccaattcctgaatgggaaacaacactacacaaccaccctgcaattaatacagaggaagtgaaaacattttacttcaaacaggttctggatcacttcaactacaggccagaaagctacacaacgtttcaacaaagatatctaatcaatttcaagtactggggtggtgccaattctagtgctcccatatttgcatactttggtgctgaatcaccaattgataactcccctaatggcgtgggatttttaactgataacgctgcttccttcaatgccctcttggtatacatagagcaccggtattatgggaaatcagtgccatttggatccagggaagaagcattgaagaatgcaagcactattgggtatttcaactcagctcaagccttggcagattatgcatcaatactcaaacatgtgaagaagacattacacgccaaaaattccccaatgattgtaattggaggatcatacggtggaatgcttgcttcatgggttaggctcaaatatccccacctggcgattggtgcccctggcctcatcagctccaatcctatactttg

SEQ ID NO: 3721 - DNA, 1724 bp, Glycine max
aattcggcaccaggtcacgaacctgccatcgcattcccctgctgtaccccccccgccttcccccgtccacccctttcagatacgacggtgaatctctctctctctctccaacattttttgtgcaaatcccttttcaccaatccctgcatttgcgataccatgttccccttgaatcgcatagaccgacccaccaaacctaactccaaaaaggcctaatttttgcactcgttacagctacccaatagctttttgcaatctgggtcgaacccatttcgatttgtgctcgctggaatcttatggtggagaagcatggaggaaattgaaggggtgaattgttgcagtgaaagtgaaagtaggagctccagtgagactcgacctcccaatcccaacccaccttcatatcgccaatgcaaacttgttcgccacgcttccctcatgaaaacaaagttgtctgatgtatctgctgagccggggcatgttactgaagattgtcagtctgatttctttccaacgcttcgttctggagcttgcgctgatattggattccggtctaatatggaagatgtatatgtttgtgctgacaattttatggtggattatggactcaagaaccatatagatggacccagtgctttctatggggtatttgatggacatggtggaaagcatgctgctgactttgcttgtcatcatctgccaaagttcattgttgatgacgaagatttccctagagatattgaaaggatagttgcttcagcatttctgcaaacagacaatgcctttgcagaagcttgctctctggatgctgcacttgcatctggcaccactgcattagctacacttgttataggaaggttgctggtggtggcaaatgctggagattgtcgagctgtgctgtgccgtcgtggaaaagcaattgaaatgtcaagagatcataaaccgggttgcaataaagagaagaagcgtattgaggcatctggggggtatgtctatgatggatatctcaacggacaacttaatgttgctcgtgcacttggtgactggcacatggaaggaatgaagagcaaagacggtggaccactgactgcagaacctgaacttatgactacaaaactgaccaccgaggatgaatttctcatcataggttgtgatgggatttgggatgtatttaggagccaaaatgcagtggattttgctcggcgcaggcttcaggagcataatgacccggccatgtgtagtaaggatctggttgatgaggctttaaagagaaaaagtggagacaatttggctgcagttgtggtttgcttccagcagcaacctcctcctaacttggtggcaccacgctctagagtgcaacggagcttctctgctgaaggtttgaaggagttgcaaagcttcctggacagcttgagtaattgacttagtgcaactcctgcttcaattttctttttgagaattaagattcatttgtaattgtaggtgtaggctgagagaaaactttgactgtaacatatgcggcatctagtcgacatttaactttgcatatttagaattaccgtcattgctttatttgttagatttttgcataaacaaaaccaatcatacatagcttcagggcttgtgtggttctcatttctgactatgagccgtaaggggcacttccttgcggttttgcctgattaatgatgattgctcttttctttaaaaaaaaaaaaaaaaatttt

SEQ ID NO: 3722 - DNA, 2501 bp, Glycine max
  misc_feature (2355)..(2355): n is a, c, g, or t
cggtctcagctacgtaggccccccccccgttccccctcctcttcttctacttttcattcttctctctctctaaaccacgcctagagagagaacctcgccgccggcacccctccggcgatgacatgaccgccggttccctcatcccttcctagacctttgatgcgccgatcgaatgcccgcactcgcagcgccgcctccaatctcaacaacaacaacgaaacaatggatccgatcaaaaccaaaacccgctccaccaacctcttctctcgtaaccctaagccctcgcaatcgaggtccctccgttccgtaatcctgatctccctctctctctccttcctcttcctcgtttcctactacgctttctcctcgccgatggcgaatttccggtaccggatcatcgtcgacggcgggagcaccggcacgcgcgtgcacgtgtttaaatacaggtcggggagatcgctggagttcgggagggatggtttgaagtcgatgcgcgtgaacccggggctgtcggcgttcgcggaggatccgcagggcgcgggggggtcagtggcggagttggcggaattcgcgaagcggtggatcccgagggagagctggggggagacggagataaggctgatggccacggcggggctgaggatgctggacgcggcggcgcaggagaggattctggcgtcgtgcaggaaggtgctgcgtgactccgggttcaagtttagggacgaatgggcttctgttatcacaggttctgatgaaggaatgtatgcttgggttgttgctaattatgcacttggcactcttggaggtgatcctttggaaactactgggattattgaacttggtggtgcttctgctcaggtaacctttgtatcaagagaagtggtgctgccttcattctcgcgaactgttaaatttgcaaataccacttacaacctttacagccacagctttcttcattttggcctgaatgctgctcacgactcatggaaagaagcgcttgtattgggagaatttaacttggcttctcaatctcttcaagaagggttgcggatagatccttgtactcctacaggatactcttataatgtcgagtcatggaagttccctcctagcacagagagtgaaaaaaaacatcagtccattgtccaaactaggggaaacttttcagagtgcagatctgcagcacttacgctgctacagaaagggaaagaatcatgttcctatcagcattgtgacataggatcaactttcataccaaagcttcaggggaaatttttggccacggaaaatttcttttacacatcaaagtttttcggattgaggtcaagggcctatctgtccaagttgatgagtgttgggcaagaattctgtggagaggattggttaaggttgaagaaaaaatatgtctcccatgatgaggacgatttacttcgttattgtttctcttcagcatacattgttgctttgcttcacgacagtctgggaattgctttggatgatgagagggtcaaggttgctaatcaggtgggaagtattccgcttgattgggctttgggagcttttattctgcaaacagcagctgatgcagatataccgaaccataactggattggcaccattttcagcgatgaatcacataccctcctctcaattattggaatttttataatattgttaacggcatggtctatatctaggtggaggaaacctcagttgaagacaatatacgatctagaaaaaggacgatatattatcacgcgagttggtagataatacttgatggtagaggagatcatggttcttggtttactcatgtggaggcactgctgtgattatgatgaaaatatttatcctttaaaactcgatggccacatcatactattgaaggccacgccatcgggggctcagattgtaaatcattggattttggatgcagtatgtggagttactcttgccgaggaattagtgtagagtagcatgtttttgtgttgtttactggaatccaggaattgagtgttataccaatcgctttactggtttcagataacagtaaggccagaagtggagcaggtcagcctaggaattgttgccagggggaactagtctagatgctgcatccttcaacagaaaacaccttgttatgtggtttttgtaacaaacactgcataagaaattactcaattgatgcttaccaattgctacatacaaaacgaaatcttcattccctgcctgggaagctagttttgcagaagcaaattatatagtacatgatttttttcaccttccttcgaagtttaataattagataagatacagtgatcacatcatatctcattagtctggggggtaagcaanctgatataatgcttcgtataccgaaatacacgttatggtatacttcatccgttacatagttgattaaactatgttgactaagaaaatttatttaggtgtttagcattaactttgtttttgggtgaaaaaaaaaaaaaaagaaaccc

SEQ ID NO: 3723 - DNA, 1854 bp, Glycine max
attttaactcaaaacatagaattgttgaaggaacaaaacgtgtgtgtctgtcttacaaggtttagtagtgactatggagcagagcattggtggacaatctagcatacaatgcatatttctacgcaaggactgcttctcctcaaagctcgcgtctcttccaacttctccttccgagatgccctttggtcacaaccgttggtttcgcaggttgtcggtttttccacgtttgcaactatgtcaagggctgagaaagggtttctccaaaaacatggcttgcagtgtcagtgtggataattgtgatacggttcatccagcaacagatgcttatgctggagaggcagttgaagctttgaaagctgggaaagtcattgcagtaccaactgatacactctatggatttgcttgtgatgcttgctcaatggaagcagttaacagaatttatgagattaaaggccgtagacatacaagcccagtggctatttgtgtcggtgacgtatcagatatagcccgttttgctgtcactgaccatttacctcatggtctgcttgattccctcctacctgggcctgttacagttgttctaaaacgaggggattcaagtattcttgaacgatctttgaacccaggatttgatagtataggagttagagtgcctgattgcaatttcatcaggatcattgcccgtggttcaggaactgccctagcccttaccagtgcaaacctaagtggccagccaagtagtctttccatcaaagattttgagaacctctgggaacactgtgcttttgtttatgatggtggtttgattccatcaagtcgtgcaggttcaacaattgtggacctcaccacaccacacaaatacagaatacttagacctggaagtgcaaaggaagagacagttgccatcttggagaagcattctttcgttgaggcagagaccacgtaacataagttgtgattcatttgcagtgtcacgttctagctaggcctaatgtttcacttgcaaaaaaaaaaacgcgttataaatgtatggtcattgtgcttcaactaagttattctattctatttccattaatagcatagcaatacattcatataaaacttctatctagagcacgtgctatggaattgttgagaaactagtaaaatccaattctatgaatcatttgatgtatggatagcattattgttataatgaaaaaccaatcattactgcagggaatatttgaaaaaaaaaaaaaaaaaaagcttatccaataccgacccaccctccaggggggggccccgggaccccaatttcccccccaatagtgaagttgtaattaagagctgtctcactgggcccgcccttttttatcaaacctccggagatctggggcaaaaacccctggcccgctaacccccacctttaattcccgccctttccccccaaacaatccccccccttttttcccctcagcccggcgcgtaaaaatcacccaaaaataaagggccccccacactattaaatgcgacccctcttttccccaaaaaagagtttcaccccaccccctctcaaatgggcccctaatacggcaaaaattggcgacaacccgacaattcattttttcccccaccgacctttcccctctccaaacttcttccgtggtacaatccccctcttctatttctttttttaaacaccttaagcgcgccataaacctgcgcgaaaaacccatccctcataaaatcctcacaacacatccaacccccgcactaaccggctgttcacgggttcttgcacctccatttgtgtgaacataagagattccactcctattataagaaacaggggggccctctcctagcggcaag

SEQ ID NO: 3724 - DNA, 2262 bp, Glycine max
tcagctacgtaggccccccccccccgaagaaagttgatacgacaccttggtagagagagagtgaattaggaattaggaaacgttcgaaattgggtcgtaaattaatgggttgagccgagttggttcgtggaaggaagaaataaagaaatcaacaaaggcagacaaagagcttaggaaaagaagaataagaatggtgtggtgagaaagatgaaggtccgttcggaaagggaaaagacgaaagttgtgattaggcatttgcccccttctctcactcaatccgatctcttccaacacatcgattctcacttcgcttctcgctacaattggttctccttccgtcccggcaacaacagtcacaagcgtcagatgcattcccgagcctatatagacttcaagtgtcccgatgacgttttcgagttcgccgagttctttgatggacacgtttttgttaacgagcgaggtgcccagcataaagtgatagttgagtatgcaccttctcagcgtgttccaaagccaagtgccaaaaaagatggacgtgaagggactatattcaaagatccagattatcttgagttcctcaaactaattgcaaaacctcaagagcatcttcctagtgcagagatacaattggaaagaaaagaatctgagcaagttggggccagcaaggaaacacctattgtcacacccctgatggaatatattcgtcagaaacgtgctgttgacagtggtatgcaggcttcatcagcagtggcaaaagtttgcagaagatctagagctgctttgcctggtaagcctggctcaggcaatattaaacgtggatctgaaaagaaaaagtatgttcagaaggacaatgccaagagtgctactcgcaaagagtcaaaaaacatgtcagcctttattgtggtcccccggcgagacgatcaatttgctgaatcaagtataaaaggaatttctgacattaaaactttgcatggcgttgaaggttccatttctggaattccactgacttctgagtcaggaaagaaaaaattccttcttcttaaagggaaacagcaggacattcccagtgccactgaggccacagtaaaacagcaaaacgtacaatctggaaattctcctatttcaactcctgcaaaacagaaccagagacgtgaagctagtggaagattgattaggagcatacttctaaataatgaagctcgtcaaagtcagtctacaactggtacacaacataaaattcaaattttaagttctgagaatgggcagcgaccctctcgtcgttttggttcaaggtctgggttaaataatcaagtctcaaatcatgatgctgcacaaattaattcccgaaggggattctagaagagcattggacgaaaagttcataaaaagggatcttcatggtttggggagcagtgccaaaacagaaaaacgtactagaaacaaggatagacctgatcgaggtgtttggacaccccttcgtcgttctgatgtttcgcatgctggtaacgactattcatcatcctcattggcacagcctactcagtcaaatcctgaatctgctgaaggagaagtaaaagaaaatgttccttctggaaacaggggaggtgaattctctgcttctgcaggtggacacggtggcaatccttcaattgagaatggttctcaaagaaattttattcatcatggagcttcctatgtagtgaaggatgatggtgcagtcagtagtataagcaaagggaaaccttccaagaaaagtgttgggcatagtgctcacgagaagcaagtctgggtccataaatcttcttcagggtcataaaatatctgcgtcagggcatcattcctgctatggtctccgtataggacgtaatcctcaactaattcaggtcaacctgagtctgagcgacttgaaagagcctctgcacaataaagggaatgcaaagttacagacctcgttgacatgattattactgaaaacagattggcattgttaaccatgctgatggatttagacccattacggttcgtgtctccttaaattgaatatttcagtgttgggaaatattgtgtttgggatgtaactgtaaagttcttggtacataacatgggatagtatgttggaaagagtgaagaatcttgtcttgttcagtggacaagtagttaaataatgttttgtattgaaggcttatactttagcgtgcacatgtccgtgttattgtaaggatattagaacgtctttggtcctcaagaatcatccttattccc

SEQ ID NO: 3725 - DNA, 1349 bp, Glycine max
  misc_feature (1312)..(1312): n is a, c, g, or t
gggtaccgggccccccctcgaggaaacaaaacctcaaaatctatatattaaattaatcgcagaaacttgatatattattacgcaaccaaactttcacacctttgaattttagttgtcaacaccctctttttaaagctttgaagcatctctgtcttctagttagcttccaataacaaatggtacttttgatagagaaacttacaaaacattacttcaagctggagaatcaccaccatgccatcacacaccttcaaccagaggagttatcatcctcactgcttgcatttaaatcccatatgtccaaatcaattgaccaactagcatcggatttgaaacccggatcagagacccccctgtccttaacatggtttggaaagtgtttcggcctcttgcccttcatcaacaaggcttttggaaagcttgttgtggatattgactacccaatgagtaaattggagatcttttccattgaagagtacctcagctacaccttgagtttgctagagcttctgaattccgtttcttctcgtctttctaatcttggccaagctaggctttctctggtccatggtttgaccctggtggagaactcaccttctttggctacaaaacatctgaaagcgattcaatttcaacaagggtactctttcaccaccaactttggtaaagatcatgatgatgaagtaagggttttctctggcaaggagtggattgttcatgaggctgtaaaggaaatgaggagtattggattctgggtatgcggggttatgttgtcttgtttatatggtgatggtaagccatacatggagctgagaaaaattgctggagggtttgatggttctctagttgccacgcttgatttcaaaatcaatgaacagttgatagagaaaaggccactcttcagcgagatcaaagaggtaaataatgttgtttctaaccttcttgttgcttctgatgaagtgagacatgatgcagccaacgaattgcagacaaagcttcgtgtgttggagaagctatctgatgatataagcaaggaggtggataatctgtttgccaacgtaatgactcagagatctgaattaattgacggttttcgactacagaaacaaccacaaaaatcaagtgtctgatcatatatattatgtatagatcaatagtttttaattacttttgtattgtttataaattgtatcaagtcatgtaaatagtaatacacagttccagtggttatttgcacacttaggaacatatgtaatgaataataaaaattatggttcttcatattttcagttgccccccaattcatgattcnaaaaaaaaaaaaaaaaaaaaaaaaaaaaaaaaaaaaa

SEQ ID NO: 3726 - DNA, 1663 bp, Glycine max
tcagctacgtaggccccccccccggaaaaaatgaaaaattaaactaggaacgtgaaggaattggagaagattattgagagagagagagagacggagaaggtctttctgaagccgtagttgagactgagatcgatcatctgtcttagttagatttcgtagcagagagagaatgggagaggtagcgcgtggaggttgttgccctccgatggatctgttccgttcggagccgatgcaactggttcagctcatcatccccatcgaatccgctcaccgcactgtctcctacctcggcgaccttggcctccttcagttcaaagatctcaatgcagacaagagtccttttcagcggacctatgcagctcagataaaaagatgtggagagatggctcgtggattgcgttttttcaaggaccaaatgttgaaagctggtgtttcaccaaaatattccacaacaccagttgatttgaacattgatgaccttgaggtaaatcttacagaaattgagtcagagttaactgagatgaatgcaaatggtgaaaagttgcaacggtcatacaacgagcttgtggagtataagcttgttctgcagaaggctggtgagtttttccactcagctcaaagtcgagccttagagcagcagagagaacaggaatcatgccatctgagtggtgaatctatggaaacacctttattacaggaccaagaattgtctgttgattcatcaaagcaagttaagttgggctttttagcaggtcttgttcccagggaaaagtccatggtatttgagagaattttgtttcgtgctactagaggaaatgtatttttgaggcaggctactgttgaggatcccgtcacagaccctgtgtctggagaaaagactgagaaaaatgtttttgtggtcttctatgctggtgaaaaagcaaaagctaagattctgaaaatatgtgaagcctttggtgctaatcgttacccttttgctgaggaacttggaaagcaagctcaaatgattacagaggtttctggaagacttttagaattgaagaccactttagacgctggactactgcatcgggataacttgctaaatactattggggctcaatttgagcaatgggatgctttggtgaggaaggagaaatctattcatcataccctgaacatgctgagccttgatgtaacaaaaaaatgtcttgtggctgaggggtggagtcctgtttttgcaactaagcagatccaggatgcattacagcgggcagcattggactctaattctcaagtcaatgccattttccaagttttgcaaactagggagttgccacctacatattttcgcacaaacaaatttacttcttcttttcaaggaattattgattcatatgggtgagcatcatactgttttccttttccctattttatccctttatttgtagttgtgtgtgtaaagatgaggtttagttattgataattattaactcattgacaagtgcaccaaattgtctcaagtagtaaagtactcgaaagtctaagtgtcgaatccataaggactttgtttgtacttagattgatgcaaacccaatttacaagcaataaataatgaatttaaaatagaagataaaagataagataaagatttaaattaaaagatgaaaaaaaaaaaaaaaaa

SEQ ID NO: 3727 - DNA, 1398 bp, Glycine max
cggaaatcccgggtcgaccccgcgtccgctacccgctgagtttaagcatatcaataagcggaggaaaagaaggaccaggccaagcccggagctcgcagcggcgcgccggcccagttgccgtcgaagccgcttcctccctctcaggctgtaagggaggctaaaaatgaaacttcttacggcggtcgtggtggtggccgaggaggtggaagaggatttggacgcggccgtggtggcggcggtggctttggccgtgatttttccaatgatgataactcatcggcccctgctaaccaaggatcttttgaaggagattctgggaatccctcagaaagacgcggttatggtggaccccgtgggccctaccgtggtggcggcagtggacgtggtcgtcgtggaggttttagcaatggtgaaactggtgatgaaggacgtccaagaagagcatttgaacgccacagtgggactggacgaggaaatgaattcaaacgggaagggtctggacgtggtaactggggtacacagaatgatgacattgctgaggtgactgaggaagtggtgaatgaaactgaaaaggttcttgctgatgagaagcctgtaggagaggaagatgcagcagaaggaaacaaggacagtcctgctaatgaaaatgaagaaaaggagcctgaggacaaggagatgacactggaagagtatgagaaggtgctggaagagaaaaggaaggccctgcaggctcaaaaaactgaagcaagaaaggtggacatcaaggaatttgcatccatgcagccactgtcaaacaagaaagaaaatgatgagatctttattaaattgggatctgacaaggataagcgcaaagatgctttggagaaggaggagaaatccaagaagtctgtcaacatcactgagtttctgaagccagctgaaggggaaaggtactaccctggtgggcgtggtcggggacgtggccgtggttctagaggaggttacagtggaaatgcatacagcaatgctccagctccatcaattgaggatcctgggcacttcccatccttgggtggcaagtgaggttttcctgaacccttctgacatttccctgtcctttttttgtcaattttgggttcttggatttggacttaaaagcaggaaaaaaactttggtaattggatttcctgaattagaagggttattattttgacttctatgccttaaaatgtaaatttaggttgttcttcatacgttgtagccttttccttgtgtttttctgttactatggttggacattccgggggggttatatggtggcggataagacaaatgttgttgagtttcgttttatttatagattgaattctcagttttgatttgaaatttgggttatatgggcccccgctgttcttagtc

SEQ ID NO: 3728 - DNA, 2562 bp, Glycine max
gcgatttgccacgaaggtgaaagagagcaacggggcaggtaatgattcggcggcgctatccactttgattccattcgcattcgcaggtctactgtagaatcagcacgcagccatggcggaccgttctcggagcttcatgaaggacgtgaagcgcgtggtcatcaaggtcggcaccgccgtggtgactcgcgaagagggaaggttagcggtcggaagattaggcgctctctgcgagcagattaagcaactcaactctctcggatacgacattattcttgtctcctccggcgccgtcggcatcggccgccaacgactccgctaccgcaaattgatcaacagtagcttcgccgaccttcaaaaaccccaactcgaactcgacggcaaggcatgcgccgccgtcgggcagaacagtctcatggctctctatgatattctcttcactcagctcgatgtgacgtctgctcagcttcttgtgacggataacgattttcgagatgaggatttcaggaagcaacttactgagaccgtgaaatcgttgttatcgcttaaggttattccggtgttcaatgagaacgatgctgtcagtactaggaaggctccctatgaggattcttctggtatattttgggataatgataggttatctgctctgttggcccttggagttaaaagccgatcttcttgttttgttgagtgatgtagaaggtctttatagtggccctccaagtgatccacattcaaagcttattcatacgtatattaaggagaagcatcagaatgaaattacttttggtgacaaatctagagtgggatcagctgcgttggccccccccccaaaagctgctgttcatgcagctgatgctggcattcctgttgttattaccagtggttttgcagctgagaatattatcaatgttctccaaggacaacgcataggaactctcttccataaagatgcacatgagtgggtccaagtaaaagaggttgatgctcgtgagatggcagttgcagccagggaatgttccagaaggctccaggccatatcttctgaagaaaggaatcaaattttacataaaatagctgatgccctggaagcaaatgaaaaaataatcaggactgaaaatgaagctgatattgctgtggcacaagaagcaggatatgaaaaatccttggtggcaaggctagctataaaacctgggaagattgcaagccttgcaaacaacatgcgaattattgccaacatggaagatccaattggtcaagtattaaaaagaactgagctatcagatgggctaattttagagaagacatcatctcctttgggagtgctccttattgtttttgagtcacgccctgatgctcttgtacagatagcttcgctggcaatccgaagtgggaatgggcttctcttgaaaggtggcaaagaagctaagcggtcaaatgcaattttgcacaaagtaattactgaggccataccagatactgttggtggaaaacttataggacttgtgacctcaagggaagaaatccctgagctacttaagctggatgacgtaattgatctggtgattccaagaggcagcaacaaacttgtttctcaaatcaagagttccactaaaattcctgttttaggtcatgctgatggagtttgtcatgtctatgttgataagtctgctaatgtggagatggcaaggcggattgtacttgatgcaaaaatagattatccagcagcctgcaacgccatggaaacacttcttgtccacaaggatttgatagagaaaggttggttaaatgatattgttgttgacctacgaactgaaggcgttaaattatatggaggaccaagggcaagttctctgttaaatattccacaagcacaaacatttcatcatgagtacagttcgctggcttgcactgttgaaattgtggatgacgtgtatgcagctattgatcatataaatctttatggaagtgcacatactgactccatcgttgcagaagataaagaagttgctaatgtgtttctacgccaagtagacagtgctgctgtttttcacaatgcaagcaccagattcagtgatggggcaagatttggactaggcgcagaggttggaattagtacgagcaggattcatgctcgaggtccagtaggagttgagggattgttaacaacaagatggatactaaaaggaagtggacaagtagtggatggtgataaagggattgtctatacccacaaagacattgcaacttaatttgaatggtctaattgctatacttccttttgtagccttttcatttattttgacagttgagaacggtataaaattgggcaattaaataaaatagggtcatttgtatcatctgatggttcctttccttcaagaattttgtcagcaattacagtttgttgttgaatttgttatttaacgcatccgtttctgttatggcatacgaataaagcaccacctctaggaaaacagagaatatgaagtctccgcaatggaatccatttattgctttgttaacgacaattggatatttatagtttcagtttttgag

SEQ ID NO: 3729 - DNA, 1029 bp, Glycine max
taaaaggcgcccataatttgatttgacacaggaggcacgttgctatgagttgctctttctcaattttgcaattgcaagtgaagaagccctaattttttgcagatctggaaatggcgacggcaacataccctccaccgccaccttattacaggctttacaaagattacttgcaagaccctaattctgctcccgaccctccaccacctattgaaggcacttatctttgttttggagccaattacactactagtgatgttctacctaccttggaagaacaaggggtgcgccagctctattctaagggccctaatgttgatttcaagaaagagctgaggtcactcaacggagagttgcaactacatgttttggagcttgctgatattcttattgagaggccttcacagtatgcaagaagagtagaagaaatttcaactgtattcaaaaacttacatcaccttttaaattcattgcgtcctcatcaggcgagagcaacattgattcatattttggaacttcagatacagcgtcgtaaacaagcagtggaagacataaagaagaggagagaagaagcccgaaggctccttaacgagtccttggcaacacttgatggccattagagcattctctatcttgtattcacagcaagaatctaccgaggaaattaattttatttgaaaagtgaattttgtcctctagattttagcaaatgaaaagattaaaacaagaagttgtgcgacttccttgaaaatggtcacttgacataactgtctcatgttcttgatgaaggctgttttgcagcatgtgcaaagatattagaaatagaagaattgtgttaagagtgttgctactgttcttagaaatatttttagtagtgtataaagtctgaagtctgaactattaatggatggacctgtcagtctgcattatgtttagttatattattattatgatttattatgactatgagaggatgagggtccgacgagaatgcgtcggaattgatggtatcgtaatgactcgtatggacgc

SEQ ID NO: 3730 - DNA, 2067 bp, Glycine max
cacccaaccaaaaactcaacgcaaagagagaaaccacgacacaacacaaaacctccttagacttggtgtattttgtttttctgtctgtgttgttccttcacaaccacagagccaaaaacaaaaacatctaaaacctctttctttctctgtgtttgtgtttttagtttttgtttttgtcctatgaaactcccaacaacgtttgcagacccggaatccttgtcttacctttacaccttgctccaatcttccttcgaccaaatgaatgatcccaccaacaacaacacttccaccactgggagaaaacgccgcagaaaaaacgaggatgatgatgatgatgatgatgatggtgatgatgatggttcatccaacaacaacaacaacaacaacaacaagaggagcaagaagaagaaggaagagctaaagggtatcctcacttcaattctcttgttagacgaacaagagaaacttgagcagcaacagaacaataaggtctcagaggaagagaagttttcattggaaaccaatcacaagaagaaaacaaaagccatgcttcactactattccaaccttgatgagtattacagccacgtggaggagtcagagagggtgaagaggaagaagtcacgcggcatggcacgtgcggtggcggtggcggtggcagcgtgtgaaagagaaggtgagggtggtggtggaagtgctgaaggggggaaatctggtgcgggaggctcacagagaaggttgtgggtgaaggatcgttcaggagcatggtgggatgaatgcaacaaagaggattttcctgaagaagattttaagaaggcttttaggatgggaagagaaacctttgacatgatctgtgaggagttgaattcagcaattgtgaaggaagacaccactttgaggaatgctattcctgtgaggcaaagggtggctgtgtgtttgtggagattagccactggggaccctcttaggattgtttctaagaggtttggtttggggatatcaacttgtcacaagcttgttcttgaggtttgcaccgctattaagtctgtgcttatgccaaagtacttgaattggcctgatgaggttgcattgaggagggtgaagagtgagtttgagggtgtttctgggatccctaatgttgtaggctctatgtacacctctcatgtgcctattatagctcctaagattagtgtggctgcttatttcaacaagaggcacactgagaggaaccagaagacttcttatagtattactgttcaaggggtggtggatcatagaggggtgttcactgatgtgtgcattggttggcctggttcaatgcctgatgatcaggtgttggaaaaaagtgccctttttcaaagggctaatggggggcttctgaagggggattggattgtgggtagttcagggtaccctttgatggattgggttttggtgccttatagccagcagaatctgacttggactcagcatgctttcaatgagaagattggggaggttcagaaggtggctagggatgcttttgctaggttgaaagggaggtggagttgtctgcagaagaggaccgaggtgaagctgcaggacttgccagtcgtgctaggggcgtgctgcgtgctgcataatatatgcgagttgaagggggagaagattgaccctgagctgaaggttgatctgatggatgatgagatggtgcctgaggttgccttgaggtcaatgagctccatgaagacgagggacgcgatcgcgcataatcttctgcatcatggtttggctggcacttcttttctgtaaactgaaagggttgtgttttggtaatggtgtataccgttttgctgcttgagataatgatgattcttttgcttgtttattattattacatggtattgaagtaagtcactggtcattgtttgttgaagagtctttgtatgtaaaagatgtattggccctttcaacagatatatgattatagtctgcacagggttagatcctgaatttgtaacccccaattccatactttaattgccaaataagatattgaataataaaattagaacattcttttgtagc

SEQ ID NO: 3731 - DNA, 1527 bp, Glycine max
cttgatgagacgcaaatcagagtcatccactcaacagggccattcatggctgcctttacccctttatggaaactctcttaccatgacaaagaattcaacaatttcacagacgcgcggccctgcaagctgcatttctttagcttcatcaaatcttggacgattcttcagtttccaagaaatcctagatgctagcaacaaatttgatgagaagctacttcttggtgtcggtggttttggaagggtttataagggaacgcttgaagatgggaccaatgtagctgttaaaaggggtaatccgagatccgagcaaggccttgctgaattccggacagaaattgaaatgttgtccaagcttcgccattgtcatcttgtgtccctcattggttattgcgatgagaggtcagaaatgattcttgtgtatgaatacatggctaatggacccctccggagtcatttgtatggtacggacctgccacctctatcatggaagcagcggcttgagatttgcattggagcagcaagaggccttcattatctccacactggcgcagctcaaagcattattcatcgagatgtaaagacaacaaatatcctcttagatgagaactttgttgctaaagttgccgattttggcctctccaagactggtccttctctcgatcaaacccatgtgagtactgctgttaagggtagttttggttatcttgatcctgaatacttcagaaggcaacagcttactgagaaatcagatgtgtattcatttggggtggtgttaatggaagtgttatgcacaaggccagccttgaaccctgtccttccaagggagcaggttaacatagctgagtgggcaatgacctggcagaaaaagggtatgcttgaccaaatcatggatcaaaatcttgttggcaaggtgaatcctgcttcccttaagaagtttggggagacagccgagaagtgcttggccgagcacggcgtggaccggccatcaatgggagatgttttgtggaatcttgaatatgcattgcagcttcaagagacctcatcagcactcatggaaccggaagataacagcacgaaccacatcactggaattcagttgacaccccttgaccattttgataacagtgtgagtatgattgatgggggcaactcttgcactgatgatgatacagaagatgttgccacaagtgcagtgttctcacaattggtaaatcctcgcggaagataagctcttgtgtatccacaattctggccaaaggccatcaaagtaattctggtctgattggtgaatgaaggttatttcttatttagttactgcttttgtaatccatttttccccacaatcaatttcctttgtaatatacttgagtgatagtgatgggtgccactaagctggttagtaattgcatgcaaggtaccccataaaattctgttgtactaaatataaaccaattaggagttctgctcctcaagttgttcttacaccttacagtatatgaaggttataagttctttcttatgaacatg

SEQ ID NO: 3732 - DNA, 1866 bp, Glycine max
gttaaggtaaaccaaccaaatcagcatcccttatcctcaaattacttagaaagcaattcatgactaacgtatcctcgtcacttccgattgttgcccaggatgcaaaagccccctcatacttcattcggaacactgcaaatttttctccttccgtttggggcgattatttcctttactatgttcctagttccgtggaagatgatagtcacatcaaacaagctcaactaacaaaagaggaagtgaggaagatgcttattgctcctattgataacaatttctattttaaattagaatttattgactcagtccaacgcttgggtgtttcctaccattttgaacatgaaattgatggagcattgcaccaaatttacaacatttcaacaaaggacaataatatcataactcacgatgatgatctttgtcatgtggctttactctttcggttgcttaggcaacaaggttatcacatttcatcaaatgtattttacaaattcaaagaccaaactagaaactttagtgaaaaagcagccaatgatatacaagggaatgttgagcttgtacgaagctgctgaactaagaatgcatggagaggatatacttgaagaagcacataatttcgctcttgttcagttaactaagtctctaactacccaattaagtccttctatgattgcacaagtcaagcatagcttaagacgatcacttcgaaagggattgcctaggctggaggccacatattatatgtctttctacgaagaagattcttcacatgatgaaaaattgctaacatttgcaaaactagattttaatatgttgcaggagttacatcagaaagaagttaacaatgtgaccaggtggtggattaagaatttaaatgtctcaacgaaattgccatttgtacgagataggattgcagaatgttacttttggattttgggaatatactttgagccacaatattctcttgctagaaggataacaacgaaagtaattgctctatgttctgtcattgatgacatgtatgatgcctatggaaccattgacgaacttgagcttttcaccaatgcaattgagaggtgggatatttgttgcttggatgatctcccagaatacatgaaagtatgttatatagaaattttgaatgtttatgaagaaatagaggaagagatgagaaaacaaggaaaagtatattgcatcaagtatgctaagaaagagatgaaaagattaatcaaggctcacatggctgaggcaagatggcttcatttcaatcatacaccgtcaatagaggagtacatgcaagttagaaatgtatcaagtggttactctatggtgatcaccatatgttttgttggcatgaaagatacaacagaggaggtccttatatgggcaacaagtgatccaataattattggggctgcttcaattatttgtaggcttatggatgacattgttggaaatgaggttgggcggcacggtgcacccggcgcatcaagcattgaaagctatatgaagcaacataacacctcaaggcaagatgccattaataaactacttgagatggttaagagtgcttggaaggacatcaatgaggcatgccttaatcctactgaagtgccaatgaattttcttttgcgtgttgtcaaccttgtgcgcatgattgacgtgctttcaccgcagaagataattatccaaatgcaggagggttaatgaaggattacatcaaacctttattagttaataagatgtctgcccgtataagctagaagcttagttattttattattgatctgtttctttaatttaggtaatataacatggtaatttctctttagctttaaaaaaaaaaaaaaaaaaaaaaaacccccc

SEQ ID NO: 3733 - DNA, 1079 bp, Glycine max
acggctgcgagaagacgacagaaggggaccacactcgcttctcttgcttccacttccattccaccatgccttctaatgatctcaaacatcgggtcaccaccactacagcaaccaccaacgacgtcaataggaccagcagaggcaaacgaatgctgatggccaaacgcggccttaagtcactcgccatagccgttgtcctccctctctctctcaccgccttatcagcttacataggctcctcctcctccagtgcccattacgcttcgagaagccccttctggttcccaccctcgtgggccctacacttgacgtgtcctgcttcaagcttcttgatgggtctctctgcttggatggtgtgggcagacgggggtttccacagaaaccccatggctctgttgctttacttcactcagctcctcttcacggtgctgtgggacccccttgtctttgcccttggggcaacacggctaggcttaatcttgtgtgtttccttatttctcacccagtttggctgcatgcgcttgtttcgccctttcaatcccatcgctgctgatttgataaagccttgtttggcatgggttgctttcctctctattctaaatcttaagctcctttttgtctgaaccaaccaatgcttatgcatacatgatgttacatatatatagctataatccaaacagtgttgcgttgcgttacgttgcgtataattgctctgtaaacaatctgcttagtcacctattagacacgcgtgttgtaaatactagtcttcttttttctctggcttggaaccacgacttgtgctcttttacttcgttccaaaaagattgagatgtgttaaatttgagaagcagtgttgcctttttccaactaatgagggatgcatagactgtgtatttagaaacgttgcagtagttttgtttgtttcactggctcaattttaattcaaataaatttctttagtaccaaattactacactttatcgatttaactttggaaacaaacgctctcattgacattttcaatgctctttttttcgttactcccttggttgtaatagtactccatccagaggaatgcg

SEQ ID NO: 3734 - DNA, 2721 bp, Glycine max
ttgcttgaatcccttgtagaagaagggaattactggaaggcatttcaagtcctatctgagtatttgcaactcttggatagtttgtcagagctttcagcaatacaagaaatgagtcgtggtgtggaggtttggctgggaagaactttacagaagctggctgctcttttattgggagtatgccaagaattcaaggaagatggctatataacagtaattgatgcatatgcattaataggggatactgccggtcttgctgaaaagatacagagtttcttcatgcaagaagttatatcagaaacacactctgtattaaaggctattgtgcatgaggatgaggagggactttcgcaaaatagttggctcacttacagtgatttatgccttcgaatacctgattcaaagttcaggcaatgcttattacgaacattggctgttttatttgaccttatgtgttcataccatgaaattatggatttccagctagaaagaaaggactcagcagcacaaacttcaaataagtgcaatgaagagatttcctgtagtccaggtgagactcaggaagttgattcagatgtaagagcctgcaataattctatgtccagttccagagatgtaatacatggctcatcttctagggaggaatctgcaacaaagagctcactgactgaaaccagtggttcaccatatagtgattttcatgatacaattaaggaggctggaaaggaggacagtgcaacatcaagcattgagtccccttggtaccatcttcgcaaagaagctacaacatttgtttcacagacccttcaaagaggacgcaggaatctgtggcatctcactgcaagtcgtgtgtcagtattgctttcttctgctgcagtctgtactgctagcattcatcaattcttgaaaaattatgaagacctcggtgtctttattttgactggggaagccttttgtggaattgaagcagttgaatttaggcagaagttaaaggttgtctgtgaaaactatttcatagcttttcatcgactaaatgtgcatgcactaaaaatggttttggaggaaagagacttggctaaaattacccccagaaacagtacatatgatcagttttgcaggacttattggtgatggagcaccgttgatttctttatccagtggtaaatcaactaatgtcagtgcagtccattccattaaatcggtgaatatggttcacactggtgcaaggaagaatgggttttctcactggattaacggcgcgagcccgtgccggcaaaaattaccaacctccaatgaaggtcgtggttactcacaacctaatggatcagtttgtggtgaatttgacggaagttcaaccaataattttcatgatgataaaacacccagaaagaatgatatcaatcaaatgaatggtgccaattctgtttcagaagatgaaaatgaggatcttcttgctgactttattgatgaagatagtcaactaccaagtcgaagttctaaaccccatcattcaagagctctctcttcacatgttaatgacgaagagaatacaacacaaactggatcttctctctgtctattaaagtctatggataaatatgcaaggcttatgcagaaattggaagtggtaaatgttgagttcttcaagggagtatgccaattgtttggattttttttctattttatatatgaaacatttggtcagcaaaacgctagttcaactggaaaaggcacttctagctctcttaactatcgcctgagaacagctttatccagagtaaaccaagattgtgaagagtggattaagtctcaatcgtcgtcaccaacatctttgagttcaccatttgtacatgctgagttgacacctacacaccctcccaatacaaattatggtcactcctcagggacttctttgggtctgaaggtggatgctgtaccagatcttacagaacaggtgcaccgggcggcgctcgcgctactgttgcacattaatggatatgttgaacgtgttgccaattgtaaatgggaagtaaaagagctcggcatggagcataacggatatgttgatttgttgctgggggagtttaagcactataaaacacgacttgctcatggaggaattcgtaaagaggttcaagacctattattggattatgggcttgaaattgtggcggaaactcttgttgaaggactttcacgggtgaagagatgtagtgatgaaggacgagcccttatgtcattagatctgcaggttttgatcaatgggttacaccattttgtgtcgctgaatgtgaagcccaagctacaaatggttgagactttcatcaaggcttactaccttcccgagacagaatatgtgcactgggcacgagcacacccggaatacagtaaaagccaggttgttggactggtcaaccttgttgccactatgaaaggttggaagaggaaaaccaggttggacatactagaaaagattgaatgagcatgtcttttgttgtgtatcaagtcaggcaaatagaatcttctgctctttttcccctttgtctttcttttttggcagagcttcgtgtaaaggtagtgtatattgcttggcatttgatcccctattaattatggagtattttccaaatctgtgcgttggtgtcttgtagatagtcctttgaaaataagctgtaattgtactataattttaccttataattttttttatcatgttattcaggt

SEQ ID NO: 3735 - DNA, 1172 bp, Glycine max
tcagctacgtaggccccccccccacacacatatatagtgactgactgactggatgatgtaagacaagagagctacgttccgttacgctacgttcactctgtctgttgggcttttagggttagggttagggttagggttttggtttgtggatctattgttgtcgctgcgatggatcgcaagaggggaaggcatgaagctgccttcaatttcaatggcggcgccaagaaatcgaggcctgcacctctggctgtccatttggtgaaggatgccacttcctgcattatgttccaggtggattcaaagctgtctctcagctgatcaatgttggtagcaatcctgttattcctcaagttggtagaaaccctgttccaccatccttcccagatgggtcttctcctccagttgttaaaactcgattgtgcaacaagtttaacacagccgaaggttgcaaatttggtgacaaatgtcactttgcccatggtgagtgggagcttggcaggcctacagccccatcatatgaagatccccgtgttatgggacagatgccaagcagcagggtaggtgggcgagttgagcccccacatccagctcatggagctgctgccagctttggagcctcggctactgcaaaaatcagtatcaatgcttccctagctggagctgtcattggaaaaaatggtgtcaactcgaagcaaatatgtcgtgtaacaggagctaaactttccataagggatcatgacacggatcctaaccttagaaacatcgagcttgaaggcagttttgatcagatcaaacaagccagtgccatggttcacgaagttattctaaatgttagttctgcctctgggcctccaatgaaaagctttacttcgcagaattctgcccctgcaagcaacttcaagactaagctgtgtgaaaactttgctaaaggttcctgcacttttggggaaaggtgtcacttcgcacatggaaatgatgaattgcgcaagtctggaatgtgatagcgttataattttgttttagcgaggtttgaattgtgcagaattttctagtttttcaatttttttatcaaacagcttctaatttgctacatgataactgaactaatggtgagtcttagctcagcttctaaaattcaacgcacattcaaatttgaaatttcctattgtcaa

SEQ ID NO: 3736 - DNA, 1243 bp, Glycine max
  misc_feature (1224)..(1225): n is a, c, g, or t
  misc_feature (1227)..(1228): n is a, c, g, or t
  misc_feature (1237)..(1239): n is a, c, g, or t
gacccactcgtccgccggcgcaggcgcgcacgcgaccgcccactcgtcagatagggtatgatgtccatagatctaaccttgcgaaggtcggtcccttcccacacatatataacatactgactggatgaggtaagaccagagaagttccgttccgacacgtgacgttcattctgtctgttggaactgttggccttttagggttagggtttcggtttgtggatctattgttgcctctgcgatggatcgcaagaggggaaggcctgaagctgccttcaatttcaatggcggcgccaagaaatcgaggcctgaaacggactcctttccaactggtttaggaagcaaatcgaagccatgcacaaagtttttcagcacctccggctgtccatttggtgaaggatgccacttcctgcattatgttcctggtggctttaaagctgtctctcaactgatcaatgttggtagcaatcctgttactcctcaagttgggagaaaccctgttccaccatccttccccgatggatcttctcctccagttgttaaaacccgattgtgcaacaagtttaatacagctgaaggttgcaaatttggtgacaaatgtcactttgcccatggtgagtgggagcttggcaggcctacagccccatcatatgaagatccccgtgttatgggacagatgccaagcagcagggtaggtgggcgagttgagcccccacatccagctcatggagctgctgccagctttggagcctcggctactgcaaaaatcagtatcaatgcttccctagctggagctgtcattggaaaaaatggtgtcaactcgaagcaaatatgtcgtgtaacaggagctaaactttccataagggatcatgacacggatcctaaccttagaaacatcgaggcttgaaggcagttttgatcagatcaaacaagccagtgccatggttcacgaagttattctaaatgttagttctgcctctgggcctccaatgaaaagctttacttcgcagacttctgcccctacaagcaacttcaagactaagctgtgcgaaaactttgccaaaggttcctgcacttttggggaaaggtgtcacttcgcacatggaactgatgaattgcgcaagtctggaatgtgatagtgtaataatttttttttagcgaggtttgaattgcgcagaattttctagttgttcacatgttcatcaaacagcttcgcatgtgctacannannactactaannntggc

SEQ ID NO: 3737 - DNA, 1037 bp, Glycine max
gattcacaacacgagcatttgtttcaattccaaatcaaagaggtcgaagaaaaacaagagcaaattgggatcgaagaatttgaagaacaccacaagcaagatgcatgttgttgtggtgctcaacacgcaatcctactgcagaggcctagaacctccttcatcttctccttccgtcgtttccaacaagggaacaaggactttgagtttcaggaggctgctgctgcgtccttctcttgggattcatttatcgcgtagctttgctttaaagtgtgttgttactccgaacccagctgtggaattgccattaactgctgaaaatgtagaaagtgtattggatgaaattcgaccctatctcattgcagacggtgggaatgtggctttacatcaaattgatggcaatgttgtgcgcttgaagctacagggcgcatgtggttcctgtccaagttctgttaccaccatgaaaatgggcattgagcgtcggttaatggagaagatccctgaaattgtggcagttgaaccaattgctgatgaagaaactggtcttgagctcaatgaagataatatagagaaggttcttgaggaaatgagaccctacttggttggggctgctgatggaactcttgaattggtggccattgatgagccaattgtgaaggtccgaatcacaggtcctgctgctagtgtcctgactgtgcgtgtagctgttacacaaaagttgcgagaaaaaatacctgccatagcagcagttcagcttttatgatagtttagttcaaaacaagaatagaactatcatggcattcttgtcatttttcatgtacaacaacactaatggaaataatgtgttgcatgtgatgtatagtatatgtggccgcatgattttttttttaattcttaaatgctcttacaggggaagaagatgttatgtttctcagtaattttaaaagaacgtattatttttgtatttgcaccatgtttttcattgacccgatttaaggaaactagtacatatgcatataatcccaaaaaaaaaaaaaaaa

SEQ ID NO: 3738 - DNA, 2594 bp, Glycine max
  misc_feature (2499)..(2501): n is a, c, g, or t
  misc_feature (2518)..(2520): n is a, c, g, or t
  misc_feature (2537)..(2541): n is a, c, g, or t
  misc_feature (2560)..(2563): n is a, c, g, or t
  misc_feature (2575)..(2575): n is a, c, g, or t
  misc_feature (2577)..(2579): n is a, c, g, or t
gctctggagactcaggtggttctaacgtaatatccgtccagccctgctagctagtttcaatttcttttgttctatttctgtctatagaaaagatatcacccacttgctactttatattttactgcaaattaaatactctcgtgaataactaactactatttaattccttgcgccattaccaatgtttttatcctgcaaaacatacatagtagtagtatttgatatttgctaggatttcaggtgtgcagctgaaacctccgtgtcccacgaaaaccttacaaaattgaattgtggtattacagtatccaacagcaccatgctggattctgccactccccatgacaaaatcaccacagcagcttctggcttcgtacttgaggatgttcctcatctatctgcttacatccctcacctccaaacatatcctgacccgttgcaagacaatccttcctattctgttgttgcgcaatattacgtgaatgtggatgatacaattgcacaacagatagttgtacacaaaaatagtccaagagggacccattttcgtcgtgctgggcctgctcagaaggtatattttgattcagaggaagtacacgcttgtattgtcacgtgcggtggactttgtcctggtctaaatacagtgataagagaaatagtatgcggcttatatcatatgtatggggtgcacaaagttttgggaatacagggaggatatccaggtttttattctcgaaatacagttcctttgacaccaaaggttgtgaatgatatccacaaacgtggtggaagcatccttgggacatcatatggaggccatgacacctcaaagattgttgatagcattcaggaccggggaattaatcaggtttatatacttggaggatatggaactcagtatgaagcagctatgatttttgaggaagttagaaggcgtggcttgaaagttgcagtggtcggaattccaaaaactattgacaatgatatcccagttattgacaaatcaattggtttcgacactgctgttgaagaggcacaacgagcaatcaattctgctcatgtggaagcagaaagcgcggagaatggaattggtgttgtaaaattaatggggcgttacagtggatttatcgccatgtatgcaactcttgccagccgtgatgttgattgttgcttgattccagaatcacccttttacctggagggtccaggaggactgttggagttcattgagaaaagactcaaagagcaaggtcacatggttatagtcatagctgaaggtgcaggtcaggagcttctttctggcaacccctccattgttaataagccagatgcttctgcagacaaattatttccagatgttggcctgtggttgtcccagaaaattaaggatcactttgaaaaacgtcaaaaaatggctataaatctgaagtacatagatcctacttacatgatccgtgctatcccaagtaatgcatctgataatgtatactgcaccctccttgcccaaagtgctgttcatggtgcaatggcaggatacacaggcttcaccgtgggcccagttaatggcagaaattgttacattccattccatctgataaacgagggagagaagagggttgtgataactgatcggatgtgggcaaggttgctatcttcaacccatcagccttgcttcttgaacccaaaagaaatcacaggagaaagagaggaaagaacggaaaaccaaaccacagatgggcagaaccattcagaaatagcagactaaacagggcatatacagagcacaaatataacaccaagttaaaatgcctttaaaatgtggtgatcaagttaaatgatcaaatttaattaacgtaagatcaactgattgatcattgacgttggacaaaaccaaatctagtacatcttttgcagtatttaagccacaatgagtacatctatatttacaaacttttgaattacatcttaaatatcaaaagtgagatctgcttaatatcaccagcatctcttaattatttctactgaatacagcgttaataacctctttcagatccttgcaacctacaactttcatctttcctagaccttcggtttctaaaagtttttcagcctgctttggtactacacacattctgtaacccaacttcaccaatgtgttaacccttttttcaattctaggaaccatgcgaagctctccaccaaggccaatttcaccaatgaatgcagtcccctctggaattgggaactccaagaaactgctgcaaattgcagctgctattgcaagatctccagcagtctctgtcactgtcattccactaacaacattcaaaaacatggcattatcttgaagatggaggcctgtttgctttataagtacacatttaataatattagctttgttggcattgatcccattagatagtgaactcgaaactgggcaatgtgtaaggcaaagtgcctgaatttcaattaaaaaagttcttgaaccatccattattacannnatagcaagcccagctannncatttgaatcggagtgnnnnngagtgagaaacatttcacnnnnatttgaaacacntnnngtcctgactgcgaca

SEQ ID NO: 3739 - DNA, 1881 bp, Glycine max
gccacgcgcccggtgcctttcacttttcgccctaccttacctaccataacatgatcccacgacctcactcctgtcattctcactcatgacttccaaaacggacggtttcactacctgtcaccgtcacccttccacacccgtaaccggtttctgtgcctcctgtctccgcgaacgtctcgccggcatcgattcctcctccgccgactcgccggaactccgccgcaccaagtccttctccggccgcaccgccgacgctccatcctcctccgccgccccggagccccgccgcaggtcctgcgaggttggactgccgccgctgggcggcttgctgtctgaccccttcaacgttgccgacaagaacaagaagcctccgaatcggacagctgagatctgttccggccccgccggcgtcggaaccggagagaacgagggcggcaacgcggttagagtttctggcgatgacgacggagaggggaagacgatgaaggagttcatagatctcgaattgcgggacaaaaagaacacagggagagatttcagagacatcgctgcgaggtttcgagatgcggccttccgttttcagcaagggattgatgaaatggcgacggaaagagaatccgaagagaaaccgcaacaacgacggcgccagtgccggcgttggttcggtcgaaaagctagggttgaggacattgcatgagacgcaatcggaggtcggagaatacggtttcgcgttaggtagaagatcgtgcgacactgatctgaggttatccgtggacgattcgcggttttcgttcgaagctcctcgagcttcttgggacggttatttgatagggaaagcgttccctagggtttccccaatggtttgtgttggtgatagggttttgcttgaagaagagggagaagagagtttggagaatggtgaagagtgttgtcctggtggttcagctcagactaagcattactattcagattggcataggaggagaaggagttccgctcgggcgaattcgcgtaagaagccgttaatgggggatgttgatgaattgagagtgatatctaatgctaaggtttcccctgcctccactgagttgttctatggggcaaaggtattgataactgagaatgatttgagggatgcgaatttgaaaacgtccaatagtgttctatctgatagtgtaatggagtctgcttctaaggatgatgcttgtgatgctgcatatggggatggccaaaagggattgaacaggtttcacaagtggggtaagtggtggtgtaaattagggatagtgcagaggagaagagaagataggttgggagaaggagagtatgctggtggtggtgatatggttaatgagccaattgcagagtcttggcagaagctaaggagggtggttaatggacaagcaagcgagtcggtttgtgagaagcttattcgtagccatagtgtttgttgtagagatccttgtagaacggtgggtttagccaatggctttgtgggttctgagactaaaggccatgttttcaatggaaggcagaagtttatgcttcagaggaaccggagtgttaggtattcaccaagtaatgctgacaatggcttgttaaggttctatttgacacccttgaaaagctataggagaagcaggtctggaaagactagcttaaagagttcaaatccaacagccagaagtttcttttgaggctgtaactaatggaagtatatctggttgtataaacatatataatgaaattgtttcttgtccttgcaatcaaagtacttcacattgttagattgcatcacaatagagagatataactgttgaaatctggctggttgcagctgttctcatgatgttggtagcagaataaaacattcattctgtg

SEQ ID NO: 3740 - DNA, 1140 bp, Glycine max
acggctgcgagaagacgacagagggggccgctcgtcctccccgcccccacaaaccctctcaccaaaccttcatcgatctctttgtttttttataaattataatattgatacgaagttgtttctgtaaatagcaattcagagaccttaaaggtagtgagtattttcctccttacttaatctattgtgtgatcaaagtcgttattattaaattagataattgataaccatgtcgatgaagctgttattagcttccctatccatttcggtgtggcttttcatggcaacattatcccttgcccaatccaacaaccgctacgtctttgacacacatggcgaccctcttgaaactgacgatgaatattacatcaggccggccataacagacaacggagggcgtttcacattgatcaacagaaacaggtcgtgccctttgtacgtcggtctcgaaaacaccgacacaccgcagggctacccgatgaaattcaccccttttgccaacaaggacgacgacgataacgtgagggtgaacacggacttgaaagtgacactggtgcaagtttccacaacgtgtgtgcaatccaccgaatggaagttgggtgagaatgacacgaggagtggaaggaggctcatcgtcactgggcgagataatgggatacaaagtgcaggtaactattttagaattgtggaaacagaaagtgttggtatttataacatccggtggtgccctacggaagcatgccccacttgcagattcatttgtgggaccggtggtattctgcgtgagaatggaaggattttgtttgccttggatggtaccactctcccagttgtgttccagaaaaaagatgattaatttgaagccccaagtctgaagattgtgacggtttttggttatacggaataatatttatttttttatgcgtaagaatttaatacaccataatgggatttacaatacttagtataagaaataatatacgatggagctctcatccttttttatgggatgaaataaagatacatgcattcagtattctcttcttgatttgtagaaaaaagctcctaaattgatattatttgtatgtaattcatttactacatacttgattaaataaattattatataatttactttttctg

SEQ ID NO: 3741 - DNA, 1654 bp, Glycine max
tcagctacgtaggccccccccccgtttcttatgggaatgacactgaaaagttaacagcaatatccaatcccatagtcattcccagaaccatagctgcggtggaggaagttgtgcagctttcgggatccttgccaaatatttcttctggtagtgacatcatggtcgaatacgatgttcattatcctttgagtcaatcactggactcaagctccgcagcccccccccccccctttcctggaaaagatgacttgtgaatgtctaaaatcagatgaagacaaaatgaaaccagttaccacatgagtgagcaaggtgctaaggattacaatgattctggggaattcaaaggagatccatcaacacacaacccttcccctggtggaagttggagaatttggcctttctccttgaggagagcaggatctagcaagtctatgttgccgccttctccaagtaatgccaacaacgctacttttgttaattctccagagaatacgactagtactgatatgaacaaaaatgagctcaaacccaatttaatgaaaaagaaggttaaggaaatgactccaacctctgaacagctagcctcattgaatctgaaggatgggatgaatactgtaaccttcaccttctctacagctgtgctggggaagcagcaggttgactgtcgaatctatttgtggaaatggaacactcgtatagtgatctcagatgtggatggtacaattacaaggtcagatgttcttggtcagttcatgcctttggttggtattgactggtcacagacaggtgttgcacatttattctccgctatcaaggaaaatggttatcaactgctttttctcagtgctcgttcaatttctcaggcctatattacacggcaattcttactaaaccttaaacaggatggaaaagttttaccagatggtcctgttgttatttcccctgatggactttttccctctctatatcgagaagttattaggagggttcctcatgaattcaaaattgcatgcttagaggacatcaaggcactttttccttctgatagcagtccattctatgctggttttggtaatagggatactgatgaaatcagctaccttaaggttggaattcccctaggaaaaatcttcattattaatcccaggggagaggtggttgtaaaccgccgtgttgacgcaaaatcatatacttctctgcatgctcttgtgaatggaatgttcccccctacgagctcttctgagcaggaggactttaattcatggaatttctggaaactaccccctcctgccatagatatttgaaagggtcccatggatttttaggctcaattatgcagcctagatatgaatgggcgcaggcggtgctgctccaaaaattatatgggttatgtatctgagcccaatgagaaccacctgattctgttgatgacttgtactgtggattgattaatcggaacgcataacataatttggtggatggaattcgtatgaaagagcaagatggaacttctttcctgtttgatgctgcgagatcagatccatttttgtccttggttagttataatgttaaccggtgaccactaaagtcatggaatcacacacacatttgatatcatttcttgattatagatagattcgtgcacagttaagtc

SEQ ID NO: 3742 - DNA, 2428 bp, Glycine max
gtgggagcacacacttctacagaatagtatggatagagagttacatgaattgaataaacgcttgcagcagaaagagtctgagatgaagctttttggaatatctgatgctgaagtactcaagcagcactttggaagaaagataacggaattagaggatgagtcgagtcagctacgtaggccccccccagtagtgcagagagagagagattgtcttttggctgaagttgaaaatcttgctgccaatactgatggacaaacacagaaattagaggatatccatgcccaaaaattgaaaacacttgaagcacagattctggatctgaagaagaagcaagagagtcaggtccaacttctgaagcaaaagcaaaaaagtgatgaagcagcaaagagactgcaagatgaaatacagtgtataaaagcccaaaaggttcaactgcagcaaaggataaaacaagaagccgaacagtttcggcagtggaaagcgtctagagagaaagagctgttgcaattaaagaaggagggaagaagaaatgagtatgaaagacacaagctgcaggctttaaatcagcggcagaaattggttcttcagagaaaaactgaagaagctgcaatggccaccaagaggttaaaggagttgttagaagcacgtaaaacttccagccgagaaactttagttacaatgaatggaagtggagcaaatggtcagagcaatgagaaatctttacaacggtggcttgatcatgaactagaagtcatggtaaaagagcatgaagtccgttttgagtatgagaaacagagccaagtgcgagctgcccttgcagaggaattagccatgctgaagcaagtaaatgagtttgctgcaaagggtcgcggtcctccaagaaagaatggatttgccagggcatcctccatgtcaccaaatgcaagaatggccagaatagcttcacttgagaacatgctgagcatatcatctaattcacttgtagcaatggcttctcaactttctgaggcagaagaaagagaacgagccttctctaatcgtggacgctggaatcagttgcgctctatgggagaagccaagaatttgcttcaatatatgtttaattctgttgcagatgctaggtgccaactctgggagaaggacatggagatcagggaaatgaaagatcaaatcaaagaacttgttggtctcttacggcaaagcgagatgaagagaaaggaagttgagaaggagctaaaagtaagagagcaagctgttggaaccacattggctacaccaccatctggagactccccaaatccatcgaaacaatatgctgaagacatgaaggggctcttatcaccagtgtctatgccagtgcctaaacagctaaaatacacgccaggggttgccaatggtttggtgagagaatcagcagcatttgtagatcagggtagaaggatggtacccatcggacagttgtcaatgaaaaaactagcaattgtaggacaagcttctggaaagttatggaggtggaaaagaagtcatcatcagtggttactacagttcaagtggaagtggcagaaaccatggagactttcagaatggatacgacacagtgatgagacaatcatgagaacaaaaccacgctcacaggctttgtcacgtatcaggtgatcttttttaggatcagcccagttcatgtggctcggtatctttcgacccacaagaattatcctagacacatggcattggaaataacagggcactaggagcagtgtaatataattggttgctgaagaaatgtatatacctgtcagtattgaataatgctgtccagatcttggaaattttgccataatttgtgcatatggagcatcttggaggtatgttgaaatgtgatgtttggacggagatacccaaataatgaaaaaaacaaagatgtcgcttgcttgaagtcagtcgtagattctggacagaaactatctttggaaaatagtctctgttcatactaacactacaaagaaacaatgggaagattcttttgtcaagtcttgggaagcttattgtgtactttattccgtactgcaaactcttacgctcctattgtgtttaagcaaattgattttgttgataggttatgtgttgtagcatttgtcacataacagaaggaaattcttgtgtagttttttttttttaaattctctagtgcttcttgtgtgtaaagaacattagctactatattgaaagatattctaccatacagattgtataataacacccccccctgtctcatgtcctcttaagcctgctaataagggcgactctaagtaaagatatttgtcaagtctgcctgctattttgatgatgctaaaaaatctttacagagaagaaaaagaatttaactttttgcctaaaaaaaaaaaaaaaaaaaaaacaaaaacccag

SEQ ID NO: 3743 - DNA, 1548 bp, Glycine max
tgggaccgggccccccctccggtcagctacgtaggccccccccccaacttccccaacacgttgtgttactctcttcgtcttcgtcgttttcataccccttctcccttcaaaccctgggaaaattctcgaacaatgccccttctccctccgtaactcaccaatccatccataaatacacacacaaacattttcattcaacatttttttattatttctttgtatcggtctaatatccacacatttccacattaaataaatacacacacattttagttttttcatgtacccattcgcgtgcgatagaattttctagagcgagagatttcggcgtaatgggtccaaacgcggcggcggcgaaacaagcggagaaactccgaattgacggcaacacttacttcaaaaaagaccgtttcggtgccgccatcgacgcttacaccgaggcgattacgctgtgccctaatgttccggtttattggacgaatcgcgcgctgtgccatctcaagcgcaatgattgggagagagtagaggaagattctcggaaggcaattcagttggacagcaattcagttaaggcccactatatgttggggcttgcattgctacagagacaagaatctgccaagggaatcaaagaattggagaaggctttggatcttggaagaggtgccaatcccaagggctatatggtagaagaaatatggcaagagcttgcaaaggcaaaataccttgagtgggagcgatcatcgtccaaacgatcatgggaattgcagagcttgaaagaagcttgtgagtcggctttgaaggaaaaacattttcttgattactcccaaatggaaggatttgtggatgacgctactacttcccattcagaacaattagaggctttagaaagagtcttcaatacagctgcagaagctgacatacctactgaggtgccagattatttgtgctgtagaatcacactcgacatttttcatgatcctgttatcactccaagtggacttacatatgagagagctgtgattcttgaacatcttcagaaggttggtaaattcgacccaatcacacgagaaccccttgatccatcacagttagtgccaaacttggccattaaggaagcggtggaggcattcttggacaaacatggatgggcctacaagatagattaacgaaagatcaccttgcaaattaacaatgtcttggtaggtttgtctgttgagcaatgcagcaggatgttgtgttctgcaagtgtggccaaagttgtttgctttaattgttaattatgtatgcagtttccttgggggcctgacttttgaacatcttattatgaagtatatatatgcatggttgactgtcatacattgtgtaaatatagtagtaaacataccaatgcctgatgagactgtttcatttgtctcataaaatcaaaattatttaacccaaaaaaaaaaaaaaaaagcatttttgtaagtttaaagtatttcatacttttccctaaaaacaaaattacttcatacatggaagataaatttattttacttactgcac

SEQ ID NO: 3744 - DNA, 1141 bp, Glycine max
  misc_feature (1091)..(1091): n is a, c, g, or t
ggtccggattcccgcgtcgacccacgcgtccgcttgctgctgtggagtacattgatgacatttacaagttctacaaacttgttgagaacgagagccacccccacgactacattgattcacaacctgaaataaatgagaggatgagagctattctggttgattggctgatagacgttcacaccaagtttgaactttctctagagaccctttacctgaccatcaacataattgatcggtttttagcagttaagacagttccaaggagggaactgcaattggttggcatcagtgccatgctgatggcatccaaatatgaagaaatctggccccctgaggttaatgattcggcacgaggctcagatagggcttacactcatgaacagatactggccatggagaaaaccatattaaataagctggaatggactttgactgtgcctacaccttttgttttcctagttcgttttatcaaggcagcggtcccagatcaggagttggaaaacatggctcattttatgtctgagttgggaatgatgaactatgcaaccttaatgtactgcccatcaatggttgctgcctcagcagtgtttgcagcaagatgcactctgaacaaggctcccctttggaatgagacacttaagctgcacactggttactcacaagagcaactcatggattgtgctagactattggtggggttccattccactcttgggaatggaaagcttagggttgtgtacagaaagtactctgaccctcagaagggtgcagttgctgtgctcccaccagctaaacttctgtctgaaggctctgcttcccaacatagttgaaagaagaaaaggtggggaggagcagtgataatatagagccttttatgattcagcaaatttgtatttttattttcacaaggtacaagagttgatttttatataagttgcaagttgtgcacttgccaattgtcacaatatcatatctaacttctataatggggttcacgttcaaaaaaaaaaaaaaaaaatttaaaaagacgggcccagtatactttgttgctaacattgttatgttgtctgccaacataaaatgtttcttgnaagttgacgcaaccaacttttgaaacatttcttgaaacaaccaattttat

SEQ ID NO: 3745 - DNA, 2142 bp, Glycine max
tcgattcgaccgcccacgcgtccgtacggctgcgagaagacgacagaaggggggggaagaagagataggggtggtggcaatgtgttaccaatatcatatcatatattctttcatcttcttgggttagggttctacacttgcaatctcctttcacacccacccacccttcaaccatttcaattccttccctcacccaaaccgcactatcgttcttcgacacggtcctgtttattaagcggtttggataaaagaatagaagcgtaaaatggccttcgtagcacatcaacctcagggtttgtttgtgacatcttcctcgaggcgtttgccatggagcaaaaggctgaagttgaagcagtgtttaacaaaacatcacatgattggaagaactgaccggcattgcctagtaaagtggaatgcttgtttaagtttagggcctccttgcttttgtgtatccaagttcaaacctttaaggatttcaggcttcaaaggcagcacccaaaatgatgattcaggaatcagagctaatcggttgaaggcacccaatacttctgttagattaggagagagcggggaggctcacaatgttccactgtcttatgcatctgaaacaaatgatagcattgcaacatcatctgctattcatagacttttcaataaatggctgacaatgttgcgcacgcaaccatcaagccaagaagtggagaaattttttgaagaacctacatcagcaggaattttaccaaaaactcaacaagggactcaaattaaggaaagccgtgcggttttgaaggtggcatggtcccattttctggccctcgatgcaacaataaagattcctttgctggtatttgttcctctctacctggctgttaatgtaaaatatggtgctgaagtttccaaggagctaactcctttatggattttgggcccatttattgtggctacccaagtcttggcaatccgatggttatgtgcactctatgttttcagcttcaaacagactgtcaaattactcaagaattctccctcttactgcattttggcccacagctacgttttccgtggcaagctcaaagaggatatctcaacttatgttctgcagcctatattgagcgtaaaaaatagagactataaacagctaacaagaaaaaagttgaaagaattgcaggaatggatagtggagatgtatcttgattatgtggaatcgatctggccctactattgtcgaacaatcagatttttgaagagggctaatcttatttaggtttgaaaattgaaaatattcttaggggtagtctcctgaaaggctaaagagagggatgaaggagggaatactacgtagcgttgaaatttttaaatgagatatggccaatcccattttctgttgggttttggtgttgagcaagttaatggtcatgaggaagttaagtttctaattcatgttatattgaaaacgttactttattcttagattagattgtaatattttttctaatcgctgcttttgttttgaggttctgtgcgagattgattctattctgcaactagtactatggcagagtttctccccaaccctccatcctttgtattattatgttaacttgggaaactattgatgtgtgggaacctcgacctggttgaattggcgattgataaggcttggccgagtgagtgttcatgcattgtcaacctctaaaatagcctaagaagatatgtaatgttttggggcttctttgccccactgagtgtaatatttgtcagccagaatccggagaatgcattgcttgtagaatgaccctgcatagtgaaggaagaaagcggagatgacgaatcacctcttgattagggatttttggctgaattctgacttctagagataaaacagtgaagagagagagagaattgaagttgtctttgcaacatggaaacatttcattaactatgatggttggatctctgctcgttgctaccctttattaccgcttttgggagggtgttggaagctcctgctcttgcgaatcttccaggataaattgaaaatatcaaaagacttaaattatgttttcagttcttaatatttggataattatttttttagtcttttaaaaatgtttttattagttgctcactcgtgtctagttc

SEQ ID NO: 3746 - DNA, 1613 bp, Glycine max
attcttcaacaggatctcagcatcttcttcatggcatacagatgtaataagtgccattatgaactgctctagactttcagctgcaggaaatacagaaatgacatcctcacttaaatgttctgcactatccaaaaagggtttcagtctgtggccataaagtttgtgaactaatgatgcagatacaacagttgcttgaggatgcctctgagataaaataggcaagaaagatgctgattccttttttaggaacttcttgagttcttctgcaagcaatgccaagggatgctcatgtgacatatctactctgtcaacaacttgcactgtccttgaaaatgcattcttaattgatgatgatatatatatctctatctgatcacgatcactaattggcaaggactgtgtgctagtttctggttcttccagtagaagcctcctggtaatcattgcaactgctacaatcttttccatagttgctgaaccctcattgaaatgcagatggtaatctccaagctgcttgtcagtccatctctgaattggtgttaagaaagactgtaagaaagacatatctcgttcgccttcaaccttagaatgcaagcttttcaagtgcaacctctcttgttggcctctttgctccatcagtggtattttatttaattgctcaagagcatgcagcaaaaccccatgctcccttgtgataacatactgacgaaatagaacccatgcatacctggcgggatggattgtctccgtgattcctaaaactctccaagtcgacttcaaaagttccagaatttcttctacttcctctgtcagctttccttcatctagcatgtcaaatacacttaaaagcaatttctcatatagtctaacatttaagtggttaccatctgcccaatggcatatttcaccagttaagtcaccccgagctggcctctcagcaagtggaatggcaatctcccttagggatctcaagcattctgtcctttgaagttcaccagttgaagatgggagaaactctgccggacgcgtgggtcgagcccgggaattccgcaatcttggccaacagaatcctcaactcatttgtcttgcgtccagattcaccaaatccaacggcagggtgattaacaagcccctcctctaaaacttttaactgcctcttttgccaacgtataaaagccttcttatcagaaaattctgaacgtgaaatacagcaaagcaactccaaaggaatcaatagagtatccatccttttccccacctttcccaccagagcatttagcaagccttgtcttgttctgatatccattgactcagatatctccatttgaacacgcatggtttctaacaagccaactaatccaggagcattctgagactgggatacaacacttccacttttgctgcgcccaagcttcctgatcaagctggattttttatccttctttttttcttttgatgggacaatcagaccccctgtagctccagcacaacccaagatgatctcatatgctgtttcacgaagatcatcatctgagatgcctgtggagaaagaaggcaatttcactgcaagatcagaagcatcattaagagtccttttagaactgaagccgaaa

SEQ ID NO: 3747 - DNA, 1405 bp, Glycine max
tttttttttttttttttataataattaaaatataattttataaatgtgatttattttgttcaatgcaaaaactaattaattttaaacccgtaaattttaaaaatcgaactaaagatatgaatacttatctaaaattacattagctgatatttttaaatctaacataaatccaaataaactaatgcacaaaactaatattaaaaatcatggagttaaaaagctacattttaactcttattctccaagctcggatgttccctgtgcacagaaccaaaaagtacaggtaaaattttatacacaattatcctagaggattctttcatgcacccccaagtatgccatgtattagacaatcagcgagcatagaagctttcaacttgcaggctcgtatttgcaaatacaatcatatatgttccctttaaccaatttttctgccaatctctggtttttcaccattgcaagctttaaagcatcctgcttaaacagagcatttaggttagtatgaagtgctctccccatcccttccaaaattatcagatcagcatcttttgcagcagcagctagctcagagctgacctgtcttaggtctatacatggactgccacacccgttctcaacaaccatcaaggggactgaagatgaatttttcttagagctgtctgaagtattaatcattgcatccacaagcaagcctccagcttcagcagctcgcctaagaatgtcacaatgcttggcagcttcagctacaatatcaggaagctccattgcagtgacatcatttaaggcaggaagtgagtttgcaaccagaactacttcagttccacggcggaggagctccctagccagtggaagcatccctagaacaatgtcagcacctgagttatctacgaaaagtaaagccctcttatgatggggcattttcttgtccccggtccctaacattctctctttaaagtcatcaaaatcatccacccgccaaggtctgcacattttattgcggctcattctataaatttcaataatagttcctttatgatagagatccacacatgcacgagatccccagtcaaaaatatttgctgcaagaacaccttcaattagtgtaagcagccttgattcctcgtccgggcgggcgggggccaccagcaagtcaggtaaaacagcaagcgatgcctcattttccctctgctttatacttctataggcatcagcaaactgaaattccctcaagcactcttccctcatttccaagagattggcgaggcctaacttcccatatgctgaaggctcctccatcagccttgccaagtgagctgaaaatgcacgagcaaaagcatcaccccttcttttggcatcatcagttccaccttcacttgctacagccttgtccacaagatctggcaag

SEQ ID NO: 3748 - DNA, 1248 bp, Glycine max
ttttttttttttttttttttttttttttttttttttttttcgttaaaaagcatggaatttaaaagctagatttgaactctattattctccaagctctgtatggatgttcgctgtgcccagatacaaaaagtacaaggtaaaattttatacacaattctcctagaggattcttctttcatgtacccccaaatatgcccgaatgaattagacaatgagcacgttcatagaagctttcaacttgcaggctcgtatttgcaaatacagtcgtatatgttccctttaaccaatttttcagccaatctctggtttttcaccattgcaagctttaaagcatcacgcttaaaccgagcatttaggttagtatgaagtgctctccccatcccttccaaaattatcagatcagcatcttttgcagcagcagctagctcagagctgacctgtcttaagtctatacatggactaccacacccgttctcaacaaccatcaaggggactgaagaaggattttccttagagctgtctgaagtattaatcattgcatccacaagcaagcctccagcttcagcagctcgccttagaatgtcacaatgcttggcagcctcagctacaatatctggaagctccattgcagtgacatcatttaaggcaggaagtgagtttgcaaccagaactacttcagttccacgacggaggagctccctagccagtggaagcatccctagaacaatgtcagcacctgagttatctacaaaaagtaaagccctcttatgacagggcattttcattctctctttaaactcatcaaaatcatccacccgccaaggtctacgcattttattgcgactcattctataaatttcgataatagttcctttatgatagagatccacacatgcacgagatccccaatcaaaaatatttgctgcaagaacaccttcaattagcgtaagcaaccttgattcctcatccatactatcaagttccaccagcaagtcaggtaaaacagcaagcgatgcctcattttccctctgctttatacttctataggcatcagcaaactgaaattccctcaagcactcttccctcatttccaagagattggcgaggcctaacttcccatatgctgaaggcgccgccgcctgccttgccgagtgagctcccaatgcacgagccccagcatccccccttcttttggcatcatcagttccaccttcacttgctacagccttgtccacaagatctggcacg

SEQ ID NO: 3749 - DNA, 1510 bp, Glycine max
gttggtaatgagaaatgaggattgtaggtatcagttaagttagctttatctggaactgctggttctcacttctcatactctcgaagcagagaagttaacaaccaatggccaccatcattgcttcttcctcatccactgtgctcttctctgcatcctcttcctacctcctcccattttcacacccttctacttcgcgcctttctttctcttcttccctttcctcctcctcctcttctctatcaatttctccttcttttttatcatacacttcttcaaattctacacactttgccactcatgctgccttcagcatcagtgccagcgccgccgagaagaagaaggtgctcatcgtcaataccaacagcggcgggcatgccatcattggcttttactttgcaaaggagcttcttggtgctggccactctgtcaccatactcactgttggcgatgaaggctcagacaagatgaagaaacctcctttcaacagattctcagaaattgtgagtgctggagggcgcacagtgtggggaaatccagcacaagtagggagtgttgtaggaggggaagtgtttgatgtggtcttggacaacaatggcaaggatcttgggactgtgaggccggtgattgattgggctaagagttcaggtgtcaagcaattcctgttcatcagcagtgctggaatctacaaaccaacagatgaacctccacatgttgaaggggatgttgttaaagcagatgctggtcatgttgaagtggagaaatacattgaagaaacttatggaagttgggcagtgttccggccacagtacatgattgggtctggcaacaacaaagactgtgaggagtggttttttgacaggattgttcgggacagacctgtgccaattcctggctcgggactgcaactcagtaacatagctcatgttagggacttatcttcaatgcttactcttgctgttgagaatccagaagctgcaaatcagaccattttcaactgtgtgagtgaccgtgcagtgactctagacggaatagccaaactatgtgctcaagctgcagggcgcccggttaacattgtgcattatgatccaaaagctgttggagttgatgcaaagaaggctttccctttccgcacctatcacttctatgcagaacctagagcagccaaagctaaattgggatggcaatcaaccacaaacctccctgaagacctaaaagaacggtttgaggagtacgtaaagattgggagagataagaaatccatccagttcgagctagatgataagatattggaggcattgaaggttccggtgtcagtgtgatccatttatatccaaaacaattatcagacaagactttaagattttttggtcgctcaattcaaatgatgtgcattgaagaaagttacttctctccttgttaaaataaaacaaaataaacttatgatgcttaagtagctcagttaggatatcatgactaaaatattccaaattcaaactataaattaagccct

SEQ ID NO: 3750 - DNA, 1388 bp, Glycine max
atcccaaaatcatcgtgtcagctacgtaggccccccccccccccaaaattctcaacgccgctcccacttctctccctctctattgcagcatggtgtcttcctcccaacacattctggtcaccggtggtgccggtttcattggcacccacaccgtcgttcagcttctcaaagctggcttcagcgtttcaataatcgacaatttcgataactccgtcatggaagcagtggaccgcgtccgccaagtggttggccctctgctttctcagaacctccaattcacccagggcgatctccggaatagggatgacttggagaaactcttctccaaaacaacatttgatgccgtgatccactttgctggcttgaaagcggttgctgaaagcgttgcgaagccccgtcgctattttgattttaatttggttggcaccatcaacctctacgaatttatggcaaagtataattgcaaaaagatggttttctcatcatctgcaaccgtttatggccaacctgaaaagataccgtgtgaggaggatttcaagttacaagctatgaatccctatggacggaccaagcttttcctggaagaaattgcccgagatattcagaaagctgaaccagaatggaagatcatattactgagatacttcaatccagttggggctcatgaaagtggcaaactcggtgaagatcccaagggcatcccaaataacctcatgccttacattcagcaagtagctgttggaagattgactgaactcaatgtatacggtcatgattatccaacgagggatggctctgcgatccgggactatatccatgtgatggacttggcagatggccatattgctgccctgcgaaagctcttcacaacggagaacataggttgtactgcttacaacctgggaactggtcgtggaacatctgtgcttgaaatggttgcagcatttgaaaaggcttctggcaagaaaattccagtaaaattatgtccaagaagaccgggagatgcgactgaggtttatgcatctacagagagagctgagaaagaacttggttggaaggcaaactatggtgtggaggagatgtgcagggaccaatggaattgggcaaagaacaatccctggggttacgcggggaagccttgaattagcttgagaaatatactgctcatctacgaatgcttttcacataaataggcatctcttatatagaatactttcatgttggatgatttgtttaggcagttcgttgtataatcttgacaataaaaatttggcagcatttcaagaagttaaagctatgtatttaaacaatatctttaaattagactggccattgatttgatattgagaaaagtttatccagtcggccatcatttttaaaaggaaaaa

SEQ ID NO: 3751 - DNA, 947 bp, Glycine max
ttcaagaaggctgccaagttattttttgattttatttcaaccttcaccacctatgagctttgggccctcgacacctggggattttatactgttttgaccagcattatatcattggatagagtttccctaaagcaaaaggtagtagatgctccagagatcttgacagtgattggcaaaatcccatatctttcagagtttttgaactccttatatgattgccaatacaagtcttttttctcagcatttgctggcctgacggagcaaattaagttggaccgctatctgcatccacacttccgttattacatgagggaggtcagaacagttgtttattcccaatttttggaatcttacaagagtgtgacaattgaagccatggcaaaagcctttggagtgacagtagatttcattgatgtggagctatcacgttttattgcagcagggaagcttcattgtaagattgataaagttgcaggtgttcttgaaactaatcgccctgatgctaagaatgctctttaccaagcaactattaagcaaggggacttcctgctgaatcggatccagaaattgtcacgtgtgatagatctttaggtcatctcttgcattttagattaaaatttactggaaaggcagagataatgacaatttcaaatttgaaggacatccttttgaatacatttctgtagtccatttgatttccaaatatgaacggttgaacttgctgcatccaaatatgtcaatcagttttcaattatttctgtgatgaatgtattcaattgtttatctgattgcgtataggatatgactggctgatgcaaacacatgtttgatcattgtgcttgccttcgacgagatttcccttctatcccttcacccgatttcttccgagtcctgctaggttgaaacggaggacttggtaccctatataatcagtgagtgttacccat

SEQ ID NO: 3752 - DNA, 1465 bp, Glycine max
tcagctacgtaggcccccctaataaatataaactaggaatagctattttgttggaaggaggtaaaggaagttcgtgacaaaagcggcaatggaaggagaagagggttcccagcagccacagttggtgctcggggacaagctattccttcttcgacaacccgatgttcaagacattgacaaggttcgctacaaggaggatgttttcactcacatcaaccaaaacgatatggtccccttgtatgaaaccctagtggccgattccgtgttggacttggatcgtgccctcttggactctatgcgcgctaaaattcacgatgagctcgccaacctcgacgaaaagattgctgatgctgaggaaaacttaggagagagtgaagttcgtgaggctcacttggcaaaatccttgtttttcatccggattatggacaaggagaaagccttggaacatctcaaggtaacagaaaccaagacagttgctgttggccagaaaatggacttggtgttttatacattgcagcttggtttctttgacatggattttgatctcatttccaagagcattgacaaagccaaaaacttgtttgaagaaggtggtgattgggaaaggaagaataggctgaaagtgtacgaaggcctgtactgcatgtccactcgaaatttcaagaaggctgccaagttgtttttggattctatttcaacctttaccacctatgaactttttccctatgacacctttatattttatacagttttgaccagcattatatcattggatagagtttccctaaagcaaaaggtagtggatgctccagagatcttgacagtgattggcaaaatcccatatctttcagagtttttgaactccttatatgattgtcaatacaagtcttttttctcagcatttgctggcctgacggagcaaattaagttggaccgctatctgcatccacacttccgatattacatgagggaggtcagaaccgttgtttattcccaatttttggaatcttacaagagtgtgacaattgaagccatggcaaaagcctttggagtgacagaggatttcattgatgtggagctatcacgctttattgcagcagggaagcttcattgtaagattgataaagttgaaggtgttcttgaaactaatcgccctgatgctaagaatgctctttaccaagcaactattaagcaaggggacttcctattgaatcggatccagaaattgtcacgtgtgatagatctttaggtcattttttgcattttagactaaaagtttattggaaaggcagagataacgacaatttcacggtattttactacgagggtgaggcacggcatttctgtagtccatttgatgtgcaaatatgattaattaaatttgtcaaatccaaatatgtcaatcagttttcaattgtttaaaaaaaaaaaaaaaaaactcgagactagttctctctctctctct

SEQ ID NO: 3753 - DNA, 1977 bp, Glycine max
tgatgcgtgggcggacgcgtgggttttgaagccatagactgtgatctgtgatatggaaattgggaactcgtgttatgtaaagatgtgatgtggtgtggctagtgtgaaccgtttgcttgcttcgtgtatgtacattctctccggaggcaccgtcgtgagcttttctctctggtaggtccgtgttgctgaaacctttttgacctttccaataaagcatttgtttcaccctatcaatgagaggaaccattggaataaggattccaaaccccaatatttccaatgccaccagaaaaaccctagttccattttctacatcttccggttttggtggtggcggacgtggtcgtggtcgtggagggtctcttcctggttcagggctgttcaataacaatgaaagagctccagttgagcctaattccagtgagtccaaatctgacacaacagagccacccattcctcctggttctggtcttggccatggccgtggcaagccaatgcctccatcaggtcttccttctttctcatcatttatatcttccataaatcagccacctgctggtcgtggccgaggtactgcacctcatcctcaacatgatttgcagccaccagactctggacccaaaaaacccattttcttcaaaagagaggatagtgtttctccaacagcgtcaaatgattttttgccacccaaaagatctgttgatcatgcgcatgataacaaacttccaggcagcataccaggggtgttgtctggacttggacgaggaaagtccatgaaacaaccagatctggaaacacaagttacagaagaaaataggcatcttcgcactcggcaagctcctggtgctgcttcatctgagactgtgcccaagagatcgccaataccaagccaggaagatgcaacgaggaatgcactgaaaattttgtcacatggtaaggatgatggaagtgatactggtagaggaagagaatatggagggagaggtgggttggatcgaggcaggggcagaggcagaggcaggggaagaggtcgaggcatgggaaggggaaggttcgtagagagggatgtggatgagaaggttatggatacagatgattatgctacagggctatatgcaggagatgatgcagatggtgaaaaattagccagaaaggttgggcctgagattatgaatcagttgactgaaggatttgaggagatgactagtagagttttaccatcgccattagaggacgagtttttggatgcactagacatcaattatgcaattgaatttgagccagaatatttggtggagtttgataatccagacattgatgagaaggaaccaatttcactacgggatgcacttgagaaggcaaaaccattcttgatgtcgtatgaggggattcaaagtcaggaagagtgggaggaaataatggaagagacaatggcgcgtgttccattgttgaaaaagattattgatcactacagtggaccagatagggtaactgcaaagaagcaacaagaagaattagaaagagttgctaaaactcttcctggaagtgtaccatcttcagtgaaacaatttactaatcgtgctgttatttctcttcagagcaacccaggctggggatttgacaagaaatgtcatttcatggataagctggtttgggaagtgtctcagcattacaagtgacctactggcctgcttgcattttatttttattttactttgagttttgatgaaacaaactgctactactcttgtaataatgagttgttgtagcgttattgctagcaattgttacaactctcgtatactttgtaataaatgaattatcattttaattagactttcaaaggtgataaactgtgggatgataattgatgattaggaaattaatggttaaaattttgataatttcataatatgtatgtattttttcagagtgttaattgttttgtgaattaatgattattgttgagtgtaaaaa

SEQ ID NO: 3754 - DNA, 2174 bp, Glycine max
  misc_feature (2156)..(2157): n is a, c, g, or t
  misc_feature (2170)..(2172): n is a, c, g, or t
gctgtaattgcatagggacacaacatctctatagctatatgcagctaggagactcaagtgtgttggagatctcctcccatacccagcctgagatggcggtgacggcagcagtgttgccaccagaagaagtagcccatgatggcagcgacaacagtggtgatggtggtggtggtgagatgattgggatggacttggatgcaaattcaggtgaaggaaatgaaggtaataataagatgagctttggagggaaccggtggccccgccaagaaactttggctctcttgaagataaggtcggatatggatacagtttttcgagattcaagtcttaaaggtccactttgggaagaagtttcaaggaaattggcagaacttggatatcaaagaagcgcaaagaagtgcaaggaaaaatttgagaacgtgtacaagttcaacaagagaaccaaagacaacaaaagtggcaaatcacatggaaaaacctataaattctttgatcaattacaagcccttgagaaccaattcacaacagtctcttacccgccaaaaccacaacctacttctactttggcaacaacaaacccattgacattgccaacaaggccaagtgatcatggtaacaaagttatctcttatgtcacaacttttccttccacaaaccctactctcatttcaccttctccacaaaccaacactaccaccaccaccaccacaacaacatccacaaccaaccctagagattcatcacgaccacaaaccaacaacaacaataatagtgtcacacactctttgccaaacatgaacacctctttctctaccaccactgcctccacctcatccgccacggcggccccccccccccccgaagagaggtataggaggaagagaaagtggaaggactacttcaggaggctcactaggaaggtcttgttgaagcaagaggagatgcaaaagaagttcttggaagccatggaccaaagggagagggaaagggtggcacaacaagacaattggaggatgcaagaaatggcaaggatcaatagggagcatgagattcttgttcaagagagatcaacagcagcagccaaagatgctacagtcattgcattattgcaaaagatgtatggccaacaaaaccccacacaacaagttgaagtagagccaccaccacaacagaagcaaacaattccccaatcgctgcctccaatattaatgccaaacaataatttcgaggtcaagaaaataaataatggtcacagtgttactagtactactactggtactgttgctactgctgctactactactactacttcgccggtgaattcttcttcttctcggtggccgaaggcggaagttcatgctttgataaggataaggacaagtctagaaaccaagtatcaagagaatggaccaaaagctccattgtgggaagatatctcaattgcaatgcaaaggcttgggtacaaccggagtgcaaagagatgcaaggaaaaatgggagaacatcaacaagtacttcaagagagtgagggagagtagcaaagaaaggcgtgaagatagcaagacatgtccctatttccacgagcttgaagctctatacaaagaaaagagcaaatcgtccaagaacccctttggcatcttccagaatatgaagcctaatgagatgatgctgatgatgacggagccactgatggtgcaaccggagcaacaatggaggcccccacctcaatcattggaagagggtgtagggatggagaatgcaagtgaagaatatcatgaaaatgaagaaaatggtggtgacgatgatgataacattgaagaggatggagatagtgtggaagatgaaggagcaaacccgtgtgagattgcgacaaataattaaacgtgcttcagtggacaccgttgaagtagacaagataaggaattttctgaatggagaaaaattacgtgtgtggttaaatttacttttacttatttcggaaaaaatagtcctttattttttttatcatttttttagacttcaaattgtgattatttcttaaggaaaacaaatgttgggtatagtatagtcaaaaaaagtttatttttcttatggggtcgtaagttgtaacacctgcaaaaaaaaaaaattgtcataaattgttgacattaaagacanngcacaaacacctnnnct

SEQ ID NO: 3755 - DNA, 2397 bp, Glycine max
accgttcaccacatatagtgtgggttggggttagcttcgcgattcttatttctctctttaactctctctctctctcgtcctcgcggatggagagagagaaagtaagagagaaagagcggtggttggtggttttggtttggtgaagttcgattcgatgcgatgcgattgcgttggggattttgattctctctctctcactgtgcggtctctaattcgcttggtgcaggtcgggaaccggttttcgcgcggaatggaggaacggtcgccggcggcgaattggatcccgccttgcatcaactgaatcggaggccgcggtgaagctttgcctcgttttccgctcagatctcatctccgagattctaccaccagtattttttaaatttattttaatctctgcttatcagatccgaaacgcttctagatttaagtttatcgtctctatgcagaaagtgtgatttatgcggtagatcccgatgcatagaatctacatctaagagaaatagttttagttaaaaagcttctgatgtgctttttccttgtttggatttttacttgacctgcttcctttcattgattaataatcaagctgaaatttttgatatttgagaactgaaataaataatcttggatttattacaataatgaatttactgtatcggtataggttaagctaattgaggtgattgcgattcgattgggaaaaaaaaaacattttttaggttttctgatggtttttgagccttggttgaattgaattgcatgccacggttgcaagtgttttatgtgatgcattccattgcgatgcttgtgcttattctggttcgagctattttatattgtttgatattgcttttagaacagaaggcttcaagtctatgaagcatttgtaagtgaattgtgtagcaggaattgatgacctgtttggggcatgatttgagtatctggccccccccccccctagcttctagacatagaaacccaagttaagacttgaggatggcttcaaattgcatactagctatgtcaaagcagttgatcttgtttgtgtccattcgccttgagattgatttgaatgtttgatttataaagcaatgggactttcatatatcaaaatgcttcgcgacttcagtcaatttatttctaaaatcatgtgaattgaagtaacattttcctgttgtagcttaagatgaatatatcccatgcggatagtatttattactctacctggttctaacacttatccaataaaaacctgatcttcatcttctaatatgttgtcaaataagaactttgagaaacccacttgtgtaaccgagagttcttattatttctgggatggggcagtggcctcaaggatatctttttatgattatgagaaattaagaatgtgattgaaagtctagaagagatttacttattctatgtttcttgccagttatggtgcattgattgtttgtttcttttttctcagttaacagactgctaactttattaattcatttactttgtcttgtcttgtaagttagaagaaattatgaatgctaagttaacctatttgttctgatgtatgatgtttttctgatcattggatctcggactaattaattcttcaatgattgatgcataatactataacacatagcaggttggccgctattctaaagttgtgaaatacacatggaataatttatactccacatttataaatgctgaaaataaaacccacacttttaagatatttatatgattaaaaatcaggaattgaagcttaataatactttatgtgagtgatgtcaataacaatagagagaacagagcagggtcacagactaaaaagagaacagaagtgagcaggtagcagaggtctttgctttgctagaaaatgctgaaagatgccgggatacatgttggagaaaagtgagtgtttgtccagagaatgatataaaggattagagtgaactgaacagaggttgcagaggcgggtaggaaaatgctggaaatcaccagagaagaacggtgttcgtctagggagacaacacaaagttatgtcactgaaagcatagggtttcagtttgaaccttttgctttaatgaaaggggatgagaaataattatgtgtctgccccctaaacagctgtaaatgatgttatttagtgcagtgaaattggatttttgatgctgttacctgtcaagccacctgcgattttgttattcaaacccctatagaggtgatgaccgctgcattgccaaactgtaatgcaggttcttctatgtagcgtcaaatggtgtgcccccatgccatgatatagtggcatgatctagcactattgacgtctgtggatttgtgtgttagttatgtatcgtatggaaaaatgcctagatacataatttccaaaaa

SEQ ID NO: 3756 - DNA, 1801 bp, Glycine max
  misc_feature (1563)..(1563): n is a, c, g, or t
  misc_feature (1567)..(1567): n is a, c, g, or t
  misc_feature (1619)..(1619): n is a, c, g, or t
  misc_feature (1624)..(1624): n is a, c, g, or t
  misc_feature (1705)..(1705): n is a, c, g, or t
  misc_feature (1725)..(1725): n is a, c, g, or t
  misc_feature (1744)..(1744): n is a, c, g, or t
  misc_feature (1763)..(1763): n is a, c, g, or t
  misc_feature (1782)..(1782): n is a, c, g, or t
  misc_feature (1784)..(1784): n is a, c, g, or t
  misc_feature (1786)..(1786): n is a, c, g, or t
  misc_feature (1788)..(1788): n is a, c, g, or t
  misc_feature (1790)..(1790): n is a, c, g, or t
aagttaaggctagattcgctgcttcttctacgaactttccagaagacagtttctccttcccactgaaccaaaccatgtccattttcatctagcttcgcttttcaatccattgtttctcagataccgcatggctcacaattacatcgccaccgattcacctctctctcgtcgcatagttcgtgctttcctccacttcctcaactccgttgaaccgggtcctggggttgatgctgaggggattgaggttgctagggagtgtttggcagaggcttttaagcttaatcaatctcctgtggctggtgatgatgtgaaatctgattcattgattgacatattcaagtctcttgaagctaaaaagcaatgtgaacctagcaagtcagacgttggtcctcagccggattccgtggatgcttccagttcattctcgggtgagaatcctgctcgtgggaagaatcattctgaggcgtcgaaatctacggatgaagattcaacacagggccctcatgcttttgtatctaaagatgaactgtgcggacaattctttgctgctctggagaaaaattgctatttttggagcaatactgatgggagtgatgacccagtgcaactggagaaagcaagttgtttattcaatgaggcttgtatggagttggaaagatctggttgtcaccagtttagtttgaagaatttggctgaatcactaaaaacactaggtaacaaggcaatgcaatctaagaaatactctgatgcaattgagttgtataattgtgccattgcagtccatgaaaagagtgctgtttactactgcaacagggcagctgcttacacccagattaacaaatatacagaagcgatccaagattgtcttagatccattgagattgatccaaactacagcaaggcatatagtcgtctgggtttggtttattatgcacaaggaaattacagagatgctattcataaagggttcagaaaagccttgcagttggatccaaataatgagtctgtcaaagaaaatataagggtggccgagcgtaaattgttagaagagcaacaccgtgcatatcaaaaccagaattcaagatcatctcaagaattcccaaaccaatctgcgcaaggaggatcaagaagccacagcgtgccacctccattttcctctatgtcatttaatccccgtgatattgcaagcatgttcatgaacatcacaaaccctacaaatgcacagccgcaggggtcacattctcatcaggaaaggcaagaagatagcaatggtagtggaactagtgagcctgaaataagaattgggggaaatattagtgtaaacatggaggatatgccagaggatataacaggggccttacaatcaatgatggaaatgttatctggggctgcaccccctgggcaaccgcaagatcaaacaaatggaagaacagcaccaaactaagctatttcagcattctgagactgtaaagactcacaaaattgttaaatattttttttgcctgtttaagttttttgatagattacagcattaactaaaaaaaaaaaaaaaatttacatcanatanagcttttgagtcactatcctttttggaagcccattatacaattgtcattcgngcaanatccatacttttacaggttacaagcctatggattgggacgtgtaatttactaaagggcatagttgttgtagctaagtttanatgattatttattgcaaatntttgttgtgtactgtgaanaaaataaggtggtaaaaanaattaaactttaatttatnananananaagtttagttt

SEQ ID NO: 3757 - DNA, 2219 bp, Glycine max
tcagctacgtaggccccccccccaaaaaaaaagagaagagaaacacttgtgaacgtaacaaaagacacttctcaaacaatatagatcaatcgtgctgcgaacaaattaagtatggcttcaaggcctggaatcctaacggattggccatggaaacctcttggaagctttaagtatttgttactagcaccttgggtagttcacagctcctattctgtgttggtgaaggataagagtgaaagggatataagcacctttctcatatttccatttcttctatggcgtatgcttcataaccagatatggatcactctctctcgttaccgaaccgccaaaggcaatgctagaattgtcgacaagggaattgagtttgatcaagttgatagagaaagagattgggatgaccaaatattgttcaatggattattatactacttggcaagctacacattatctggggcatcccgtattccattatggagaacagatggagttgttatggcaatattgcttcatgcaggaccagtggagtttctctattattggttacacagagcacttcatcatcattttctctactctcgttaccactctcatcaccattcttcaatagtaacagaacctataacttctgttattcatccattcgctgaacacatattatattttcttctctttgcaatacccaagttaaccctcgtcttcacaaaaacagcttctgtgggggccatgcttggatatgtcacttacattgatttcatgaacaacatgggtcattgtaactttgaggtggttccaaagtggctctttgacatctttcctcctctcaaatatctcatgtacacctcatcgttccattctttgcaccatactcagtttagaacaaactactccttgtttatgcctctttatgactacatctatggcaccacagacaaagcttccgataaattacacgagtcagcattaaaacaagaggaagaaatccctaatgttgtacacctaacacatctcacgacccctgaatccatatatcatctcaggcttggatttgcttacttggcttctaagccttacacgtcaaaatggtacctttgtttgatgtggccagtaacagcttggtccatgatcctcacatgggtttatggccgtacatttattgtggaggggaatcgttttgacaaactgaagttgcaaacttgggcaatacccaagtacagtctccaatacttcatgcaatcacaaaaagtggctatcaacacaatgatagaggaagcaatactcgatgctgacagaaagggcataaaagttttgagcttaggcctaaggaatcaaggagaggaccttaacatctatggaggactatatgttagtaggcatccaaagctaaaagttagggttgtagatggaagcagtcttgtagttgctgttgttcttaatagcattcccaagggaacaactcaagttttacttaggggcaaactcaccaagattgcttatgctcttgcctacacattgtgtcaacaaggtgttcaggttgctgcattgtatgaggatgattatgtgaggctcaaaaagtcgttcaatagctctgaaaccaatttggcctttaccaaaagcagcacacagacgacttggttagtaggagatggattaactgaagaggaacaactgaaggcacccaaaggaacattatttattccatacacacaatttccaccaagaaaatatcgtaaggattgcttctaccattgcacccctgcaatgttagctccttgtagtgttgaaaatatccattcttgtgaggattggttgccaaggaggataatgagtgcatggcgcatagctgggatagtgcactctctagaaggatggactgaacatgagtgtggccacacaatgcataacatagacaatgtttggcattcaactcttcaacatggattccaacctcttccggtgccaattaatgagtaactagctaggggaataatatatatgaataatatgtttggctgcttaatttgttttagctctttggagggtattaatccatcctacttatggttatctttaccttaaataagattgttaagtaataccttaagacaaagcaaatggatatcatctacatatatttccatagagctacaacattttaagaagtagctatataagtatatatctcataatacactcaaaagtattatataaaaaaaaaa

SEQ ID NO: 3758 - DNA, 962 bp, Glycine max
tacggctgcgagaagacgacagacggcggagcatcgagtccaaaggtttcgaaacgcaatgtccactctgcttcactccgctcccacttcttctccttccttctctcggatcatcactcctcgtttcgctttcgctccaatcactcgcatctctctccgaaacggcgtccgtagcaaggcgatcgaagcagtgaagttggagaatggaaggccgagcgcgagcgagttcgtagtcagcggaagcggaaacgcaattccgagttacgtcgtggcgccaaacgcgcgtgttcaggatttggttaaccgaaacgacactcgcctccggatattctccggcactgccaatccggctcttgctcaggaaattgcatgctacctgggcctggagctaggaaaaattaagataaagcgttttgctgatggtgagatatatgtccagctgcaagagagtgtcagggggtgtgatgtgtttcttgtgcagcccacatgtcctcctgcaaatgagaatcttatggagcttctcataatgattgatgcctgcaggagggcttcagccaaaaatattactgctgtcattccatattttggatatgccagagctgatagaaagacccaaggacgtgaatccattgctgccaagcttgtagcaaatttaattacagaagcaggtgcaaatcgtgtacttgcttgtgacctccattctgggcagtccatgggctattttgatattccagttgatcatgtgtatggccagcctgttatacttgattaccttgcccagcaagactatttgttcagatgattgagtagttgtctgcccagatgtgacgtgtgttgccagagcacgtacttgtgcgcggaaagtatatgatgctccgggagctgattgtcatgagaggcccgatgggcataatcttgctgaactcatcaatttaattggtaggaggaaggagaaaggagcc

SEQ ID NO: 3759 - DNA, 1309 bp, Glycine max
acggctgcgagagcagctacgtaggccccccccaaaggtgtcgaaacgcaatgtccactctgcttcactccgcatcaacttcttctccttccttctctcagatcaccactcctcgtttcgccccaatcactcgtatctctctccgaaacggcgtccggtgcaaggcgatagaagcagtgaatttggagaatggaaggccgagcgcgagcgagttcctagtcagcggaagcggaaacgcgattccgaggtacgtcgtggcgcccaacacgcgtattcaggatttggttaaccgaaacgacactcgcctccggatattctccggcaccgccaatccggcgctcgctcaggaaattgcatgctacctgggcctggagctaggaaaaactaagataaagcgttttgctgatggtgagatatatgtccagctgcaagagagtgtcagggggtgtgatgtgtttcttgtgcagcccacatgtcctcctgcaaatgagaatcttatggagcttctcataatgattgatgcctgcaggagggcttcagccaaaaatattactgctgtcattccgtattttggatatgccagagctgatagaaagactcaaggacgtgaatccattgctgccaagcttgtcgcaaatttaattacagaagcaggtgcaaatcgtgtacttgcttgtgacctccattctgggcagtccatgggctattttgatattccagttgatcatgtgtatggacagagcacgtgcttttgctaaaaaattatctgatgctcctttagctattgttgataaaaggcgccatgggcataatgttgctgaggtgatgaatttgattggtgatgtaaggggaaaggtagcagttatggttgatgacatgattgatactgctgggactattgccaaaggtgcagctctgttgcatcaagaaggggcaagagaagtctatgcatgcactacacatgctgttttcagtcctcctgctattgagagattgtcaagcggtttgttccaagaagttatcataactaatacaattccagtggcagaacagaactatttcccccaattaactgtcctgtcggtggcaaaccttttgggcgagactgtttggcgtgttcatgatgattgctcagtgagtagcatatttctgtaaaataattttagtttgttagtctcattcatgatagagaaaatgagaccaccctcaatactcttgcacatgcatgctggcgtaaataaatatattcatctatttttcaaacaaaataataaaaaaattcgttgttatgaaaaaaaaaaaaaaaaaa

SEQ ID NO: 3760 - DNA, 742 bp, Glycine max
attatatcgtttacaatgttcctttaccccctaacgactatccatccagctcatggacattctgaatgaaaagcctgagttgtttgccgtttccattgatccaaatttctctttttatctgcacaatgattttctgtctgtctttcccaacaaaaaggagccccatggcatcatactgcatagaaacaaacgccaatatggaaaattagatgagctttctgcaatatgctctgccatggaaggtgttaaagtaattaatggattggaatgtaagatagcttgcagctcatctaagatttcttatgttcttgacacacaagattttttcttccgaccaagaaagaaaagacgaacgccttcagggaccacaacctcccggttccgcagggacagagaggaaagattccgcaaattgttggcatgctcgtaatttgtatcttcatgaagagttgttctctaacatcttctaaaacagctgaggagactcatacataattctatatgtttgagtcttggtgtagcaacctaggaaccctttgggtttacaattttatttgttgtcagtacttgaattttcacatgaaagtggaggaggggtatattgatgggagtgtgtaatatgtttatgaggtctcatgcgttgtgcccattcctttgtaaatagtttgcttcgttatatatttgtagaatattgtttacccaattgtttattagttgcaacacagttgcttcctccgttccg

SEQ ID NO: 3761 - DNA, 1745 bp, Glycine max
tttttctctctcacccctcactaaccaacttgcctcgcctctttctattttttattgctttttcgtattttcggtattagaaaacaaattaaccagagagaggcgcttgccgtaacgctaattgtgaaagaagatgcaaccaacatccaacggctctgattcgcaagcgacggagcagcggacgccgccgccccagtggatgccgatgcagtacccggcagcggcgatggtaatgcagcaccacatgatgccgcctcaacattacgctcctccgccgccgcagccctacatggcctaccaccactaccaacaacagctgccgcacgccctgcacgcgcaccatcagggatccagtgccgagaacaagaccgtttgggtcggcgatttgcatcattggatggacgaaaattatctccaccgctgtttcgcttccaacggcgagatttcctcaattaaggttattcgcaataagcagactggtctatcagagggttatggatttgtggaattctattcacatggcacagctgagaaagttttgcagaattatgctgggatattgatgcctaacaccgagcaaccgttccgcctgaactgggcaacatttggcacaggagacaagcgttcagataatgttcctgatctttctatttttgtaggagatttagctgctgatgttacagatagcatgttgcatgaaacattttactaatagatacccatctgttaaagctgcaaaagttgtttttgatgccaatactggccgttcaaagggttatggtttcgtcaggtttggagatgatgatgagaggtctcaggctatgactgaaatgaatggtgtttactgttctagcaggcctatgcgtattggtgctgcaactcctaggaagacatctggctaccaacaaggaagtcagtcaaatggcatatccagccaatctgaagctgattctacaaacacaactatatttgtcggaggacttgactctaatgttacagctgaagatcttaagcaaccattctcccagtatggtgagatagtctctgttaaaatacctgttggaaaaggatgtggttttgtacaatttgcaaacagaaataatgctgaagaggcattgcagaagctaaatgggacaacgattggcaaacaaatggttcgtctttcatggggccgcaatccagcaaataagcagtttagagcagatttcggcaatgcttggagtggggcgtattatggagggcctgtttatgatggttatggatatgctttgccaccatctcacgacccaagcatatatgctgctgcttatggggcttaccctatttatggaggacaccaacagcaagtaagctgagtgcaggaacaacatggtgcttcaacgagcaacttaacttgtaacttgcttggtctgttgaattctgaagaatccctcctaattgtggagtggagttgaattttgataaccggaggtagcactgtaggaatccaattaatcattcgtttagactcgtaggagtaatcaggattaaacttgtttgttgaaataatttaactatgcttaagtttgccctcttgcttgcattttaattgttttattttggcgcttcacattgtaaccttcacttttacggcttgtttggttggaggagcgggaggagaaacagtagaaatggaaatgattaaatatgttttgtatgatagaaatagaaaggtcgtaattaaaaagttagtggatttcacaaaa

SEQ ID NO: 3762 - DNA, 1353 bp, Glycine max
acgaggcgatttgcatcattggatggacgaaaactatctccatcgctgtttcgcttccaccggcgagatttcctccatcaaggttcccccccgttcgcccacgcgcccgcccgcgcgtccgggatttgtggagttctattcacatgctacagctgagaaagttttgcaaaattatgctggaattttgatgcccaatgctgaacaaccattccgtctgaactgggcaacatttagcacaggagacaagggttcagataatgttcctgacctttctatttttgtaggagatttagctgcagatgttacagatagtttgttgcatgaaacttttgctagtgtatatccttctgttaaagctgcaaaagttgtttttgatgccaatactggccgttcaaagggctatggtttcgtcaggtttggagatgacaatgagagaacccaggccatgactcagatgaatggtgtttactgttctagcaggccaatgcgtattggtgctgcaactcctaggaaatcatctggccatcaacagggtgggctgtcaaatggcacagccaaccaatctgaagcagattctactaacacaactatatttgttggaggactggaccctaatgtttcagatgaagatctcaggcagccattctcccagtatggtgagatagtctctgttaagatacctgttggaaagggctgtggctttgtccaatttgcaaacagaaataatgctgaagaggcattgcagaagctaaatgggacaacgattggcaagcaaacggtccgtctttcttggggtcgtaatccagcaaataagcagtttagaatggatttcggcagcccttggactggggcatattacggggcccctatgtatgatggttatgggtatgcattgccccctcgtcatgatcccagcatatatgctgctgcttatggtgcttaccccctttatggaggccaccaacaacaagtaagctgaatgaagtgcagtgcaggagtagcattcacaacaagttagacagcatcaagcttgaatgtgcaaattaagtttctctgtttgtaacttgcttgatctgttgaattcttaagacaagaatccctcctaattgtggagtggagatgaattttgatagcctgaggtagctctgtagggattcaattagtcattttgtttaggcctgtaggagtcatgactaatgaggaccttaaacttattataggaataattgtcttaagtatgtcagcgtgtgtgcttgcttgctatttatttgtttccggcagttgacattgaagctttgcctttgttagtttttaagggtcatttcatttctttgccagtaaaaaaaacaaaaa

SEQ ID NO: 3763 - DNA, 786 bp, Glycine max
ggccccaaaaaaaaaatttttccttgccaggcccgggggggtaaatttggttcctttaaaagggcccccccttttttttttttttttttttttttttttttttttttttttttttttttttttttttttttttttttggtgttcttgtctccatttttttttttttttttttttcttaatcaaacgcttaaccgatcagattgaatagataggctctagaagaaacacagaacccaaataaagcttagcaacaagccaaacaagtcatcagatataggttatataacaaagcaacttaagctgtcaacggtatataatacccaatatcatttggagatgtacattatttcaaatcatgggaactttcgcaagtcagaattacatttagcgcttatcccattcccagcacatagtatattacgcataaaacacaccttgttgtgtttagttgtagtagagttcgagacccatgccgtcatggatctcgtaatccttgagagtgatgtgatccttgtagatggtgtaccacttctggatgcggatcttgtcggctcttgtgccagtctgagccgccacaagcttcttcaggtcgccgatggtatcatcgtcgttgcacttcacgcgcaccttcttccccaatcgatcgttcaaaaccacctcaatcatcttcgccacgcgaataaccctaattcccaaatcccaacctaaagtccttcgcctatagtgttgcttttcagagcccgttccccgggcctaaactcagcgggtagcccggccctcgagccg

SEQ ID NO: 3764 - DNA, 799 bp, Glycine max
  misc_feature (64)..(64): n is a, c, g, or t
caattttagtaatgatgctgatatatttacaacgtagatcatcaatctaatgcaaattaaacancgtggaaaatacattcccaccacccttttaaattaatagagcgtataatttcagatgcattgaactggtacagccatgtgaacttgcgattcatgtcctaagctctaacatccattgagagtgaattaaaataaagtaacgaaaatcaaataattaaaaaagcaattggacatgatcaaacacttccaccgatcagattaatgaagcttagcaacaagtcatcagataggttatatataacaaagcaacttagggtgtcatcggtatgtaatacccaatatcattcggggatgtacattattcaaatcatagggactttcgcaagtcaaaattacatttggcgcctcatcccattcccagatcatagtaatatatcatgcataaaacacaccttgtgtttagttgtagtagagttcgagacccatgccgtcgtggatctcgtaatccttgagagtgatgtgatccttgtatatggtgtaccacttctggatgcggatcttgtcggctcttgtgcccgtctgagccgccaccagcttcttcaggtcgccgatggtgtcatcgtcgttgcacttcacgcgcaccttcttccccaatcgatcgttcaacaccacctcgatcatcttcgtgacgcgaacaaccctaattcccaattccaaacctaaagtctttcgcctttacttttcagttttcagagcgcattccaataagaaagatcgtatttatagttattttcac

SEQ ID NO: 3765 - DNA, 1901 bp, Glycine max
ccacgcgtccgcacagattcagcctttctcagtttctctctctagaaaaaccaaacctcgctactctcttctccctttttttttgtagttctttccttatttggccttcacactccgaactgcgaaatccttttttagcaaaaaaaaaaaaaaaaaagagtgagagagcgtgagacagagagagtggtcatcagtcatcaccgttgattgattaagatgcagcaatcaaacggctctgattcgtccacgacggagcagaaagcgccgccgccgaggcaatcaccggcggtggcgaggccgcagcaatggctgccgatgcagtaccctgcggcggcgatggtaatgccgcaccacatgttgccgcctcagcattacgcgccgccgccctacgtgcccttccaccaccaccaccaccatcaccagtacgcggcgccgcacgtgccgaaccaacatcagcagcagcagcagcatcaccaccatcagaacggatccggcggcgagaacaaaaccatctggatcggcgatttgcatcactggatggacgaaaactatctccatcgctgtttcgcttccaccggcgagatttcctccatcaaggttattcgcaataagcaaactggcttatcagagggttatggatttgtggagttctattcacatgctacagctgagaaagttttgcaaaattatgctggaattttgatgcccaatactgagcaaccattccgtctgaactgggcaacatttagcacaggagacaagggttcagataatgttcctgacctttctatttttgtaggagatttagctgcagatgttacagatagtttgttgcatgaaacttttgctagtgtatatccttctgttaaagctgcaaaagttgtttttgatgccaatactggccgttcaaagggctatggtttcgtcaggtttggagatgacaatcagagaacccaggccatgactcagatgaatggtgtttactgttctagcaggcctatgcgtattggagctgcaactccaaggaaatcatctggccatcaacaaggtgggcagtcaaatggcacagccaaccaatctgaagcagattctacaaacacaactatatttgttggaggactcgaccctaatgtttcagatgaagatctcaggcagccattctcccagtatggtgagatagtctctgttaagatacctgttggaaagggctgtggttttgtccaattcgcaaacagaaataatgctgaagaggccttgcagaagctaaacgggacatcgattggcaagcaaacagtccgtctttcttggggccgtaatccagcaaataagcagtttagaatggatttcggcaacccctggactggggcatattatggggcccctatgtatgatggctatgggtacgcattgacccctcgtcatgatcccagcatatatgctgctgcttatggggcttaccccctttatggaggccaccaacaacaagtaagctgaacgaagtgcagtacagtgctggagtaccattcacaacaagttagacagtatcgagcttgaatgtgcaaattaagtttctctgttttaacttgcttgatctgttgaattcttaagacaagaatccctcctaattgtggagcggagatgaattttgatagcctgaggtagctctgtaggggattcaattagtcatttgtttaggcctgtaggagtaatgactaatgaggaccttaaacttattataggaataattgtcttaagtatgacaacgtgtgtgtttgcttgctatttatttgtttccggcagttgacattgaagctttgcctttgttagtttaaagggtctttcatttcttctttgccagtattttgcttgcatgccctatgctattcagaagcgattatagg

SEQ ID NO: 3766 - DNA, 940 bp, Glycine max
aatcatcagcttaagcacattcataaagcgtttctatattacttgcaatagccactctactatatacattacaaattaattgaagcacacttgtcacatttacatttagtgacagatatatagtaacatcatcatgggtttgaagaacagtggcgttggtcatagagcatggagcctccttcgggcatcattgctgtgggcaagcaaaggtggcgtgttgaggcgcagggtggcgatggagctgcgtcttgtaccaaagtacttgaagcgactcggccacactgctcctccaagccacattcactactttgaacgcgagctctcgttcgacaagacccccatcttccatgtcaagatgtaccgtccaaccaccatgcgcttccacttgcctcacattccttgcataaacccacatgttgattttaatgatgatgatgatggcaatgttgagtatgatactggtggaagaaagagtgccctcatggatgcatcaggagacagcagagaccaggaattttatcttgattatgaaggttgccaagaaatgggttgtggtgaagaagaggaagaacaaaaactagatgctcagggaatagataagcaagctgaggagttcattgctaaattctatcagcaaatgaggctgcagcgccagatttctcttctacaatacaatgaaacacccagatcagacacaagttgttgagcatacttcgttcacttttttcttctttttctattgagttttgatgccattgtcaatgtagaacattttagttcacgaaatgtgagagagagcgagagagatctatatgtacggcgggatgctgtaaataccaggagctacctttgagttctagtatttacattttttcatagttataatttcaataaaaaatactacagtctaccgggctgttattcaaaaaaaaaaaaaaaa

SEQ ID NO: 3767 - DNA, 1369 bp, Glycine max
tcagctacgtaggccccccccccccgatctaccctttttcccttgaaagctcaaaattgttcatgaaagcttcgtttccgattaacaattctttgaataatagagactttactttctgaggttttaacccctttaaggctttccctaacttgaggctgtgctcatttgctgagagttttgctgcaaggacttgacacaaattgtgtaaatgtctgtggcttttaccaacctctcttggtggttgtggagtggaaagcatcaagagccaagaatcccaaatgggccttctataaattcttccgccgattcaaatttgtgggaatcggatgttttgaggtttcctttggttcaggcgaatgtggggtcctcatctagaaaggtgaagcgcaaatggcatagtaggggggagaggaaggtggatagggaatatgatgttgttctggttccatctgatggtggatgtgtttctggttccgaatctgatgattctgactggtctattggctggttagagcctcacggacctggtttcccaagtgatgatgaaacagataacagttttgctgtgattgttccctgttacggccgagactatggcagaataatggaggatccaaaaggcaatttactgaggggtgttgggaactttccagacagttattcagatgagagcaaaaaatttgtggaagactggctctcttctcttagaaatacctgatgcacaaccattcatcattgtgatcctgcacttccttagaaaaatcttcttttgtgatccttagcaaataaaccatttgtatatgtaaatattgtaaaaaagaaaaggcattgatgtgatgtcagaatatgattggttaacattgagtcttggttaattcaaacctatgaggaacagatatggccaagaatgaaagcagttgtgatgcttttgcactgagaatgatgtgcaactgctgttctgctctcatcttcgagagtccaaacattgtgactgaatttgagagctgtattgaagtgtgacttttggaacttgcaattcgttcatgtaaatatggtaattgtttgaatgcttgatcatgtactcaaatttgtacataactgtatataaattttgtataacatgggtgtacttatgtgtatatatgtgtgttttttgtagtttgcttggatgtatagttaaattagcactgttttgtataggcccgttaataatcaaaagcctctagtcttttctctgtttctctaaaagataatagcatttccctttggggattcaaggtttaaaagaatcaaagttacaagatatttgatcatagttaaattctggaatgtaactattaatcaggctaaggttccaatattacttgtg

SEQ ID NO: 3768 - DNA, 1819 bp, Glycine max
tccgcctccgtgggcccccccccccccccccgtgggaatatgtgagagacaatgaaatttggaatttgccacaaaataaagatgacattttacctgcacttaaattaagttatgatttcttgccttcctatttgaggcaatgttttgcattgttttcactttacccaaatgattatgtatttaatagtgttgaggtagctaggctttgggaggcacttggtgtccttgcaccaccaagaaagaatgagacaccggaagatgttgccaaacagtatctggatgaattactgtcaagatctttccttcaagattttattgatgctggcgctatttatttatttgaaattcatgatttggtgcatgatcttgctctgtttgttgcaaaagatgagtgtctacttgtaaattcccacattcaaaatattcctgagaatattcggcatctgtcttttgctgaatacaattttattggaaattcattcacctcaaaatcggtagctgtgagaaccataatgtttccaaatggtgcagaaggaggcagcgttgaagctttgctaaatacctgtgtgtcaaagttcaaattattgcgagttttggatttaattgattcgacatgcaagactttgccacgttccattgtttcgggatgcgaggagttggaagcattgcccaaaggattaagaaaattgattagtctacggtatttggagataactacgaagcaaccctgtttgccctacagtgagattgccaatttgatctcgcttgcacttctgactattgaatcatgccataatatggagtctatctttggaggggtgaagttccctgctcttaaaacattgtatgttgctgactgtcatagtctgaagtctttgccactggatgttacaaattttcctgaattagaatctctgtttgttcatgactgtgttaatctggacttggaactgtggaaggaccaccatgaagaacaaagccccatgttgaagttaaaatgtgttttattcaggggtttaccacagctggtggccttacctcaatggcttcaagaaactgccaactccttacagaccttgggtattataaactgcgacaatcttgaaatgcttccggagtggctgtcaactatgactaatctgaaatcacttgttatatcagattgtccagagcttatatctctcccggataacatccatcacctcaccgcacttgaaaggttgagaattgcctattgtcctgaactatgtagaaaataccagccccatgtcggtgagttttggtccaaaatatcacatatcaaagaagtcttcattgaagaaccagaaaagctggaggaagaagaagacgaataggaatgatttgttgacacatataagtgttgaagctcctttggcaacccctggacgtggatcaggaatggtcaaaggtgaaaaaaggggagaccatgatgtttgattattgtgttggacgtgattgacgtattgaaaattgattttgggtgaagttaccctggagctgcttctgcgtcatgggagaatcaattctcagatttcaatgttgggtttttccattgtccatcaagttaatgcatgcgtgtgtttatttccactgcctattttacgttgtgcttattattttgttgttatttttatactcggatatttactgtgatctccacttctgcctgttatttttatactgttactttgctgcagaactgctatatttggtgttgttttaccattttataaggttattctgttaacatttcattgggtgctgttgattcataacatcagggttatattgcatggtt

SEQ ID NO: 3769 - DNA, 1119 bp, Glycine max
attaaataacccatgtccctgcattagttaaatccttctgctctgcgtcttcttgttcctctcgcccagaatccgagatcaaccctgacccctaaggccaggggtttttctcggcttcttcagattcctgaaatggcgtctgtttcagctttagccaagtacaagctcgtcttcttgggtgaccaatccgtgggcaaaaccagcatcatcactcgcttcatgtacgataaattcgataacacctatcaggctacaattggtattgattttctatcaaaaactatgtatctcgaagatcgaactgttcgactgcagttgtgggatacagctggccaggaaagatttagaagtcttattccaagctacattagggactcatctgtagctgttattgtatatgatgttgcaagccggcagactttcctaaatactgcaaagtggattgaagaggtgcgaacagagagaggcagtgatgtcattattgttcttgttgggaacaaaactgatcttgtcgagaaaagacaagtctctatagaggaaggggaagcaaaagcacgtgagctcaatgtcatgttcattgaaactagtgctaaggctgggtttaatataaaggccctatttcgaaaaattgctgcagcactacctggaatggaaacactatcttctgcaaaacaagaagacatggttgatgtaaacttaaagtctacaaatggcagtgctcagtctcaacctcagtcaagtggatgtgcttgttaagtatactttatcatgtgcggtccacctttttgtgtcatgctttttgttttatgcgggtttttctatagtcttctacagcattatatgaaaagatgaaagaatatataagcggatcagggtaggggttgataaaagttctgtctagacaatttctgttgttagttggttttttgcctataatgtgtactaatgaattttttttttttgaacggcataatgtagtaaaggtacccaacccaaaattgaattgtgttcattgtaccctgtaaaacgtgtgatatgtttaaaatttaacttgttcatctggattgacgtaaataaaaatttaaaggggggccgccgattagtgaaaaaaaaaaaaaa

SEQ ID NO: 3770 - DNA, 1068 bp, Glycine max
gttaaatccttctgctccgcgtcttcttgttcctctcgcccagaatccgagatcaaccccgacgaaggcaaggggtttttctcggcttcttcagatttctgaaatggcgcctgtttcagctttagccaagtacaagctcgtcttcctgggtgaccaatccgtgggcaaaaccagcatcatcactcgcttcatgtatgataaattcgataacacctatcaggctacaattggtattgattttctatcaaaaactatgtatcttgaagatcgaactgttcgactgcagttgtgggatacagctgggcaggaaagatttagaagtcttattccaagctacatcagggactcatctgtagctgttattgtatatgatgttgcaagccggcagactttcttaaatactgctaagtggattgaagaggtgcgaacagaaagaggcagtgatgtcattattgttcttgttgggaacaaaactgatcttgttgagaaaagacaagtctctatagaggaaggagaagcaaaagcacgtgagctcaatgtcatgtttattgaaactagtgctaaggctgggtttaatataaaggccctatttcgaaaaattgctgcagcattacctggaatggaaacactatcttctgcaaaacaagaagacatggttgatgtaaacttaaagtctacaactggcagtgcgcagtctcaacctcagccaagtggatgtgcttgttaaatatactttatcatgtgcggtccacctttttgtgtcattccttttgttttatgcagatttttctagtcttctacatcattatatgaaaagatgaaagaatatataagcgatcggggtaggggttgatacaagttgtgtctagaaaatttctgttgttagttggttttgcccgtgatactgtgtactaaagtagtaaagctgcccaaccaaagattgaattatgttcattgtaaccctgtaaaacgtgttataagtttaaaatttaacttgttcatttggattgacaaaaaaaaaaaaaaaaaactcgaagactagttctctcaaaaaaaaaaaaaaaaaaa

SEQ ID NO: 3771 - DNA, 1188 bp, Glycine max
  misc_feature (1168)..(1168): n is a, c, g, or t
ttcggctgcgagaagacgacagaagggggttttgaaataaaaaagaatactaattattaaatcctggtagacatgcactaaaaataaatctaaaatttcacttgcacccacccacacaccctcgcatccatcgtaatcaaaacttaattcacatttttgtttgggttttttcatcacagtgcttttctttccttccttctgagattgctgaagagagaaaagcaaaatcgaaagaactgaattggatttcattggcggagtgaaagtgaagtgttgcgcaaatctgattggcaagaatggcgccagtgtcagctctcgcaaagtacaagctggtgttcttgggcgatcaatccgttgggaaaaccagcatcatcactcgcttcatgtacgacaaattcgacaacacttatcaggctacaatcggtatcgattttctgtcaaaaactatgtatcttgaagatcgaactgttcgactgcaattgtgggatacagctggccaggaaagatttagaagtcttattccaagctacattagggactcatctgttgctgtcattgtttatgatgttgcaagccgtcagactttcctaaacacatcaaagtggattgaagaggtgcgcagtgaaagaggcagcgatgttattgttgttcttgttgggaacaaaactgatcttgtggataaaaggcaagtctctacagaggaaggggaagcaaagtcccgagagctaaacgttatgtttattgaagctagtgcaaaagctggctttaatataaaggccctctttcgaaaaattgctgctgcattacccggaatggaaacattatctacaacaaaacaggaagatatggttgacgtgaacctgaggtcttctggtagccatgattcccaacctcagtcgggtggatgttcttgctgaatgaatgtgccttgtcctaaagttttgtatctttttgcttcatgctatttattttggaatgtgtttgtctcagatctgtaaagattcattagtcctttagacttaaacaactttatgtgagagaaactattgaaaacaagtggagaggtagcaatggaagaacaaatgtaatacagctcattggttagttggctattcattattatttactttgataaaaaaaaaagtctacggtggccttcaaaaaaaanaaaaaaaaaaaaaaaaaaaa

SEQ ID NO: 3772 - DNA, 1141 bp, Glycine max
  misc_feature (299)..(299): n is a, c, g, or t
gacttctggttgtatatgcttacctcaaaagaatattttgcgacttgtttattcgtgaaggattccagtttgattatgtgtttgattggacaatcttgaagtatcagcaatcacagctagctgctcctccagcacgtgccattggtcctaatgttggaactagttctgcaatgccaccggctgtgactaatgctgatagacagacaggagaggaagaagggcgacctcctcgtctcggctccggggtgccccccccccccagaatgtcaggcccatcacaaactctgtaaatatttcanaagctgaaaaatccagtcactacggatgctgcccttaataatggaagccatgttatcaaggcccaatgtcttggggcagtcaagtggatcaaggcgagctgcggtttctagtaggcgtgatgcatttgttggttcggatttggatcttcgtactcgttctactggggctaaccctggaacagcaattaaaacatcatctgcgagaaatgcttctcatgtcaagaactatgaaactgcaatcaagggcattgagggtttgcaattagaaaatgatgagaaggcacattattgattcctaaccttttcatgttgtaaatataagctttggttgacgggcactacaatagttgcatgttgccaaggtgagtcgcgaagggacgtgaatttgaactcagaagtctgggcttgtgttgtttaacccttgtgctcatgctgatcaagcatggaagctgaaaaaatttgagctaaatcagggattgttcttgcttcgaagctcagggtttacgctggcactagtcttctggcgggaaccctaaattttgtaaccttttcctgtgagttattattgatttaccagatgtctaaagtgtcatgtggatcacattgttcaaaactatcaaataccagcaaaaatatctactcaagttttggataagaccaaagtttccaagatgtttctggagattactgcggtatttaggaatattcaaggttcttgaaatgtttctaccttgtgaaattcttataagcttgaatcctcgtatttctttagtttgtctttaatgttatctcgtaataatatctgtaaatttttattccaataatttggaaggttttctttt

SEQ ID NO: 3773 - DNA, 1791 bp, Glycine max
  misc_feature (1780)..(1780): n is a, c, g, or t
cacaagttctgtgggaaacatggttggaggagggaatattggaaggactggtggaggattgtctgtgcctgctctcgcatctcgtctaaatttgggtgcaaacagtggatccggtggtttaggtatgcaaggaccgaatcgattgatgagtggtgtgcttccacaaggatctccacaggtaatttcaatgctaggaaattcttatcctagtgggggtccactttcccagcgccgtgggcccccccccagtaacttgaactctatggggatgttgaatgatgtgaattccaatgacagttcaccttttgacatcaatgacttccctcaactgacaactcgtccgagttctgctggagggcctcaaggacagttgggttctttacgaaaacagggtcttggtgttagtcccattgttcaacaaaaccaagagtttagcattcaaaatgaagatttcccagctttaccaggattcaaaggtggtaatgcagattatgctatggatatgcaccagaaagaacaacttcatgacaatactgtgccaatgatgcaatctcagcatttctctatgggaaggtcagctggtttcagcttagggggtacatattcatcacatcgagcacaacagcaacagcatgctccttcagtcagtagtggcaatgtctctttttcatctgttaacaaccaggatcttctccatctacatggatcagatattttcccatcttcacattcgacctatcattcacagaccagtggacctcctggcattggattaaggccgctaaattctccaaatacagtttctggtatgggttcgtatgaccagctcatccagcaatatcaacagcaccaaaatcagtcccagttccgccttcaaatgtcagctgtaaatcagtcttttagggatcagggcatgaagtctattcaaactgcacaaccggcaccagatccatttggtttgctcggcctgttaagtgtgatccggatgagtgatcctgacctgacgtctcttgctcttggaattgatcttactactctggggttaaatttgaattcatcagaaaatcttcacaagacctttgggtctccatggactgatgaatcagctaagggagatccagagtttacagtgccacaatgttattttgccaaacagccacctgctctacatcaaggttatttttccaagttttcggtggaaacattgttttacatattttatagcatgcccaaagatgaagcccaattatatgccgccagtgagctttacaacagaggttggttttatcacaaagaacatcgtttatggttaataagagttcccaacatggagccgctggttaaaacaaacacatatgagagaggatcttatcactgtttcgatccaagcatatttgaaaccgtccgcaaggataattttgttctacattatgaaatgttggaaaagagaccacatctgcctcaactttgaggaggaaacaaaaacctttttactgtaaagtttcgattatggatttaatgccttggagtcattttgcagtattagtattcttcaatttggcgtttcttcctatctggtcgccttagtgatccaagctagtattttatttttccttgccttaatataaacaataattaggatacataggataacctagctgtctgacaaacatggttttctgcccattagctaatgcacaggaaaaacacctggatcgaaaatggatgtactttccgaaataattttatcttaatctgaatgttaggatcagagatctanaaaaaaaaaaa

SEQ ID NO: 3774 - DNA, 1074 bp, Glycine max
ccacgcgtccgcggacgcgtggggttctggtgctgttgatactgctggataagctggtcatatgttcccctcccggtcccagttccgccttcagcagatgtcatctgcaaatcagtcttttagggatcagggcatgaagtctatgcaaactgctcaatctaatccagatccatttggtgcactgggcttgttcagtgtagtccatataagtgatcctaacctgaaatatcttgctcatgggattgatcttacaacacttgggttgaatttgaattcaacagaaaacctttacaagacttttcggtctccgtggtctgatgaaccggccaagggtgatccagagttcagtgtgctacaatgttattatgctaaacagtctccttcccttcatcaaggttatttttcaaagttttcagtggaaactttattttacatattttacagcatgcccaaagatgaagcacaactatatgcggcaaatgaactttacaaacgtggttggttttatcataaagagcatcgtttatggtttataagagttcccaacatggagccgcttgtcaaaacaaacacatacgagagaggatcttaccactgttttgatccaaacacttttgaaactgtccggaaggataattttgttcttcattatgaagtggtggaaaagagaccttctgtgcctcaacattgaggagggaaaaagaaaccttaaatgtaaagtttttatttatggatttaatttttaggacgcaagtcattttgagtcattagtgttccttcaatttggcgtatttcttacattctcgtaaatcttgatgcactgagggctgttatccctttccccccagccataatgtagttaaataatggacgttaggataatctggctgtctggaagtggcggatatggatgtcttcccaatgcacagtgacacagttatacacctgactcctgggtgtctagtatttttttagcaatttactgcatgcacaatcatatttaacttctctgaaagggagctctttttaaagataaaaaaagttaaaaaacattcatgggaaaaaaaaaaaaaa

SEQ ID NO: 3775 - DNA, 1111 bp, Glycine max
cagaaactattgcacattttttgcagagaaactggggttggatggttcctatgttcctcccactcaccttggtcgggcccccccagaaaagcttgtaaacgatgtgatggcattgccagatgatcttaagacaaaactcagcatagatgatgacttggtttcaagccccaaagaagccctttccagagcttctgcagataggagaatgaagtatcttaatcgcggtatttcacaatcctattcaactcaaagggacaagattctacctaagctgactaaacttgctataaataacagaagatttgatggaagagcactagaatcccctgcaccaattgctaaccaaggagtcatcactcagctttctgatcaaatttccacattaaatgaaagaatggacgaattcacctcccgtattgaagagctgaattcaaagttcgctatcagtaaagattcagcagccagtcaacaaaacttggctttacaggctgaggcctgcaatggctctggccccacttccttctttgtaactggactaagcaatggctcattgactggatcattgctacctaattcttcatcatcttctcaattggctaataaagagtctcccctgatggaagaggtactagttattgcacgaggacaacgtcaaatcatgcatcaactagacactctgagcaattttttgcatgaatactttggagaaaggtcacgcctgggaagaccagaccatacaggaagaatgcgtgaagctgaatccgttgccatccccctggttctgactctggcctttggtgctgttggtgtgcttttgttcagaggttttacatcccaaaaataatgtgtatatattttgtttcttgtcaaattgtcatcactatgtatgagacaaacttcataagtatatctaaagcataaagggtttatgaaaacaattaccaatctgtgagggactgcctcacattaaagtagtagtatgttggcattcacttaagctgtaatatatagcttctgtatatcttttttttcctcgttaaataattcgtctacttggtggaataccgaacttgcattgcatatattataattgttctttattatcaaaaaa

SEQ ID NO: 3776 - DNA, 1679 bp, Glycine max
  misc_feature (6)..(6): n is a, c, g, or t
tcgagnagctacgtaggcccccccccaaagcttttattgagccagatctcaaaacagctcatctaaaaattattaacaagtttaatccattctccgggtcccagactcgcacccccccattgaagtcagcaagagctgtgacagttgatcaaatcaaggcaattattgctgcagagcatactgaaaccaaagaggaaacgtatgacatatttcttctaccccctggggaagaccctgaagcttgtcaatcatatctgagaatgagaaaccgtgatggaaagtacaatctcatgtttgaggaatgggtgacagatagtccattcataatatcacctagaattacttttgaggtcagcgtgcgccttcttggagggctgatggccttgggatacacaattgcagctatcctgaaaagaagcagccatgtctttcatgatgataaagtgaccataaaaactgattggctagaacaacttaatcgcacctatgttcaggttcaagggaaagacagaaactattgcaaatttgtagcagagaaactggggttggatggttcctatgttcctcgcacttacattgaacaaatccagcttgaaaagcttgtaaatgatgtgatggcattgccagatgatcttaagacaaaactcagcatagatgatgacttggtttcaagccccaaagaagccctttccagagcttctgcagataggagaatgaagtatcttaatcgtggtatttcacaatcctattcaactcaaagggacaagattctacctaagctgactaaacttgctataaataacagaagatttgatggaagagcactagaatcccctgcaccaattgctaaccaaggagtcatcactcaactttctgatcaaatttcaacattaaatgaaagaatggatgaattcacctcccgtattgaagagctgaattcaaagttcgctatcagaaaagattcagcaggcagtcaacaaaacttggctttacaggctgaggcctgcaatggctcaggccccacttccttctttgtaactggacgaggcaatggttcattgactggatcattgctacctaattcatcatcatcttctcagttggctaaagagtctcccctgatggaagaggtattagtgattgcacgaggacaacgtcaaatcatgcatcaactagacactctgagcaatcttttgcatgaatactttggagaaaggtcacgcctgggaagaccagaccatacaggaagaatgcgtgaagctgaatccgtcgccgtccccctgcttctgactctggccattggtgctgttggtgtgcttttgttcagaggtttgacatcccaaaaataatgtgcatatattttgtttcttgtaaaattgtcattaccatttaggagagaagcctcataagtatatctaatgcataaagggtttatgaaaacaattgccaatctgtgaggggctgcctcacattaagtggtagtagtagtggacgacgaccttaataggtatattttggcattcacttaagctgtaatatataagcttctgtatatcttttttttttttttcctcgttaaataatttgtcaacttggtggaatactgaacttgcatatagtattataatttgttctttaatccaaaaaaaaaaaaaaaaaaaaaaaaaaaaaaaaaaaaa

SEQ ID NO: 3777 - DNA, 940 bp, Glycine max
ggggaagcctgttcaagttccaatatacgatttcaagtctagttctcgcataggttacaggactgttgaagtccctagctctcgtattgtaaggctcgagggcatctatgccttaagtgaaaaatcacgacctttgcttgatcttcgtgtttctgtcactggtggagttcattttgatcttgtcaagcgtgttttgcgggacattcatcgtgccggtcaagagcctgaagaaataattcatcaaatctctgaaacggtgtatcctatgtataaagcttttattgagccagatctcaaaacagctcatctaaaaattattaacaagtttaatccattctctggattccagaatcccacttacatattgaagtcagcaagagctgtgacagttgatcaaatcaaggcaattattgctgcagagcatactgaaaccaaagaggaaacgtatgacatatttcttctaccccctggggaagaccccgaagcttgtcaatcatatctgagaatgagaaaccgtgatggaaagtacaatctcatgtttgaggaatgggtgacagatagtccattcataatatcacctagaattacttttgaagtcagcgtgcgccttcttggagggctgatggccttgggatacacaattgcagctatcctgaaaagaagcagccatgtctttcatgatgataaagtgaccataaaaactgattggctagaacaacttaatcgcacctatgttcaggttcaagggaaagacagaaactattgcaaatttgtagcagagaaactggggttggatggttcctatgttcctcgccacttacattgaacaaattcagctagaaaagcttgtaaacgatgtgatggtatgagccatcatacaaccttttgcttgttgtttacatgttgtatactgaatagtgatctgatcaaactgcaggca

SEQ ID NO: 3778 - DNA, 2201 bp, Glycine max
aaattggtttgtttggggtcctgtggctgcacatatccaaccttaacttcggccgtcgaatctttctggtcattggttgtttttaattctttcaaaaattcaaacacaacccaaaatctcttgggaattgctagattcactgcttctcctagcagcagattttgggttcttctgacccaattattcattttccccaacttggtcttgttgaatttttattggggttgtaaattccttgttgttgagtttgaaagttatttcctttttccccttctggattcaagtcccaagtatttgcttaaattggggtattttttttatatcagaattgttgctttgaggttttccaaggcttgaaatctgaaaatgacgattggtagtctagcacctaaggcagagaagaagaaatcaaggaagaacaagactgttgttgttaatgagaatgcacccttgttgccaaaaagtcatgttcaggagagtgatgctggttttgatgatttcaatggagcttcattttctggggctgtttttaacttatccaccacaattattggtgctggtatcatggccttgcctgcaaccttgaaacagttggggatgatacctggtcttcttgccatcatcatcatggctttgttgacagagaagtcaattgagcttttgattcggtttacccgggctgggaagtctgcttcttatgctggtctcatgggggattcctttgggaattatggaaaagctctggtgcagatatgtgttataatcaataacatcggtgttctgattgtttacatgattataattggtgatgtgctctctggaacatcttcaagtggagatcatcactatggtatccttgaaggatggtttggtgtgcaatggtggacaggccggacatttgttgtactttttactacacttgccatatttgtacctcttgcgagctttaagcgaattgattcattgagattcacgtccgccctttcagtcgcacttgcagttgtttttctagtcattgccgtgggaattgctgttgtcaagatatttagtggaggcattgtgatgcccagactcttccctgtcacgactgatgtggcatcattcttcagactattcactgtagttcctgtgtttgtgactgcgtatatctgccactacaatgttcacagcatagacaatgaacttgaggactcctcacagatgcaaggggttgtacaaaccgcccttgttctatgctcttcagtgtatgtaatgataagcttctttgggttcctcctatttggcgaaggaactcttgatgatgtgctggccaatttcgataccaatcttggaattcctttcggttctgtgctcaatgatgctgttcgtataagctatgctgcgcacctgatgcttgtatttccagttgtcttctttccattgcgtctcaacatagatggtctcctcttctcaaaatcaaggcctctggttctggataacgtcagatttgcatcactcactgttgcccttattggtgttatcttcctgggagcaaatttcatacctagcatttgggatgccttccagtttactggagcaactgccgcagtctgtataggattcatttttccagctgccatcactcttaaggaccgctacaacattgctactaaatcagacaagattttgtctgtcattatgatagtccttgcagtcttctcaaacgttgtggctatatacagtgatgcatatgccttgatcaagcagaacaaaacttcacgcgaatgatggccatgattttagatgagaggaactgaattgacagggttattggtcaattagaaaatcggggttttctgagaggatctgatgggttgatttgaataaacagagaagctaccctgtgtacaaatgtgcttcagaagtgttgaggccagcaacatgcgttcagcctcctttgtaattttttgccattctgttgttatagttaaagtttttattgaatattactctctttccctgatttattcttccccaaatgtaataatagaaacctttgttggcatttgtatgtatttattgtattggagaaggaatgaattacttaaagaatgatatatagttcaagaattggacgagaaaaaaaaaaaaaaataagccattctccctccccttctcttttttcttgttctatttgttaaagaaattgaattgcagatttg

SEQ ID NO: 3779 - DNA, 1709 bp, Glycine max
ctattgtaacactgacatatattaatatcagcgtcgttcgccccccccccagttcattaaagaatatttcttaacaagattgttttcagatagaagaaagaagaaagaaaatgggtggtagcagtgagaagaacaaaaacgcagagctgatcttgattccctcgccaggaattgggcacttgacttcatctctagaatttgcacagcttctaatcaaccgtgacaaccgtctttccgtcacaatcctctgcatcaagttccctttcacaccctttgcagactcttacatcagaacagctttagcctcacaacccaaaatcaaactcattgatctccctctagtggagccaccaccacgggagctagctctcaactcccctgaacactacatatggaccttcatggaaagcctcaaaccccacgtcagagccatcatgcaaaacattttatcacacccagttgttggtttagtccttgatatctttgctatgtctatggttgatgtgggagatgaacttggcataccctcttacatgttcatgacttcaaatgttgcattcacagctttcatgcttttcctcctcagccgtcggatggaggatgtgttcagtgattctgatcctgacttgtcgattcccgggttcccggatccggttcctccgagtgttctgcctgatgctgctttcaacaaagacggtggatacgccacgtattacaagcttgctaagaggttcatggataccaaagggatcattgtcaactctttttcagagctggagcagtatgctattgatgcattgtctgaagaaggtcaaagtcgaacccctcctgtctacgctgttggccctttgattgatctcaagggtcagcctaaccctaatttggatcaagctcagcatgacaaagtgttgaaatggctggatgagcagccaggttcttctgttgtttttctttgttttgggagcatgggagggtttggttccttctcaaacaagggaaatagcactagcacttcagggtagtggggtaaggttcttgtgggctatgcgttctcccccaacctcagacaatgcagacagaaccttaccagaaggtttcttggaatggatggaggaaggtaaaggaatggtatgtggatgggcaccccaagtggaggttttggcacacaaagccattggggggttcgtgtctcattgtggatggaactctattttggaaagcttgtggtttggggtaccaatattgacatggcctatctatgcagaacaacagctgaatgctttttggatggtgaggggatatgaattggcagtggagcttaaagtggattatagaaggggtagtgatcttgtgatggcagaggagatagagaaaggcttgaaacaattgatggatggagataatgtggtgcacaagaatgtgaaggagatgaaagagaaggctaggaatgctgtccttactggtgggtcttcttacattgctgttgggaaactaattgataatatgttgggaagcaactgataacatagttgttgtgttttattagatggagttgctcctttcctgttagatgaataatcaaatggttgcagtttgtgtatgttagatggagttgctcctttcctgttagatgaataatcaaatggttgcagtttgtgtatgacgaaaaaaaaaaagcaattatgaatattcttctgttctgcgttttc

SEQ ID NO: 3780 - DNA, 1547 bp, Glycine max
ttaaacaagaaccattggatactggatagagaaacttcaccttgtgcggttactcccaaactgcacaagatcctcttcccaaacaaagcctaggaatttgtgccgtcccagtaaatgttaataaccatgactcatgaatgaatcatgtcacaatccaacagaacagaactagtaccatgttgctgtcacaagccaaactgcacaacaacaacaacatctccaatgccattaacatgattatgaagaagaagggtaataacaataacaacaatcattgttcacctgctatactttatcactacccttgccctgatggtgcttttgctgcccttgctgcacacctttactttaaggccacttcatcattctctcctcttttctttcccaacactgtcttcaaccccctcagtgctgaagatcttcctctgaatgaaattggtgatctttatctcttagattttgtggggcccgatggttttgttcaggaaatctccaccaaagttccaagggtgattgttttggaccatcacaaaactgctcttgagaggctaggcaatgaggcttcacttggtgagaatgtggttaaggttattgacatggagaggagtggggctactattgcttttgattacttcaaagataagatttttagtcctgatgttgcggttaagcacccctcaattctcgaagaattcgagcgtgtcaggaaactttttctgtatattgaagatggggacctttggaggtggagactcccgaacagcaaagcttttagaagcggtttgaaggatttggatattgaatttgatgccaggaaaaacccttccttgtttgatcagttgctttcactagacttggataatattattagtacaggcacggtgagcttatcggacaagcaaaaactaatcgatgattgtctcagaaagtcatatgaaattgcccttgggaatgctgaatttggttattgcctggctgtcaatgcggatactgctctttcagagttgagaagtgaattgggacatcaattagctactaaaagccagaaaatgaatttgaggggtattggtgctgttgtttataatgtaccagagcttgaaaatgatcaaaggctaaaaataagtctgaggagtgtggagaatgaagataccacgcctatctctcaggaatttggaggtggtggacatcgaaatgcgagctcttttatgttaacagcggatgaatttgaaaaatggaaggtgtgatccgatatttgcacttgacatggggagatgaaggagtatacaagatgtgtcgtgtgaaatgttagatagttctatcaattagtgtattatgcaactctcttaactattttttgggtatccatgtagtagttatttattctattatgtaatgcaaaataatgtttgaatagtccctccaatcatctagatatttatttggataatgttaagtcttgtccatgtaacattgtagcattagaaatcaattggtttcgaaattatttgaccaaaaaaaaaaaaaaaaaactcgagactagttctcgt

SEQ ID NO: 3781 - DNA, 1539 bp, Glycine max
cggctcgagcggctcgagacgcgagaagacgacagaagggggcgtagttgcagggcaatgtgattgaggcagatagtgaaatcctaagattgtttagttggaagatggaggcagtggaatcaatagcggttccggaaccggacgaagacgatccttcatcgacgcttctggatctctcgagttaccagctccacgaccttgactcggtcgagttgccacccagcctcaccgagttggacctcaccgcgaatcgcttgtccacgctggacccgcgcatagggaacctctcccatctcaagaagctctccctccgccaaaacctcatcaccgacgccgccgttctccctctctcttcctggaacgccatttcctctctcgaggagcttgtgctgcgcgataatcaattgaagaacattcctgatgtcaccgtatttaagaaacttctggttttcgatgttgcgttcaacgagattagttcgctacatggcttgtccagggtctccgataccctcaaggaactctacgtgtccaacaacgaagttgcgaagattgaggagatcgagcacttccatcagctccagattcttgaactcggctccaataaattacgggtgatggagaatttacagagcctcgagaatttgcaggagctgtggcttgggcagaatcgaattaaagttgtgaatctgtgtggtctcaaatgcattaaaaagattagtttccaaagcaatcgtctcacttcaatgacgggatttgagggttgtgtagctctagaagaactgtacttgagccataatggtattgcaaaaatggaagggttgtcatcgttggtcaatcttcgggttttagatgtatcatcaaataagataacttcagtggatgacattgtgaacctgacaaaattggaagatttgtggcttaatgataaccaaatagcatcacttgaaggaattgctgaggcagtctctggttcaaaagagaagcttaccaccatctacctaaaaaataacccatgtgctaagacgcccaactatactggaatcctacgggaaatcttccccaacattcaacaaatagattctgatatattttcttagaagtttcttggcttcagcctttttgaaaacagttgcttcgaagctttgtcttttcaaatctattttctgtcatgcatgcagattctggtttgtaagaatgaagatttggctccatccacctaatgaagagaatatgcttatcaaccattggacgatactgtggcctgaccattggttacctgtcaaatgaatatgcttgttttatgtttctttgttttgcagaccacatttcgttgtgtgtgtttttggcatccaatttttgagtatcactgtaacactttctttctactgtgtcaattatatttctagctaccgactgtggcgtacagaggctgtgggtgtagtagattaatgatcatccagattcattgaaatttgttttagtgatttcttatccataataacaagttaatatttattgtcggcaaaaaaaaaaaaaaaa

SEQ ID NO: 3782 - DNA, 1281 bp, Glycine max
ccggtccggattcccgggtcggcggccgcgttttgcttgcgttgcgatttgcgaaccctgttgtgttgtgtcactgttgaaactcgaaacccctctcctccttcctcccttcaacgccgtggaagaagaatagaatctgagtctccgttatgttccgcagaatcttgtcccatcatcgcgcactctcagcctgcgcccacaatgcaacaacgcgctcactcgttactcgccgcacccccaatgttccaccaccacccaccttcctaatcacaggatcaaggcccgtttcttccaaaacatcccaatccaacgaaaccggtgaaaccaccaataaggctaaaaaggatgtggcaaacgtcgaggatccctttagtgcccctacttataacattcccgagaagcctgtcacgttcgtggaaggggcttcctacggtgttgtcattcttgcggggctcggaatcgcagctgctgcaggatatgctgttttcaaagagcttatttttcaacctaaagagtacaagatctataacaaggctctcaaaagaattcaggatgatggtcagatacgagtaaggattggatttccaattactggttatggtcaggagagtagaaatcgagctgctcgccaaagaattcctcacagggtatggactgatgaggaaggtgtcgagcatgtggaggttaatttttatatccggggcccccatggacatggaaaagtatttgcggaaatgttcaaaggcgctgacaatgagtggaagtttacttacttgattgttgagattagagcaccatctaccgcacaaataattctggagtcatacatcccatcttacagtgcaaccaagtagcctaaatgataaaaaggtctttaatatttggtccattactggaggctgcatttttcagctatcagcattgaccaccttagccagtccatgtttcacaagggatgggagttgaaagaaggaaagataattaaagaaagtcaaataatgtgaaaaacgggatcccaagtctcaggttcagtatttttgtttttccatttagaacctgcagatttgagcaaaagttttgggcaaggatcttagtaatgatgatgacaagagcaattactttgtccttgacagctattgagaaatccgtctaccaatttgttgttattgctgacaattcaacttggcttggtttgtgaaagtactttgagtagctggttgtagcatgcaaatttttaaggatgaatataaggggattgtagccaaaaaccaaaaaaaaaaa

SEQ ID NO: 3783 - DNA, 1253 bp, Glycine max
tcgagtcagctacgtatgacccccccagtcattcctcataaccggttgcaaatcggcaggagcttacacgaggacttgtgcgctggtggtaaccctgagattggcatgaatgctgccaaggaaagcaaggaatcgatacaggaggcagtttatggagctgatatggtctttgttacagctggaatgggtggaggaactggcactggaggagctccagttattgcaggtatcacaaagtcaatgggtatactgactgttggtattgtcacaacccctttttcatttgaagggcgaagaagggcagttcaagcacaagaaggaattgctgcattaagagataatgttgatacactgatagttattccaaatgacaaactgctgactgcagtttctcaatctacccctgtaactgaagcattcaatctggctgatgatattcttagacaaggtgttcgtggtatatctgatattattacgataccaggattggtgaatgtagactttgcagatgttcgagctataatggccaatgcaggttcttcacttatggggataggaactgcaactggcaaaacaagggcaagagacgctgcattaaatgctatccagtcacctttactagatattggtatagaaagggctaccggaattgtatggaacataactggtggaagtgatttgaccttgtttgaggtaaatgctgcagcagaagttatatatgaccttgtggaccccactgctaatttaatatttggggcagtaatagatccatcactcagtgggcaagtaagcataacattaatcgcaactggattcaagcgtcaagaggaaagtgaagggagacctatgcaggccagtcaactcacacaaggagataccgttggtatcaatcggcgatcttctactttcactgatggtagctttgttgagatccctgaattcttaaagaagaaggggcgctcacgttatccaagagtttaatactcttttccccaactccttaatccctccttgcatctctttaccaagcaatttttagggatacaaatctcatcagtctaggtattagatcacgttttgccccttttttcatttttaggttcgcattgtgcatacagttgttcatgaaagcgaagtactttccaaaaccgttgttttctgagttgaggcttgttggcatgttttaataagtttattagcttgtatttttgtacagagaataatatatcagtaatggtcagtgcttgttattg

SEQ ID NO: 3784 - DNA, 720 bp, Glycine max
  misc_feature (611)..(611): n is a, c, g, or t
ctaattttaagcattcccttctcttttccattgcagctagcaaagaagcgaagacccctttttctggttattaacagagtcataaaaaaccaaagttttctattctctgtagctcacatggtgggctaagaatatctgactttggggtggaaagtatggttggcaaggagagtttgagaactgaggtcttgaacttgagctttgagaagcttatgatggttgaatgtggtggaaatagtgggaaaggagtgaacattaaagctggtgtgatcacggagtggaaggatattccagttgagcttttgatgcaaattttgtcacttgtggatgatcaaacggttatcatagcttctgaagtgtgtcgtgggtggagagagggcaatttgctttggccttactcggttatcactctcatggtgtagcaagaacatgaataacttggtcctatccctttctcctaaattcacaaaactgcagactttaatccttcgtcaagacaagcctcaactagaggacactgctgttgaaactatagcaaatttctgtcatgacctccaaatcttggacctcagcaaaagtttcaagcttactgatcgctcattgtatgccgnaccccttggtttgccggatctttacaaactgaacatcagtggttggtcagcctttagtgacaatgctcttgcttacctggccgttttttgtgaaagcttaaagttttga

SEQ ID NO: 3785 - DNA, 1049 bp, Glycine max
cagcctttagtgacaatgctctggcttacctggccagtttttgtagaaagctgaaagttttgaatctctgtggatcgcgtccggctgcatctgatactgcgttacaggcaattgggcattactgcaatcagttacagtttttgaaccttggatggtgtgaaaatgtcagcgatgttggagtgatgagtttagcatatggctgccgtgatcttagaacactcgatttatgtggttgtgtccttataacagatgacagtgtaattgccttggcaaacagatgtcctcatctgaggtcccttggactttacttctgccaaaacatcacagacagggcaatgtattccttggcacaaagcaaagtgaacaacaggatgtggggttctatgaaaggtggtggaaataatgatgataatgatgatggactaagaactttgaacattagccaatgcacagcactcaccccttctgctgtgcaagctgtgtgtgactcatgcccttccctccacacctgttctggaagacactcactcatcatgagtggttgtctgaatctgacttctgtgcattgtgcttgtgctggccaagcacaccgtgctttcactctcccacatgcagctcattgagctaaggggttggcaaggttttaaatatcagtcgtggtcgcgttgtgatttcgtcacgtttgttgatatcacgacaaatcgtggacaagtgcggccgatatggttccgattgcagttgcatggcagtcgcatacaggtaaaaaatcttgatgttgcagacggatatttaaaaccttgggggttggtgatgcataaagacactttgaggaagttcccttgaagggtttgatagttttaggtgtcttgttgataagtttaagttgaatgctgcatcatgtcatgttgattctagaacagcttgagcttggtgcttgagttttcttttggtctctgactttcatgtgaagggtcagaatattttggatgtaaaaatggctctgaatttattttgtgacatggacttttatataatgggatgtttatgcc

SEQ ID NO: 3786 - DNA, 1083 bp, Glycine max
ggctcggggttctagatcgcgtgtttccgctcgattatattcataatattttctttgtgtaacatcatttacatgtaaaaaaataggaggcaatccttttggatcttctcagagtcgtcagtcatcatcgagccaggctagccactcccatccgcactgttcagaagatatacagtgaggctgactcagaaaatataccctttggggacaccattttcactcgatctagtgcgggaaatcgcccattcctactgatagaaccactatataaagttaatggtgaagataaaactaagccttcaacacgttcaactcgtgcaagtgaggaaaaagatttcaagattgatgaaaccatggcatctgacaccaaagaagatgagaactttgcagcaacattaacctcctcacctgatgtaaattccaaggataaatccaagtcactgtctgaagcccagccaaaaaaggaaaatgcagtagatgcaggaaagggacctacagttcctgtatccaaaaaccttgttcaaagtgctgcgcctgaaacctctcctgttacttcccacgagatcaattctgcaacttcttcgcaatcaaaacaagatgaagagaaatcttctgtccctctgtcatcagttaggccatccttggaagagaacattctactcggggttgccatagaaggctcaaaacgtactcttccaattgaggaagaaatgactccatctcctatgcctgcagagtcacaagaatttgctgttcaacggaatgggggtggacctcctgctagtaaggataagaaggatggccagtcttcatttccaactagtaaacagaatgactaagattagtagctaaattaggcagattagaacttgatatttcagtacataccttcgatagaaactaaacaaaaatgatccagctgtcttttttataagttggaattatgcattgtattctccctaatttgcccatgtatgtacataattatcaattcatggttcacactcgggtaaatgcataccttcaaataattttctcgaatctattacttcttagacgattaagaatcattcaatatattct

SEQ ID NO: 3787 - DNA, 1506 bp, Glycine max
tcagctacgtaggccccccccccaacttatagaaacccaatttcatatggaaaccagtgcggccatggatgtcgaggagcaaccttcacccaacgcaagcgacgttaaacgcttcggccttaaaaactctattcaaaccaacttcggcgacgactatgttttccaaatcgtcccaaacgatgattggagtgcaatggcggtgtcactgtcaacgaacgcagtgaaactgtattcacctgtggcgggtcagtattatggagaatgcaagggtcactctgaaaccatcaatcagattttgttttcgggtccttcaaatccccatgttttgtgttcctgttcttctgatggcaccattagagcttgggacataaggacttttcagcaggtttcttccatcaatgccggtccttctcaagaggttttcagcttctgtattggagggactggtggaaatttagtagccgccgggtgtaaatcgcagatactgttctgggattggagaaatatgaagcaagttgcatgcctggaggactctcatgtggatgatgtcactcaggttcattttgtccctaatgaacaaggcaagctgatttctgcttcagtagatgggttgatctgcacatttgatgctactggagatatcaatgatgatgatcatctagaatcagtgattaacatggggacttcaattgcaaaggtggggatttttggagagaattatcagaagctttggtgcttaacacatattgaaaccctgggtatctggaactggaaagatggtagaaatgaaggaaacttctcagatgctcgtactatagcttctgaaagttggaacttggatcatgttgactatttcattgattgccactattccagagaagctgaaaaactatgggtgattggtggcactaatactggtactatgggctactttcctgtaaatcacgaaggagtggctacaattggagctgcagaagcaattcttgaaggaggccacgcaagtgttattaggagtgttttacccatgtcaacaattcctagtggacctactaatagtcctagccaaggcattttcggatggtcgggtggagaagatggtcggctgtgttgttggctctctgatgattcctctgaatcaaatcaatcttggatttcaagcactttgactatgaagccagaaagaacatgtaagaaacaccgtcatcacccctactagcaaatagcatgccgagccattaacttagatggttcaaagcccgaggagcattttttgttttatttgccaatagtttgttttatttttcatcacaacatgggttgagatgtgttggatttttattataaaaaaaaattgtatttgtacgtgagcatttttcatagccctttttgtttttccaaaatataggacacttgagtcattttgtaatcttgtatttgtatggagtgtcaatattatgtgatgattttctaggtaaaaaaaaaaaaaaaaaaccgctttgtcaatta

SEQ ID NO: 3788 - DNA, 770 bp, Glycine max
  misc_feature (757)..(757): n is a, c, g, or t
ggtggctagcccgcgccaactctatggaaacacacaacagattaggattacgtaccatttccttgatcctttttctgactcttactaaaagtctaagctcaactgcatttgatgtcagtgaatatgaagattgggagagcgttgatacagcagattctatcttaagttatggaagtgaattgggagacatggaagaaaatgaatggcagatggtgcaaacgaaaggaaaccaatttgtggtgaacgaccaacctttctatgtcaatggattcaacacatactggttgatggtatttgctgcggatgagtccacaagagggaaggtcactgaggtgttcaaacatgcatcctctgtgggtatgtcagtttgtaggacttgggccttcaatgatggccaatggcgtgctcttcagaaatctccttcagtttatgatgaagacgtattcaaggccttggactttgtggtaagtgaagcaaggaaatacaaaatcaggctcatattatcactggttaacaactgggaggcttatggtggcaaaccacagtatgtgaagtggggcaatgcagctggccttaacttgacctctgatgatgacttcttttcacatccatctctcagaagctactacaaggctcatgcttaagacggtgctcaatagagtcaatacattcacaaatatcacttacaaggaaagatcccacaatcttttgcttggggaactgatgaatgagccctcgatgcacctcagactcctcnagtgatgtgttac

SEQ ID NO: 3789 - DNA, 960 bp, Glycine max
  misc_feature (13)..(14): n is a, c, g, or t
ccgctcgaggccnnggccgggccggggcacttcaaaaagaggggccgattcgcgccgccgcaggcggcgggcccaaacaaataacattctcaaaatgagagtggtattaattactttattcctgtttataggtgcagcagttgcagaagacgctggtattgatgccattactcctgaagaaggcaaagccaataatattattgaggcgtatgagtcacctagattccaaaagtttgtgacacattgcagctcacatgttactcaaacatgcagtggaaatgatccattaaataatcaggaggccagtagaatgaatagtccatttgggttgtctttttgcctttttgattctatggagaagtgcttggcagaccataaagcctcacttaaagatccccaagataacaacaacctagcttcaatgtcgtctcttcctggctcaatccaaaatcagccactcctcattgagactgtaaaattcagagccgtcttgaaaacctgttcccatgtcagtgcacgatattgtttcactaatcctaacgttgctacatcggctttagcggattgtctcatgccatctctcactcattgtgtttatccttctagttctatcttattaccacccccgccaccacccccgccacttatttagatctttgaagtacttgctatagaaaaatataactgggtttgctcaatcagcctatgtaataatcctttgcctagtcaagggacaagtcttaatctatcttgaaacatccatagttatatgtcaataatacatatgattgacttgcaagcttgttttatgatgaaggatttattataccttcaatattccaattagctacatctggtttgtgtaagaaatcacttgtcatgaatcatgatcgttaatggctttcctacttaatagctagtatttaataaaacatgttttacatctaaaaaaaaaaaaaa

SEQ ID NO: 3790 - DNA, 627 bp, Glycine max
  misc_feature (600)..(600): n is a, c, g, or t
aggcacggctgcgagaagaccggacgcggggattccattgtgtagtaaccaatcatctttagttcttcagtaatttattgtgggattctattctaagattttgagaatgtctagctgtgggtgtggaagcagctgcaactgtggcagcaactgcggttgcaacaagtactcttttgacttgagttacgttgagaagacaaccacagagactctagttttgggtgttgggcctgtgaaggcccaattggagggtgctgaaatgggtgttgcatctgagaacggtggctgcaactgtggatcaagctgcacctgtgacccatgcaactgcaagtaaggtcaagatgtataaccttgaagcagagatagctgtaatatatgtatcaacaaataataagaagtagaagttgcgtttggagctttagaataaagtgtttgctatgtgttttgttggtcttttataaatatgtaatttgaatcatcaatctctgcttataaatgaatacttttggtgttatatgaataaaaagtttgttgggttatttcattaaaaaaaaaaaaaaaaaaaaaaaaaaacaaaaaacccaaacccgcccctgcggnctcctgctcccccaaatcgtcggccgc

SEQ ID NO: 3791 - DNA, 612 bp, Glycine max
cccgcgattccgccgacgctagtgaccaaacgtcttttctttcttatacattttactttagtttgtgaaattctatccaaagattttgagaatgtctagctgtgggtgtggaagcagctgcaactgtggcagcaactgcagttgcaacaagtactcttttgactacgttgagaagatcacaaatgagactctagttttgggtgttgggccggtgaaggcccaattcgagggtgctgaaatgggtgttgcagctgagaacggtggctgcaactgtggatcaaactgcacttgcgacccatgcagctgcaagtgagatcaacatgcataaccttcaagcagagatagctgtaatacatgtatcaataaataataagtatgtgttgtgtttgaagttttagaataaagtggtcatggcccgcctttgcaaattcaaatgttctaggatttgttacgggtgttttaagctgtggttgctttgtgtttggttggtctcttataaatatgtaatttgaatcgtcaatctctgcttataaatggaatactattggtgttatgtgaataagaagcttatgtaccaaaaaatttggaataagaagcttgttgggttacttc

SEQ ID NO: 3792 - DNA, 2010 bp, Glycine max
  misc_feature (1971)..(1971): n is a, c, g, or t
  misc_feature (1974)..(1974): n is a, c, g, or t
  misc_feature (1991)..(1991): n is a, c, g, or t
  misc_feature (2000)..(2000): n is a, c, g, or t
ctaaaataaatcacaagtggaaagagattaccatattaaacaaatattcattgatttttaacacttcaataatattttttttctttctatatgatatcatcataaatcttacaataagttttttagtgggtgtcttgtaatattgaacaatcatttttgaattttcataaccaaatttaatctcaaaagaatacaaaatgccgcgcccgtcttaagggctaaggcttctcagtcctctaaaaatttctagagtctctttcttcactttcttcctccacatggcagagacaccaaccctcagaatccacgaagtctgccccatctcgccgccacaagaaaccccatcaaccactattcccttcaccttcttcgacgtcctatggctacgcctccccccagtggagcgtctgttcttctattccttcccaaacccaacaacaacctcttcattcttcgacaccaccattctcccaaatctcaaacactccctctccctcactctccaccacttccctcctctcgccggcaccatcacatggccacttcacacacccctccccctcatcacctacacccccggaaactcaatccccttcagaatcgccgaatccaacgcagacttcaacaccctctcttcaaacctctcagaagttaacaaccaccgccgaaacctaataccccacttacccacttcccacgaagaagcttcggtgttagcccttcaactcacccacttcccaaaccaaggctattcgataggaataacaagccaccacgcagcacttgatggaaagtcttcaactttgttcatgaaatcgtgggcgcatatttgttcttacctcaatacctcaccggaagaaccgttgctgttttcactaccgaagcatctaacaccttcgtttgatagatctgtcataagagaccctttggggatcggtgagatttacgcgaagtcgtggacgagcttcggtggagccaccaatgaccgaagcttgaacgtgtgggataccctcggtggaaatcaaaccgatttggttaaaggattgtttgagttgacaccgttggatatcaagaagctgaagaagttagcggagtccaagtttgttgtcggagacaacaagaagaaagttagggtgacatcatttacggtcacgtgcgcttacctgttgtcatgcgcggtgaaagcggagcaacccaactgcgaaagagtgccttttgtcttcaacgtggactgtagggcgcgtttggaccccccaattccggaaacgtacttcgggaactgcgtcgtggctttgttggcttcggccaagcgagaagagcttttgggggaagaagcgtttttcaaaagcgttatagggataagcgaggagttgaacgggttagagggtgacgtgttgaacggcgcggacaaatggattccgaagattcaatcggtggtatcggagactcctaggttgttctccgtcgccgggtccccgaggtttgaggtttacggcattgactttgggtggggaaggcctgagaaagtggatgtcacatccgttgataaaacgggtgcgttttcgctctcggagagtagggatcatagtggagggattcaaattgggttggcgttgaccaagaatcaaatggaggcgttttctagggtttttgctcaaggacttgagtccttggaatcatgatgatgaggaatctttggtgagagaaagaggttagtggctcaatcaaataagtttcaataatttaaggggttattgttagtatctgagtatttatatatcatgagataagatacttgagttcactactccaaaaaataagagtccatctacctttttgtttcaagtagtttactccagtaaatcagattatatcaaatctccttttaaaaaaaaaaaaaaaaaaaaaaaaaaaaaaaaaaaaaaaaaaaaaaaaaaaaaaaaaaaaaaaaaaaaaaaaaaaaaaaaaaanccnaaaaaaaaaaaaaaaanttttttttncccccccccc

SEQ ID NO: 3793 - DNA, 1987 bp, Glycine max
caacatgcgactgtgttagcctagcggatgaaaacaaaaaaaaataaaaaaaattacatctaagcacagagaaagaggaagagatggaggcagaggcagaaggtgaagaaggtgcgaagctaagcatttacaaggcggcgagaagcataaagcgaagagagaacagtttgtacaacgcactgagatccatctaccaagactccatcttcgtctccgagatctctcttctatggcctcagctccctctcctcgccaacctccgctgcggcctctggtactcccgccccgccgccttccactccacctgctacttcaagtccaccgacggccacaccaacaactgctccttcaccaccgcccgcctcaacctccacgtcgccctactcgccggacagaaaggaggctgcatcatcgtcgattccactcgaagaggaaagcgcttccctgatagcatgtctaaaactatacccatctggacctctgttctcaatcgtgccattaaagactttcgtgattctaatggctgtcctcttgaatgggattgttccttgcaccttcccctgtgggtttcccaaactgaaagagcttccattgagaggcggttagatgagtggactctgttactgaaagcaagtggggctgatattgcctcccttgctgcttgcttgaggaaacccctgcgccctctctggatttcgcagaaaactgtcatctggttgaatgaagtgcctcaccatgaatcttgggatttcacacccatcattcttctctccgcgtcgtcttcttcatcggtcgttggcgcgagccaacacaggactacctctgagttcagctggaattacattcccggtgctggagacgacgaagaaagctgggctaggggtttaactcctgctttcttctggaaacatgtttatgatcttattaactcagctcctgaagtctgtaaccagaaggttgcagatatagttgaaaagagtagagtatcccgtgcttatagaggagaaagtgcaccacagatcacagttaaaccgctcaagtcagcctccctttcattgcatgaagaaccatcagtagcttgtgatttttcaaacattaaaattgactccgagtcttcggaagattttggaatatcttggttgggctcaactaatttggcagttggcacggctcaagctgctgcagatgctgctgatgttgattgcatattgaattgtgatcaggagtcaatctctgtctgtcttcccagtgctgaatcatatttgcatcttccaatggtgacttcaaagtttgatcggttttcattattaaacaatcttcctaaagcggttagctttgcaaagttcaatctcagcctgggaaaaagacttctagtctgttgtaataacggggaagatattagtgtatgcgtttgtttagcaatcttgatgtcattatttgatgaaaaaggtatgtttgatggtgggaaatccttcagtgcagcacaagtcactaaatgggatatgagacgtaggcttgtatttgtctgcaagtttgcaacagatgctcgaccatccagaggaaatttgaggcaagtttttaactttctaattggtggaaaattcaatcatcctctggacacgggaagagatgagtaattggaattgcgagggcagatgattgaatgaatatttttggccattcctaaaactttccgagcttaataccttggaatcttggattttgcattgcgcagatgtgaaactattccaaagtcagttttcagagaattgttgtatgcctaagtttatgcgaaatttgacatctctcgaacctatgattcttttcatgttctggtctgaatacacaaatactgagatgtctatgactaggttatagagtatagacccatgtgatgcacgtgttagacattcaattttatggatgaataattaatatagaacaattaaagtatttggacggcctcccaagatgaaaaccacaacca

SEQ ID NO: 3794 - DNA, 857 bp, Glycine max
attacccggcctcgacccacgcgtccgtatcttcattcttccagtctaggtggagtgatctagatatcaatcagcatgtcaacaatgtgaagtacattgactggattctggagagtgctccacagccaatcttggagagtcatgagctttcttccgtgactttagagtataggagggagtgtggtagggacagtgtgctggattccctgactgctgtatctggggccgacatgggcaatctagctcacagtggacatgttgagtgcaagcatttgcttcgactcgaaaatggtgctgagattgtgaggggcaggactgagtggaggcccaaacctatgaacaacattggtgttgtgaaccaggttccagcagaaagcacctaagattttgaaatggttaacggttggagttgcatcagtctccttgctatgtttagacttattctggcccctggggagagttttgcttgtgtctgtccaatcaatctacatatctttatatccttctaatttgtgttactttggtgggtaagggggaaaagctgcagtaaacctcattctctctttctgctgctccatatttcatttcatctctgattgcgctactgctaggctgtcttcaatatttaattgcttgatcaaaatagctaggcatgtatattattattcttttctcttggctcaattaaagatgcaattttcattgtgaacacagcataattattattcttattatttttgtatagcctgtatgcaagaatgacttgtccatccaatacaaccgtgattgtatgctccagcgtgtatttatgcaagcttcccacatgggaattattgtgtgcaaaaaaaaaaaaaaaa

SEQ ID NO: 3795 - DNA, 1935 bp, Glycine max
cggacgcgtgggcggacgcgtgggccagcttttctccttctctctctctctctctctctctaggctcgagatcttcttcttcttcttcactcagtcagatccaactcctcagataacacaagaccaaacccgctttttctgcatttctagactagacgttctaccggagaagcgaccttagaaattcattatggtggcaacagctgctacttcatcatttttccctgttacttcaccctcgccggactctggtggagcaggcagcaaacttggtggtgggcctgcaaaccttggaggactaaaatccaaatctgcgtcttctggtggcttgaaggcaaaggcgcaagccccttcgaaaattaatggaaccacagttgttacatctaaagaaagcttcaagcatgatgatgatctaccttcgcctccccccagaacttttatcaaccagttgcctgattggagcatgcttcttgctgctatcacaacaattttcttggccgctgaaaagcagtggatgatgcttgattggaagccacggcgacctgacatgcttattgacccctttgggataggaaaaattgttcaggatggtcttgtgttccgtgaaaacttttctattagatcatatgagattggtgctgatcgtaccgcatctatagaaacagtaatgaaccatttgcaagaaactgcacttaatcatgttaaaagtgctgggcttcttggtgatggctttggttccacgccagaaatgtgcaaaaagaacttgatatgggtggttactcggatgcaggttgtggtggaacgctatcctacatggggtgacatagttcaagtggacacttgggtttctggatcagggaagaatggtatgcgccgtgattggcttttacgtgactgcaaaactggtgaaatcttgacaagagcttccagtgtttgggtcatgatgaataagctaacacggaggctgtctaaaattccagaagaagtcagacaggagataggatcttattttgtggattctgatccaattctggaagaggataacagaaaactgactaaacttgacgacaacacagcggattatattcgtaccggtttaagtcctaggtggagtgatctagatatcaatcagcatgtcaacaatgtgaagtacattggctggattctggagagtgctccacagccaatcttggagagtcatgagctttcttccatgactttagagtataggagagagtgtggtagggacagtgtgctggattccctgactgctgtatctggggccgacatgggcaatctagctcacagcgggcatgttgagtgcaagcatttgcttcgactggaaaatggtgctgagattgtgaggggcaggactgagtggaggcccaaacctgtgaacaactttggtgttgtgaaccaggttccagcagaaagcacctaagattttgaaatggttaacgattggagttgcatcagtctccttgctatgtttagacttattctggtccctggggagagttttgcttgtgtctatccaatcaatctacatgtctttatatatatacaccttctaatttgtgatactttggtgggtaagggggaaaagcagcagtaaatctcattctcattgtaattagctactgctgtattctctctttctgctgctccatatttcatttcatctctgattgcgctactgctaggctgtcttcaatatttaattgcttgttcaaaatagctaggcatgtatattattattctttttctcttggcccaattaaagatgcaattttccttgtgaacacagcataattcttattcttatttatttttgtatatcctgtatgcaagaatgacttgtcctccaatacaactgtgattttgtatgctccagcttgcagtttaggccagcttcccacatgggaattattgtgc

SEQ ID NO: 3796 - DNA, 1054 bp, Glycine max
  misc_feature (874)..(874): n is a, c, g, or t
  misc_feature (877)..(877): n is a, c, g, or t
  misc_feature (908)..(908): n is a, c, g, or t
  misc_feature (1020)..(1020): n is a, c, g, or t
ggtgtttggcgaacttgaattcattggcttgtgtggctttctccctccaaaaaactcccctcttttccgtcggagaatggcgtcatcttcacaaagccgctgtggcagcggcagcgccgcctcacgactgaggaacgcagcttccaccttctgctccgactcacagcctctccttgccgatatccgaaaaaccgtgcttatgatgaaggacatcgcagttcaattggagaaagacaacctccctgacaaggcgaaggaactggaagatgcggttattgagttagtagggctatctgagctcagtgtgcaattttcatcagcggttcaagcttttgctaacgcataccagcctaaggaagagtttactaattttaatacgttgtttgaggatgagctttccaggtttaaggccaaccaatcttcagatgttcctaaaaatcctgtagtacgccaatttaaggaagctgtgtggaatgttcatcatgcggggcagccaatgccaggcgaagagcaggaggatattgtaatgaccagtatccagtccaacattttgaatattacctggtccattgagtggaaaacctgttactgagcttgcagaaccagttcgcagcatggagtgcaggcacatttatgaaaagaaagtaataatgcaatatttgaagtcaaagcaacatcaatgcccaatttcaggttgcccaaagatattgcaggcagataagctggtgcaagatccgttgttaatgattgagattgaggaaatgcgcaaaatgaatagagaaactgacgtagaagattataccatgcttaatgaagattagtgattgttcaaaccaactgctgataggttttatctgtaaattcgagtagtttnttntgttacatactcgtcaatatttttggctgtntacgtttgatttcaggacaattgtaatttcccattaggcgtgccagactggttagttaaagtggtttcaatttgcaaatttgcgacatttgcacacatatcagtgaagtttntatgaaaaaaaaaaagaaaaaaaaaaaaaaaaaa

SEQ ID NO: 3797 - DNA, 1066 bp, Glycine max
aaaaaatcttactttatgaatacatgccaaacaagagcttggactcatttatatttggtcagtatcagctacgtaggcccccccccccctattccatcatacaacttccctgaagtgctcttcaaccattacaatcataatttcactaaccttgttcttaatttgaaatgtgaaatgtatatcttgaaagaccggacacgaacttcactcctggattggccaatacgatttgagataatcgtaggcattgcgcgaggcatgttgtatcttcaccaagactccagattgagagtgattcatagagacctgaaaaccagcaacattcttctagatgaggagatgaatccaaagatatcagactttggtcttgccaaaatatttgggggaaaagaaacggaagcctgtacagggagagtagtgggaacctatggatacatggctccagagtatgccttggacggattcttttcaaccaaatccgacgttttcagctttggagtagtccttctagagattcttagtggaaaaaggaacactggattctatcagtccaagcaaatttctagccttttgggtcatgcatggaagttatggacagagaataagctactggatttaatggacccatctctttgtgaaacatgcaacgaaaatgaattcattaagtgtgcagtcattggacttttatgcgtacaagatgaaccaagtgatcgacccactatgtcaaatgttttgtcaatgcttgacatagaggcagtaaccatgccaattcccacgccaccaaccttttttgtgaacaagcgtcattctagctcagcttcctcttctagcaaaccagatataggtcagtttgagagcagttatcaagaaggtcgatagtgcatgattgaagctattgttagagtacgtgtaaaataattaataatattttaattgtattttataacaatttagagtattctgtattatttttaaggatcaattttggatttcctgtctgtctttttagtgcatacaccattttgaatttataacgtaagtttttaatataaaattttacttggtt

SEQ ID NO: 3798 - DNA, 865 bp, Glycine max
gaagacgacagatggggagggacactctctatagtgtttcaccccttaatcacgaccctccttcctttcattaagagaaatttagaactggtaaggtagaaggaaaatggataaagctctcactaaactgggtagcacttggatctccaagaaagccaaggcagagatttcccacataaccgacgacctatcatctctctcaaatactgtcgaagagaaggcaaagcttttcatcaacaagctcaaaggtaaaacccagaaagccttgccagatctccttcgagagtacaacattcctccgggtctgttcccccgcaacataacatgctacgaatttgatgcatcaaagggaaagttgatcgtgtacttatcctcaccctgtgaggtgtgcttcaaggactcatccattgtgaggtatgcaaatcgtgtcaaaggaacattatcaaaggggaagctcagtgttacagatggaatgaagaccaaggttcttgtgtgggtcaaggtgactagtgttgttgttgagagttacaagtctgacaaagtatggttcactaccaccggagttaagaaatcaaggcccaaagatgcatatgaaatgcctcgtgatgctattaaggtagaagaattttgaggcactttataatatatggtattccagttcaattcgctcatgatatgcaatacatggttacactattagacaattgtttttttgtttttttttttctgggtaagtttagaggagttatggtgttacagttgacaaacacatttgactttgtgacctgtgatgttaagaaaattgtatccagtgagtttgcaatttcaatcaagttacgatggtcataagtaaaaaaaaaaaaaa

SEQ ID NO: 3799 - DNA, 1974 bp, Glycine max
cccactgcgtccgcggtctcgtgcgttttgctctttcttcaagccaacctcttcccaactctttgttcctttcttcctctcactctcaccatgattacagtaagcgtaagatggcaaaaggagattttcaaagatgtagaacttgacactacccagtctccttatgtttttaaatgccaattgtatgatttgactggtgtgcctcccgaaagacaaaaaattatggtcaagggtggtcttttgaaggatgatgctgattggtcaacagtaggggtgaaagagggtcaaaagctaatgatgatgggtacagctgatgaagttgtgaagactcctgagaagggaactgtttttgttgaagatcttcctgaagaagaacaagtagttgctgttgggcatactgctggtcttttcaacttgggaaacacatgttatatgaattcaacattgcaatgcctccattccgtacctgagttaaagtcagctttgactaattattcacattcaggacgaaacaacgatgtcgatcaatcttctcatttgttgaccattgcaacccgtgacttgttcaacgagcttgataaaagtgtgaagcctgtggcgccaatgcaattttggatggtattgcggaaaaaatatcctcatttggacccccccccccccggagtgttcatgcaacaggatgctgaagaatgttggacacaacttttatacacactctctcagtccctcagatcccctggatctagtgaaaatcccgatgctgtgaaggccctctttggcatagaacttattagcaggattcattgtcaagagagtaaggaagaaagctcagaagcagagtctgtttattcacttaaatgccacatatcgcaggaggtgaaccatttgcatgaagggataaaacatgggttaaaatccgagttagaaaaggcttcacttgtattgggccgtagtgctatacacttgaaggaatcacgcattaatgccctaccaaggtacttgactgttcagtttgtccgtttcttttggaagagggaatccaaccagaaggctaagattttgcggaaagtagattatcctctggagttggatgtttatgatttttgttctgacgaacttcgtaaaaaattggaagctcctagacagatcctaagaaatgaagaaggcaaaaagcttggtctgaaagtgaatgagaaaagctctgttcagaaggaaaatgatgtaaaaatgtctgatgctgagggagcaacaagtggaggaggggagccatctgtagttcccatggaggagggtgaaaaggaaacacagatgactggaatttatgatttggttgctgtattaacccacaagggtagaagtgctgattcaggacattatgttggttgggtcaagcaagaaaatgggaaatggatagagtttgatgatgacaatcccaaaccaaaactagaagaagacatcactagactatctggaggaggtgattggcacatggcgtatataatcatgtacaaggctcgtgttgtatctgtgtaattgctaggaagagccgatttggtgttttacttcagagaatcaaggattgtgaatgagaaatggtttatttgttttctactcctgaggtttgatgctcattagtcggtatttatttcgtttaggtattatattttttttaaaggatgcataaggatttgaaatgaagcatggtacccctgaatctccttccttccatcgactgggtccaagaggcacttgaatatcaagttacatacatttctgtggtgaaagcctagcctattatttctatgaatcaaacgcgagagcaacgtcctttatgaaaaaaaaaaaaaaaaaaaaaaaaaaaaaaaaaaaaaaaaaaaaaaaaaaaaaaaaaaaaaaaagaaaaaaaaaaaaaaaaaagatttccggcagcccggggaatccacaaattcaaaaggggccgccaccgcgggggag

SEQ ID NO: 3800 - DNA, 1749 bp, Glycine max
atatatcgagtagctacgtaggccccccccccaaaaaaccgaaggagcacatagagtgattaggctggtagcaagcgcgacatggcactgcagtgcaggttaagctcacaccattgatatcactagccatattctcctttcgctaattcccgcaagctactactcttcttcaacgctctctctgcaaaagatgcgctccaaggacagaatcgcttacttctacgacggtgatgtcggtagtgtttactttggggcgaagcatccgatgaagccccaccggctttgcatgactcatcatcttgttctctcatacgatcttcataagaagatggagatttatcgtccacacaaggcttatcctgttgagcttgcccagtttcattcagctgattatgttgagtttttgaacaggattacacctgacactcagcacttgttcttgaatgaactgacaaaatataatcttggagaagactgccctgtatttgacaacttatttgaattttgtcagatttatgctggtggaactatagatgctgcacgtcgattaaacaatcaactgtgtgatattgctatcaactgggccggtggactacatcatgccaagaaatgcgaggcatctggattttgttacatcaatgacttggttttaggaatcttggagcttcttaaatatcatgctcgtgttttgtatattgatatagatgtgcaccatggtgatggtgtagaagaagccttctacttcactgacagggtgatgactgtcagttttcacaagtatggagattcgttcttcccgggtactggcgatgctaaggaaataggagaaagagaaggaaagttttatgccataaatgtcccattgaaggatggaatagatgacagtagcttcactcgacttttcaagactattatttccaaagtagttgaaacatatcaacctggtgcaatagttctgcagtgtggagcagattcgcttgctggagatcgcttgggttgcttcaatctctctattgatggtcatgctgaatgtgttagcttcgtaaagagattcaatttgccattgctggtcactggaggtgggggatacacaaaagaaaatgttgctcgatgttggactgttgaaacaggagttcttctagatacagagcttccaaatgagattccgcaaaatgattatattaaatactttgcaccagaattttctttgaaggttccaaatgggccgatagaaaatttgaatagtaaatcatatcttagcaccattaaaatgcaagtcttggaaaatcttcgttgcatccagcatgctccaagcgtacagatgcaggaggtccctcctgacttctacattccagaattcgatgaagatgagcagaaccctgatgaacgcattgatcagcacactcaagacaagcacatccagcgcgatgatgaatattatgatggtgacaatgacaatgatcaaatgaatatttcatgaagtgcagttgccgtttgccttttggcgggggattgaccgttttaagagagaaggaaaatgttaattagacaaacacctagatgtatcaacaaagcggtagtactagcccaagaaacttgtatatttataagatttttattgttttcagttgctaatatatttgctcaaagttacattattagaaaaaaaaaaaaaaaaacatttttttgaatgaaaatggacggtgttagagcaactctgacaacaagagcttgcataacattcttttt

SEQ ID NO: 3801 - DNA, 1996 bp, Glycine max
  misc_feature (1848)..(1848): n is a, c, g, or t
  misc_feature (1876)..(1876): n is a, c, g, or t
  misc_feature (1908)..(1908): n is a, c, g, or t
  misc_feature (1921)..(1921): n is a, c, g, or t
  misc_feature (1939)..(1939): n is a, c, g, or t
  misc_feature (1943)..(1943): n is a, c, g, or t
  misc_feature (1952)..(1952): n is a, c, g, or t
  misc_feature (1964)..(1964): n is a, c, g, or t
  misc_feature (1970)..(1970): n is a, c, g, or t
  misc_feature (1972)..(1972): n is a, c, g, or t
  misc_feature (1979)..(1979): n is a, c, g, or t
  misc_feature (1986)..(1986): n is a, c, g, or t
  misc_feature (1990)..(1990): n is a, c, g, or t
tcagctacgtaggccccccccccccatcacttttcttcccaaaaaattgaatggccatggaaaataaaaaaattatagagtattgggttgtgtctatactttgcatgcttttgtcgggtcattggatctctgttcaagctgcccctgcaccctctctcatcacacaactccctggctttaacgccaatttcccatccaagcactattccggatatataagtattgatggaaatactgaaagtgggaagaacctgttctactacttcgttagttcagaaagaagtccagagaaggacccagttgtgctatggctgaatggtggacctgggtgctccagctttgatggctttgtttatgagcatggaccattcaactttgaggctgcaaattcgaaagggaatctacccactttgcatatcaatccttacagctggtctaaggtttccagcgttatatatttggattcccctgctggtgttgggttctcttactccaagaacacgagcaaatatgctactggggaccttgaaactgcgtctgatacccatcttttcctcttaaagtggtttcagcaatttccggaattccaggctaatccattttatattgctggggagtcttatgccggagtttatgtgcctactctagcttttgaagttgctaaaggaatccggagtggtacaaagcccgtgatcaattttaagggttacatggttggaaatggtgtcacggacgaaatatttgacggcaatgctcttatcccatttgtgcacgggatgggcctcatatccgacactatctatgagaatttacaatcttcctgcaaaggaaactactacgatgcttactctttggacgaaaatgatgtgtgttacaagaacattgaaaaatttgacagggccattgatgggcttaacgtgtacaacatactagagccatgctaccatttccctggtgatgccacagccaaagaaaatggaagcttaccaaagagtttcaagcaattgggggttactgagaggcctcttccagtgaggaatagaatgtttggtagagcttggccttttagagcaccagtcaaacctggccttgttacattatggccccaattgacagaaaccagtcatgtcgcctgtgttagcgatgaagtagcaagttcatggctaaacaacgttgcagtcaggaaagcaattcatgctgaatcggaaaaagtggcgggtccgtgggaattatgtacgggaaggatagagtaccatcacaatgctggaagcatgattccttaccacaagaacctaaccaggctgggctataaggcacttattttcagtggcgaccatgatatgtgcgtgccatttaccggaagtgaggcttggacacgatctttgagatataagattgtggatgaatggaggccatggaactcaaataaccaagttgctgggtacttgcaagcgtacgagaacaacctcaccttcctcacaatcaagggagctgggcacaccgtgccggaatataagccgcgggaagcgttggatttttacagccgttggttggaaggaaagcaaatataattaattaaggcaatgcatcatgtggcgtaaaataaaacttacatggattaatgaatacaagttacagcagtgcattgtagctttttcgttactgatttatcctttacatcaaatattcatatgaatgggatttcacaaaaagtaaaagaagaaaaaaaatcatatgtaagggattattatttaactgtaatctgattgatatatcaatcctttcgaagagaggatgttggaagcttgtaatctgataaaaaaaaaaaaaaaaaattttgtttttgtnagtgcgggccagtcagccagggcattcnagcaccttataagccatcatccatgaaccacnttattagctacanaccaaagaaaaagggcgncccnccgaactantgcgccagtagnccgggnanttattcnggccggnaccntgcagg

SEQ ID NO: 3802 - DNA, 1423 bp, Glycine max
ggaattccaggctaatccattttatattgctggagagtcttagccccgtgggcccccccccactcttgcttttgaagttgctaaaggaatccggagtggtacaaagcccgtgatcaattttaagggttacatggttggaaatggtgtcacggacgaaatatttgacggcaatgctcttatcccatttgtgcacgggatgggcctcatatccgacagtatctatgagaatttacaatcttcttgcaaaggaaactactacgatgcttactctttggacgaaaatgatgtgtgttacaagaccattgaaaaagttgatagggccattgatgggcttaacgtgtacaacatactagagccatgctaccatttccccgatgctgccacagccaaagaaaatggaaccttaccaaggagtttcaagcaattaggagttactgagaggcctctcccagtgagaaagagaatgtttggtagagcttggccttttagagcaccagtcaaacctggtcttgttccattatggccccaattggctcaaactaggcacgtcgcatgtgttagtgatgaagtagcaagttcatggctaaacaacgttgcagtcaggaaagccatccatgctgaatcggaaaaagtggcgggtccgtgggaattatgttcgagtaggatagagtaccatcacaatgctggaagcatgattccttaccacaagaacctaaccaggcttggctatagggcacttattttcagtggcgaccatgatatgtgtgtaccgtttactggaagtgaggcttggacacgatctttgggttacaagattgtggatgaatggaggccatggaactcaaataaccaagttgctgggtacttgcaagcgtacgagaacaacctcaccttcctcacaatcaagggagctgggcacaccgtgccggaatataagccgcgggaggcgttggatttttacagccgttggttggaagggaagctaatataaggaaatgcatcatgtggcgtaaaataaaacatacatgatcgattattaatgaatagaagttacagcagtgtattttagctttttcgttagtgatttatcctttacattaaatcatatatgcatgggatttcgcaaaaaggaaacaaaaagaaatcatatgtaagggattattattatttaactgtaatttgattgatatatcaatcctttcgaagagaggatgttggaagcttgtaatatgataagcataagcctttcgtttttgtaagtgcgggccagtcagccaggcattctagcaccttataaccaatcatccatgaacacatttattagctagcttctcgatttaggttccatttaattagaagacgagtgcttgactacaaaaaaaaaaaaaaaaaagggcgaaggccggccaccggctagtagctc

SEQ ID NO: 3803 - DNA, 877 bp, Glycine max
ccgcccccccaggcggcgggcgggaggcgcttgaatctcataacttctttgttctagtcttgtcttcatatggttgttgtgtcaccgaaaatggctaatgctacacctaatggttcggtgccacataaccatgtaggagcagtacttataacaattcccacaatcaaaattgatgggaagcaaaccctagccaccgaagatcacaccagcattgactatttacagagggcacagtggcttcgtgcagcgattttaggagccaatgatgggttggtttcggttgcatcgttgatgatgggtgtaggagctgttaaaagagatgcaaaagctatgctacttgctggttttgcagggttagttgctggggcttgtggcatggcaataggagagtttgttgctgtgtacactcagtatgaggtagaggtaggtcaaatgaagagagatatgaatatgagtgtgggaggggagagagacttggagatggagatggagagaagaacattgcctaatccattgcaagctactttggcatcagcactctgcttttctataggtgcattggtgcctctactttctgctgctttcattgaaaactacaggactaggattattgtggttgtggcaatgtcttgtttggctttggtggtgtttggatgggtgggcgctaagatgggaaaaactcccaagttaaaatcttgtgtaaggttccttcttggaggatgcatagccatgtccatcacttttggctcaactaaattacttggtgctagcgcattataataatgataagtaaggctgtgtatttattttacttatgagagtgattaattactactctagtgtcttttatgaataagattactttgtcaaaaaaaaa

SEQ ID NO: 3804 - DNA, 1414 bp, Glycine max
ggttgtgatggtggtgtatatcactcgatccagcacattaacaatggaaacgcagctttacgtgttctctctctagactctgctctcaaacgccgtcgttttggaactctttttcttttccctttgattcttctctgtctttgtaaccgaaagaggggaaaatataattaataccgatttcgcaaccaattcttctcttgcgttgaattgggacaacgagaaattttggatctcagtttttggcaggaaaaaaaattgcatttgagtaaaaataacagagtgtagtgtagggtcttgttcttgatactgtgctaaatttgttggatggcggagaaatcatgcatcaagcgccttcagaaggaatatagagccctttgtaaagagccagtttctcatgttgtggctcgtccttcaccgagtgatattcttgagtggcattatgtgttggagggaagtgaaggaacaccttttgcaggtggatattactatggaaaaatcaagtttcctcctgaatatccatataaacctcctggaatcagcatgactacacctaatggacggttcatgacacagaaaaagatctgtttgtctatgagtgactttcatccagaaagttggaatcccatgtggtctgtatcaagcatattaacagggcttctttcattcatgatggacaacagtccaaccactggcagtgtaaacaccaccactgctgagaagcagcgtctagcaaaatcttccctttctttcaactgtaagaatgctacattcaggaagatcttccctgagtatgtggagaagtacaaccagcaacagctttctgagcaggctgctccagagagggtctcattggatacgtctcccgacaagagttcaaggccagttttggaaaagaaattagaatccaatggagaagacatgaaaagagtagatgggttgaaggaagtgaggaagaacagaaaaccattcccaacgtggatgatgttattactcttctccatctttggggttgtaatggcattaccactgcttcagctgtgatgataggcaaagaaatctttataggagggtataagggtcccaaaagttttctcctggaactggtactatatgttctgcttaggttctcatgtctaacagaatttgtatagggaaatgaaattggacatggaggctgcgtttactatgggctgaattttctcctttgtgtctatgttgccagcttcttcgtggtgaatgttaagaagttacatgctttgatactcttgactttcttataaatgttttttgaggtttgtcttgtggtgtaggtcaccctgcacgtgctgcttgagtacattatgctttttagaatgggtaaattatatcagatcaaaccataaacgtaattcgcagtaaaaaaaaaaaaaaaaaa

SEQ ID NO: 3805 - DNA, 657 bp, Glycine max
  misc_feature (653)..(653): n is a, c, g, or t
aaaaaaaaaaaaactcgccccggaataattaccgcttcgagatctcgcagcgtcccaagttccaggtttcagcgagcattctacaatggctactataccagttaatcccaagcctttcttgaacaatttgactgggaagcctgtaattgtgaaactgaagtggggaatggagtacaagggctatctcgtttccgttgattcctatatgaacttgcagctggccaacaccgaggagtacattgagggacaatttactggaaatttgggagagattttaatcagatgtaacaatgttctctaccttcgaggagtaccggaggatgaggaaatcgaagatgctgctgaagactagagagtgatagaagctgctaatggctatgacataaacagaactcgaatttctactgtttttgtatcttcacataaatgtaggttttttgtagtcaatgtgtagagatttgaatcaatgatgcactcgcttgtgaatagggtgcctatgttcaagttgtctgttattttatttttatgcttctgaacaggttatttttcagtttatgcaatcaacagtaatcaatatcatttaaacacaaaaaaaaaaaaaaaaataagccccttgcgccgcgggcggtcccattttcagaagaaaaaaaaanaaaa

SEQ ID NO: 3806 - DNA, 842 bp, Glycine max
  misc_feature (726)..(726): n is a, c, g, or t
  misc_feature (732)..(732): n is a, c, g, or t
  misc_feature (734)..(734): n is a, c, g, or t
  misc_feature (744)..(744): n is a, c, g, or t
  misc_feature (764)..(764): n is a, c, g, or t
  misc_feature (770)..(771): n is a, c, g, or t
  misc_feature (779)..(779): n is a, c, g, or t
  misc_feature (781)..(781): n is a, c, g, or t
  misc_feature (785)..(785): n is a, c, g, or t
  misc_feature (788)..(788): n is a, c, g, or t
  misc_feature (799)..(799): n is a, c, g, or t
  misc_feature (803)..(803): n is a, c, g, or t
  misc_feature (809)..(809): n is a, c, g, or t
  misc_feature (812)..(812): n is a, c, g, or t
  misc_feature (818)..(818): n is a, c, g, or t
  misc_feature (820)..(820): n is a, c, g, or t
  misc_feature (828)..(828): n is a, c, g, or t
  misc_feature (831)..(832): n is a, c, g, or t
  misc_feature (835)..(836): n is a, c, g, or t
  misc_feature (839)..(840): n is a, c, g, or t
gaagctcggaattcggctttagccaaacaaaaccggaatcatatcccaaactccttcctccctctgggtcttgaggtacaaaaccctaatcaccgcttcgagctctgtcattgtctcaagttccaggtttcagcgatttcgatctcgcatagcattctacaatggccactattccagttaaccccaagcctttcttgaacaatttgactgggaagcccgtaattgtgaaactcaagtggggaatggagtacaagggctatctcgtttccgttgattcctacatgaacttgcagctggccaacactgaagagtacattgagggacagtttactggaaatttgggagagattttaatcagatgtaacaatgttctctaccttcgaggagtaccggaggatgaggaaatcgaagatgttgcagaagactagatagtgataaaagctgctaatggctatgacataaaatgaactcgaattttctactgtttttgtatcttaacttaaatgtaggtttttttgtagttgtgtagagatttgaaatgatgcactcgcttgtgtatagggtgcctatgttcaagttgtctgttattttattttcatgcttctgaatatgttatttctctgtttatgtaataatcaatatcatttgaacacatcgataagtcgtccttaatcatactcctatcatttgagtgttttcagaagaccgcggagactccactttgtnccttangnaggtaattcnacctggctaacatggcatantggtcnngggaatgnantcgntcnattcccaactncacngaactnaanaaactngngctagggngcnnctnntannct

SEQ ID NO: 3807 - DNA, 1590 bp, Glycine max
ggaattcggcacgagggtctcgagttttttttttttttttttaataacaacatactagcatatcattaaggacttaatgaagaaattaagtaaactagttccacaagaatttctgtcttcatacaagacaaaagaaccaccaaatgtatgtaattcagtaaatattgtgctaccttgtactacttgatctaattggtattgttgcctttacacccatgagttacaagttctcaagtatgcataacaaacgatttcatagggaacaactactaccaatgctggaaactgaaaattcaagaatctgcaatggggaaaacagatccaattcgatcacccaatcgatagcacttgatattaaccccatatggaccaagctgaatgtggttatcctccctaccaacatagaaacacagggtatacaaagcaatttcaaattcagggctcactccaaccaaagtgctggatacagattttaggacaccattccattcaaactgaatagtcagaagctgagcttcagagtcaggagtttctccccgtcgacggggaaaaatatatccttgataatcaactctcccctttgcttcttcaaggtaaaactgcagccagttatgaaagccagaaacttcaccacattgtttggtttctccaacaaaaacatgttcaaaagcagaagaggaaccagaagtgccaccacggccataaaggtcaaaccacagactggtaatcattcttttgaaatcttggtaattccctgatacaatttgcttggatgcaagatacttgtgaagatacttaattggtgctgttctactgatttcttctatgaaagaagcttgctcttgtctctcttcagatgtgactacttccttacatccttgatgtggattgtaattatctaaaagtgaaagaaaacgggcaaatgtaggctttctgaatacatcatcgctaacccaagtaaacaagctcccctgtgccatatcttccttttggtatacctttttcccttctccacagtcaatttcatagtgtaagccaggtaccaaacgatttaaatcaagagcccagagtttttcacaagctcttgacagatcagcaagttcatcttctgagggctccacatcagcaccaacttcaacctcattagagtattcttgctcatcagcaggtcgtttatagctgttccagttgtccttttgaaccttatgtggatgccttgaaggctttctaccaacagtctgccatccatcttcaccttcatccaccttctggggtttgtaggaactttgagattggggctcctcgtactgaggacgatattgttccttgtgttggtgatgaggaagagggtgatcttgttgatcctgggagacgacttcagcccaggagcttctactacggtcgtctctcccgtgttgttgttcttcccgatcgccaccatcagctccgagagcaacgttgatgaagccgttgatgagaccctccatgtcgatgttgtcgcctcgtgattcggtgtaagtataaatgcatccgggggggggggctaacgctgcacattataaagattacattgccttgccgacatctctt

SEQ ID NO: 3808 - DNA, 1612 bp, Glycine max
ttcagctacgtaggccccccccccccccccatggaggcactgcataagcaggtaatgcctttcctccttcgtaggacaaaggatgaagtcttgtctgatctgccagagaaaataattcaagacagatactgtgatttgagccctgtacaattgaaactttatgaacagtattctggttctcgtgtaaaacaagaaatatcatctgttgtaacatcgaatgagtctgctgcagcagaaggaagtagcagttctactaaagcatcttcacatgttttccaggcactccaatacttgctaaaactctgtagtcatccattgcttgtcattggtgagaagattccggagtcactttctactatcctctcagaactgtttcctgctggctctgatgttatttcagaacttcacaaactctatcactccccaaaattagttgctcttcatgagattcttgaagaatgtggaattggagttgacaattcaggttctgagggtgcggttaacgttgggcagcatagggtcttgatattcgctcaacataaggctttcctggatataattgaaagagatttgtttcacacacacatgaaaagtgtcacgtatttgcggttggatggatcagttgagccagaaaagcgttttgaaattgtcaaagctttcaattcagaccctaccattgatgtcttgctgcttacaacacatgtcggtgggcttggtttgaacctgacatctgcagatacccttgtttttgtggagcatgactggaatccgatgcgagaccttcaggctatggatagagcacacaggttaggtcagaaaaaagtagttaatgtccatcggctaataatgcgtggtactttggaagagaaagttatgagtctacaaaggttcaaagtctcagtggctaatgctgtcattaattctgaaaatgctagtatgaaaacaatgaatacagatcagttgcttgatttgtttgcatcagcagaaacctccaagaagggcgcatctgttttgaagagttcagagaacaactcttatggagacgctaagttagtaggctgtaggaagggattgaaatcaatactcgggggattggaggagctatgggaccaatcacaatatacagaggagtacaatctgcgtcaatttttagcaaggcttaatgactaatattccagattcatttcagagtcagagtgtacatatccatgagtacaaattttgccattgtaacatctcattttttttcccaccatgcccttcagtcatttttggtcgtcactttttttgtataccccaatgctggctggaatctgctcgtgtgcatgcagaccaggtaaatcagtgtctgtattttacagggcatttgagtgactggtggaagcccttggtggtgatatgtagagaaatgaatcggtgacggcttcaggagggatggagtaatattttttggattttgtacatatacagtcaatcctaattatagttataattgttgctaacatataaaaaatgccctgcattttgcaatgttatttggaaagctactaataccaaaatacccaagacctcaatcctgatcgtcgtgggttgagttaagttttagacttga

SEQ ID NO: 3809 - DNA, 1821 bp, Glycine max
  misc_feature (1112)..(1112): n is a, c, g, or t
  misc_feature (1310)..(1332): n is a, c, g, or t
  misc_feature (1344)..(1349): n is a, c, g, or t
ggagagattttcatacgagttgcagatatataggaaataagttcgtcagatgttatataatgtcccttgtctacctgtgtgcaacattgaaagacacaaatgactgaaaatgaaacctcagcctgccttgttcatcttgtgtttttgcaccatgccttgcatctacacctctacccttccgaagagttatgacaattattggactccccattgatgagaatgtaggaggaataacctgaatgtcttcaatatcttcccaaagaaaaaagaattttgtcttatttccaaacaaatttgcatgaaatccaattattcttgctgatagaaataggcggccctgcaggggcatttttcttttcaaatgacaggtgaaatcgttgatgagaaattcctcaggtggaagcccaaacagtttctgaaatgctgaatttgcttgaggagaccgcaaattaatcttcttcctgacttctttctccattctacttaaatagtcctttgcaacattaccacctctagtgttgtccaagaaaattcttaggtgcagcttagactgacatgccaatgccaactttccttcaaggggaacccatatatcagcaagatctgctatatttgcttttagaaaattaatttcagcatgtcctagagatgcagcttttcatcaaaaggtccatcaaaatcataaactaccacatccagcacagaaggaggatcatccattgcatcaaactcaaatatttcattccatgtaagattagatttctggaacttgattgaactagttcttgtttttccattgcacgtaaacaccacatagggatcagacaacccactagaatcaacagaagctaaactgcttccttcaattaaggcaacagttagcaaccacccatctccttgtgctttgattccatgatcactacccttttgtgctctggcctttatgaagcgtgagattatacccagccccagcatgcgttcaccttgacgaaccaaaattgcacagacaacaaattcaccaattgaatctggcaagtcaagcccaccaaactcaagcccttgaattgtgcttggtgcagccagccaaatgtgaacaatcacatacaaccccnatgaaaactgttgcgaatactgtgaagttaccaaaataccgcactgctagcctccaatctgattcaggttctgcatgtaatgacgccaaagcttgttccttattggaactaaggtccttcacatcagcaggtttaacagtctgagataacaaagtggcatactgatcaaagctatccttcatgccttgccgagccccnnnnnnnnnnnnnnnnnnnnnnntggtgctttgtnnnnnnttcattcgccacgatacaaccagacgcgaacactgttctcctgtcggcaactctggtccaggtgtgatcacatacagtacttctaccctaaaggtgctcccgtacataacatccggagtgctgacactgactagaacagcaaagttcttcccatcagcttttaaatatgtgtgctcctcataggctttgacagccttaattaatttactaggagccttgacgtaagtaactaatcttttgaagatctccccatcattctcaaacttccaaggtcctatttcgagttctgtattgccctgtacttctgccaatgacttgagaaaatttgaatctgatgaaaatagtagctcgttcaagtcttctggtgcaatgacatattgttgatcaataaacacccctgctggtaaattgctaggaatttcactgccttggtctgcaggtcgacatagaggtaccccggtaccgaggccga

SEQ ID NO: 3810 - DNA, 1415 bp, Glycine max
aatcggcaattagaaaaggccattttattatgaatgtattccaaatttgaacaaatcaatctacaaggagttaaagagcctgagcttcaatgtcataacggtcccaggcctaaaaaatcgtttacagcatttctcatatgaccaaaagtgtcaaactgtcacaacttttaacaatcaattactgagatgttgctgaccctttgtaataagatgtgtctactacacaacaaatccaaaatttcaattgctagcaactgcagttggaaatctgagtgagtaactagtgccagaatcaaactaatcatgtacaatggaacaactagataacctctcctattagtatttagtaatctggtttaaagagtagacttggtagcaagttaaccgatgaacacattatagctctgatagaagttcccttccactaggattgtcatgaaaaccaaccccaaatagcacaatgcatgatccttataatatgatatacatcatatattctagtccatttttgctaagagaatttcagctagctccaatatgttcaagtcaaatcctggaagattcctttgctagtttggtaaaagctctttctcagctagactaaaggtcaccttaaaacgttcaagcaaattttctaggatgttctttgtaagtcttttctgattctttgagcttttcagccattccattccaaataaaacttgcactctacatccctttgcttttgggggtaaatcctcaatttggtacctaaggtgtatattgaaataatcaccaagaggaactccatgaaggttcataagctcttccacaagccaaccctttccatccggaaggggagatctttgttgagtacttgtcacttcacctttataacttgaaatacgcttctcaaatttgtaatatactgctctctcagagatatctaggttctcagatacccaaggagtataagaataattaagataaccaagcttttccatgacccgacggtccaactcacccccgctaaatatctccatgaggtaacttgcctaaattaatcaaaataaaagaatgggaacatttgcaaacttgtaagaaaaagttgaataaggaaccaataatttccaaatatggcaataatgcacaacatgcatagattaggacatgtgtgcaagttgcgtggtaagagagagagattacaggaattaaaagagaacaagaataaatctcagacatgctaacatcatccaggccaaggaatgagccactctcatcacttataagacttttgctatcagattgttcttgggggggcggccccccctgctcagctctcaaggacctgaccttccagagagccatgatagtcctgtgtgcaacattgaaagacacaaatgactgaaaatgaaacctcagcctgccttgttcat

SEQ ID NO: 3811 - DNA, 1236 bp, Glycine max
catggaacgtggagaagaaagaaaacgacaaagtggaaaaagaagtaaacgtcaactttaaagtaactatagtggctgagtgatagcatcaaaatctaggtatttacaccgcacaatattatgagattgcagtagcagtgtttgctttgctcaagtctcagcgatatgatggcagacccagcaagtttcatagcaagctggttaactccttcttacctcttcatcttggtcaacctcgtcataggcaccatagccatcacttctcgcttcagttccacgcccaaaaaccaacaagcccaccacccccaaccactcagctccttcaatacccatcatcaccaacccaactgcactcagccccaactccttccaataccctcactgttgcagcgagtcacgtccttcaacctctccctccacaaacaccaacccacacctccagaaacacaacatctgcatcccgaaccccaaccccaacctgaaaagccgccggaactgcttcggactccctcactcttggagcgactcaggtccttccataatctttctctccacaaacatgtccaacccgagccagagccagagccagaacctgaacctgaaaagccggaactggttcggagtccctcgctcttgcagcggattcagtccataaacttctcccatctctacagatccgacttcagtcaccgagatgatgaggatcccgattcgggttcggatccgggtcgcggttcgggaaaggcggcggagatgaggaaatcggcgagcgtgagagggggtttgacggatagcgagtgggaggaggtcgagaagcggaggccgcagacggcgaggccggttgaaacgacgacgtcgtggagagaagacgaagaagtagacgccaaagctgacgatttcatcaacaggttcaagaaacagttgaggttgcagaggattgattcccttctccgttacagaggaggtaactcatcatgagtaaagaaaaacccgccctaatcttccttgcgcctgcgtcgttgcctcaagttgttctgacgttaaagtttgttggttttcaaatgtttgtatagtactgcgtgctactaggttggtgtggcaaagttcttgtcttagtaatcatgtcatgtttgtctaatattaataatagacttgtgtaggcatacacaaattgataataaatttgatattattatatgaattattaataaatttaatatttattaaaaaaaaaaa

SEQ ID NO: 3812 - DNA, 749 bp, Glycine max
cggctcgacccacgacgataacgcataacagggaaaaaataatggcaaggaaggtgggtttgaattttatagggtgctccatcgttgcaatggttttcataattggtgtggctgaagcaacagattatatcgttggtgaaggcttcggatggagcgttccctccaatgagagcttttatacagactgggctagcaccaagagattcttcgttggtgacaatctcattttcaacatcagcggagagcattcggtgggaattagaacagaggctacttattatgagaattgcaacaccagcttattaactggtttcacgttcataggcgtcaatgggagtaattcgatgtttcgacataatattattcctccaactgggcctcgctatttcctctgcaccgttggaaatcactgtgaaagaggccagaagtttagtatcagcgttgagtctcatcctgattccgctgctcctactacactgtcattcagaatcttatctgcatttctctctagcttggctgtgtatttcttcactgttactagttagttactttgtcgtgtaactctacgaggattttgcattcttgttcctagcaattctttgaacatattcactatagatattataggattgctgggttgtttgtttcaataaatgttgtactgctacttacaacatactattgtaactttaaatttaataaagacgttacttcaattaatattgaattgatagagttttagttttaaa

SEQ ID NO: 3813 - DNA, 733 bp, Glycine max
taaatattttgcactgaataacattttttcttaattttttttatcatttcttttatttctaatattaatattatttaaaaaattataaaacctgtctggacataaaaaagaaaataactgggctacacgtttatgacggcgatactaaagcgtgcgttttgtttgagcgcctattgcattttgtgtcgatggctggtgctgtcagtacggtttccggcgaactgaagccgtcgatcttggatcgtgtgcgagcagcaccgccgcctcctgattcctcccttcttttggctaccagacctcccagacaagcggtgtcctacttgacatgctcaaagctttgtgcaatttgttttgttgctggcgcgattttcggttactcgctcaggggacgagttaagcgttgggcttccaagattctcaagaagctcagctgaaactaacataattcaatgattctcattacaggtattcatttggttggaattcaccttcgtagatcaaatgtaaaagtacaatactactatcaattttgtgaaattcttagaggctccgttattgtgcttcatacggattttggaatgagtttgatggtcacagattcaattacttatgtacacaacaaaaaaaaaatttctgctcggtgttatggtttttaacttcatttaactcagtttgctattacttcatatgtgaattatgatcatcttcttgttctcaggcattcctggtcaag

SEQ ID NO: 3814 - DNA, 1069 bp, Glycine max
atcggttgaacataactgctccgtatcttgttgggtgtcattcgttttcttattttcttcttagcatacatgaatcagaatgcacagaatttttatctggggatggatgtgaagagaatcatggatggtgatagagttgggaacactaattgggtaattaaggaagatggtgtagaagatagcaacgattcatcatccattggattcaactcagaagattctatttgctcttcttcttcatcagagttggccgaggacgcttcatcttcaacatcttctaattcaccaacacattcaaatggacctttgtttgaattatcagacctcatgagccacctccctattaagagagggttatctatgttctatcaagggaaggcccagtctttcacttctttagcaagggtggagagcatagaagatcttcccaagaaaggcacaccttatagtaagagaatgaaatcatgcaaaagttttgggggaggcttgaatagtcagagactattgtgcagtccaaagtctacaatatcaaagaaaacttcaagagggtcttttgcatctgtactaagcaaaagaggaagtttcctaggagggtctagatattccattgcagttcaacaaaagaacttttgaaattcaaaatgttaaagagttattgcttatttcatgtacaaaatccggaaaattttgagtcctgcagcttcagcttattgagtcaaagccatatatgatcagttagctacatatttgagattcattattggtttgttttccatggtggtatgatccttgccttttacagtcattactactctgactcaatgatcccaagttattgccttgattcatgtgacaccaaatcctttttgagatcaaattttaggttttctcttttccgtaagatgtatactttatcagttacttgcacatacttttttcataaatttaggggaaaactccaatatattatcacttagaattacgtgtactttggttctcagattctaaaaacatatgatacgatttttaaaccattccatgtttatgttgtagtccttttatccaattt

SEQ ID NO: 3815 - DNA, 1203 bp, Glycine max
attcaacctgtaagatccgcgagctaaaactcccacactccacagcttttcttgttttcctttcctcagatcagatcttcacgccgttatgcttagaacattagctagggtgttcaagcgagccacccttgccaatgacttgcttcaaaaacgcagcagattctatgcaaccacggttggtggaagaagtgacaggttagaaggaaaagtggcactcataactggatcagcaagtggactcggcaaggccacggcccatgagtttgtccagcatggagcccaagtaatcattgctgacaatgacaccaaactaggcccacaagttgcaaaagagttgggcccatcagcccactacacagagtgcgacgtcactgtggaggcccaagtggcggatgccgtgaacgttgccgtggcccactatggcaagctggacatcatgtacaacaatgcgggcatcccaggcccatcaattccaccaagcatagtagacctagaccttgatgagtttgatagagtcatgaggatcaacataaggggaatgattgctggtataaagcatgcggcccgggtcatgattccagtgggatcagggtccattctatgcacatctagcataagtggggttttgggtgggcttgggcctcatccttacacaatatcaaagtttacaataccaggggtagtgaaatctttggctagtgagctatgcaaagttgggattaggatcaattgcatatcaccagctccaattcctacacctatggttttggcacaaattggaaagttttatcctggtttaacccaagaacagatagtgggcattgtgaatgggtttggtgagctcaaaggtgctaagtgtgaggacattgatgtggcaaaggctgcattgtacttagcatcagatgaagcaaagtttatttcaggccaaaatctcattgtggatggagggttcaccagctttaaaaatcttacattcccttctccagatcaaactgcttaacctcaactgtttattgagtataatttctatgcattattgtcggtgtaaatcaaccaacgaggaatcatgttaggtatatgacaattataattggatgagtttaaaatttctttatattgtcagtatatagactattttctcttgttgatttatgtaatgtattatggttggtttaagagtatgtccccctattttttttcttt

SEQ ID NO: 3816 - DNA, 754 bp, Glycine max
gcacgaggaagttacgagaaaaatcgagttgtgcagagcaaggcaattaaaaaggaaaaaaaatataaatacaaaaaaaagaagccaagcttcccggatgttcctcaactgaaaccctctttgcgggcaaatcacaaccctattcgaattctccattcactcgtttaagctttttaacgttatggctacaccattggtggcagggattgcagtggcggctgcggcttatgctggtagatatggtatccaggcttggcaagcattcaaggctaggccaccgagtatgcgaaaattttatgaaggtggtttcccggctaccatgactaggagggaagcagctcttatactgggtgttagggaacgcactccaacagataagattaaagaagcacataggagggtgatggttgcaaaccatccagatgcaggtggcagccattaccttgcatccaaaattaatgaggcaaaagatatgttaattggaaagaccaaaggtggtgggtcagcattttgaagcctgctcaagcctttctttccatcattttgacagtgcagaccggggtcctcattagatgtcaattattaattttttggtcatcgcctaattaattcttgtagtcccattgtgagaaagttgaacatgggtatgcttgtatcaggatgataaagctccattgtaacttggcatgtgctatagaagttaagattgctatcaataaaattgatttttactcgcgcaaaaaaaaaaaaaaaa

SEQ ID NO: 3817 - DNA, 981 bp, Glycine max
ggactaaacccaggctgtaaaccctttttccatctagagttgttgcggctctcttctctgcacactcagaatgcagtccacactcttcaaccccacccattcccttatccccacttcaccacactctatcagatccaattctggtcatgcttctctctccgttcgcgcctccatcgccgtggaaacccccacggagacggtgaagctgaacaagtacagctcccgcatcaccgagcccaaatcgcagggcgcctcccaggccgtgctctacggcgtcggtctctccgaggacgacatggccaagccccaggtcggcgtctcctcggtctggtacgagggcaacacctgcaacatgcacctcctccacctctccgaggccgtgcgtgacggcgttgctgctgctggcatggttcccttccgcttcaacaccgttggcgtcagcgacgccatctccatgggcacccgtggcatgtgctacagcctccagtccagggacctcattgccgacagcatcgagaccgtcatggcagcgcagtggtacgatggcaatatttccatccccggctgtgacaaaaatatgccaggtactatcattgccatggggaggctcaacagacctagcattatggtttatggcgggactataaaacctggtcattttgagggtaacacgtttgacatagtgtctgcctttcagtgctatggagaatatgtgagtggatcaattaatgatgaccaaagacaaaatgttattcgcaactcatgccctggggctggagcctgtggtggaatgtatacagccaataccatggcttctgcaatagaagctatgggaatgtctcttccctatagctcatctacacctgctgaggatccactaaagtttggatgagtgtcccttagctgggaaatttcctcttgagttactgaaaatgggactgaagccccgagatatcatcactcgtaaatcactacgtaatg

SEQ ID NO: 3818 - DNA, 2060 bp, Glycine max
  misc_feature (11)..(11): n is a, c, g, or t
  misc_feature (20)..(20): n is a, c, g, or t
aagaggcttanacataatanatacaaattacaagaagcccacagaggcgcatagcacagttattactctttcagctacgtaggccccccccccgagccatgggttcaataggtacggtgtgttcaagcttcattacagcacctccgtcgtcatcttccctctccagaacaactccttcgttctgctgcgcatttccttctcgtagaatcatcatcaagccaagaatgggtccatatccggcccaggcccagcccaaggaggccaagctctggggtggcaggttcgaggagggcgtaaccgacgttgtagagaggttcaccgagtcgatctccttcgacaagcagctctacaaacaagacatcatgggaagcagagcacacgctacaatgctcgctcaccagggtttgataaccgtgagtgacagagactccattctccaaggtttggacgaaatagagaggcgcattgagaatggagagttcaattggagagctgacagggaggatgttcacatgaacattgaggccgcgctcaccgacttgatcggtgagcctgccaagaagctccacactgcacggagccggaacgatcaggtcttgacggattttcgcctctggtgtcgcgacgccattgacaagatcctcgtgagcatgaaacagcttcaggtctcactgatcaccctggctttgaacaatgagggtctcattgttcctggttatactcacttgcagcgcgctcagccggttttgctgcagcatcttctgttggcttatgttgaggagattgaacgtgatgctggtcgtttggtagattgtagggctaggatgaatttctgccccttaggagcttgtgccttggctggtacagggcttcctattgatcgattcatgacttctgaagctttaggatttacggctcccttgaggaatagtatagatgcagtttcagaccgagattttgtgctggagtttctttctgctaatgccatcacagccgtgcatctttctcggcttggtgaagagtgggtattgtgggcttcagaggaatttggattcatcacaccaagcgactctgtttcaaccggaagtagtataatgcctcagaaaaagaatccagatccgatggaacttgttcgagggaagtctgccagggtcataggggatcttgttactcttctcacattgtgcaaaggacttcctcatgcttacaaccgtgatttgcaggaagacaaagaaccagtgtttgacagcgttaaaacaattttggggatgcttgaagtatcagcagaatttgctctaaaaattactttcaatcgggaaagaatacaaaaggcattacctgctggtcatcttgatgcaaccacactagctgattatcttgttaacaagggtgtgccatttagaacgtctcacgatatcgctggaaaatctgttgctttatgtacgttgaagaactgccaactgctggacttaagccttgatgagctgagaagtataaatccagtctttgaggaggatgtgtatgaatttcttggagtagaaaatgcgattaagaaatttgtctcttatggctccaccgggtcagcatgtgttgccagccaacttgattattggttgaaaaaacttgaaatgaagtgaagattaccctactgtcatgaaattctcatcgtgctagggaagccaattcctaaaacatggaataatagctcactgccttgccaaagttgctggaacacgtaattctggaatcaaccaagatgatacctttgagtatttgaagcgtgcgagagcattagttgttatatgcaaattagtcagggttatgtactttcagaatcaaatgtgccatgccgtaagttatgagttttttgcattttacattacctcctgttcgactgtaattttagcatgtcgaatgaattttgtgtagcttttaatgaaataaactcatctttagcacccatacggctagagttgtgatgtgttgattggaaaaaaagaaaggttaaattttatatggttgagcggtatggtaaattaaagaaaaaaaaaaaaaaaaaa

SEQ ID NO: 3819 - DNA, 1522 bp, Glycine max
tggtggaacctgttcatgctgctgaggatgtgaaagaattagatgctgtgtgtaaagccggggaagttcagtatgtaacatgtcaatctggtcaggatagcggttttatgcaggataacaaccaagagtctggtgctacactaccagagtatggaggttgcagttccttggctgaggaacgtggtgaaaagcgtgttgccgaagatgatgatgatgtgagggaggacaacaagaagctgagagaatgggtgccttcccttgttcctaagactgggggtggggggtactttctgcatagtaacccaattgaagtgaaagagagctcaggagaagatgaaatttcacatattgacaaagtgactatagcttctgatcaggggagactgatgagtagtggttctcagttcacagaaggagatagaccctttcttcaatgttcagaggagaagccttctttgccgagttcgtttagaacttgtgatctgaatctcattgaagcgtctgaagtgcatgaaaatcatgttgatcatccagttctgctgtacccccctgcggtttctgaaacaaagaaagctgtgccaattgacatagatctgaccatgagtcatgctagtgtatcagggaaattcaatactcatgcaacaaatggcaaagagattgaagtaattgatttagaaaatgatgattccattcaagaagagaagtcaatcaacagtatggatagaaagacagagactatgtttcctggccttgaaggtttttccaaccatgctcaaaatgctgctgacatgcatgatgttcaggatggatatgggcttatgatatcagagttgcttgggccagatttccctaactgtacttcagtacctggtgacataaactctgtgcacaatgaaatgagccttcatggtggaacggggacacttgctgaggatgattccatatatatgtcacttggagaactaagctttttgcggccatgggagcaacctccatcgcaggattatcagaaacacttttgatctgtgatcactcagaactctcaggagacattatgtagtggtatgtttagtcactagctttatacaaaaatgaaatgctgctttttatttttatttttttttcattttcataaattgtctcctgttaggaattatgtattatgtaagctgaattttatgttgtctcatggtctcctctctccttttaatgcctctgcgtcactactagggtcattagaggagaattgtgtatcccattgtaacacatttgcttatgtatttggccattatttaccagaatggctttcaattgacattcttgcataaattagaattaacttctgaaaaaaaaaaaaaaaaaaaaagagaattaaaaatgataatggaacagaaaaaatacacaaaagaacaaaccaaaaagactttacagtaaaattaacaatggataaaatgggggggggcctttttaaaggacccaagtttacttccccttgcttgcaacgtaatagttttttttttgg

SEQ ID NO: 3820 - DNA, 1072 bp, Glycine max
ctcataaaaaaaaacgaacatattcatataaatacttctactgcagattcaacctttcgttctctgacagttctttctccaaacctacctttctatcttttctttttcatcggagcattatttgataccctcttgagtcctctctgcagcaacgcatttttcctcattctcttaaacaatttaacttctcctcgtttgatctgcataaaattgcattaatataaaaaatgaagaagtttgtactaaagttagatttgcatgatgacaaggataagcagaaggccttgaaaacagtttcaactctttcaggaattgatgccatagccatggatatgaaagagaagaaattaacagtgataggaacagttgatccggtaactgtggtgagcaaattgcgcaaatactggaaggcagacatagtagcagttggaccagtgaaggaacctgagaagaaggaggatcccaagaaagcagaagcaaagaaggagggagaaaagaaagaggagggaaagaaggaagaaggaaagaaagaagagaagaaggaggatgataagaagaaagagccagccccagatcctgttttggaatgggtcaaggcttatagggcatataacccctacatgaccacaaactactatgctccaagcatggaagagaatcccaatgcttgtgtcatttgttgaaggataaaacttagatgtaattttgtaagtatatttggtgtttattttcgaccaaaattgaagtttatctcgataatctacatgtaaacttctattatgtagattattgaaataaaactttaattttgatcaaataacaaggttataaggagcctaaagatttgtatgtaagttttgttcgttgctaaatagtaagttgtccaaacacaagggaaggacataccttttcaatatggtaatatattctattgtctttcactcccatatgagcgatcagccaaaagtaaaggaactccttgtatataatatggtgatgtcttgttgagttattactgagagatattttcaatgtgtagtgaagaaggaataaaattttggggatgtaattt

SEQ ID NO: 3821 - DNA, 1101 bp, Glycine max
agaatgatagcataaaaaacttttacactattaatttatttctatgaagttaatctatttacattttgagagcatactgcatggggtcatggtcatagtccccttgtatcatgactgttcctatttaatatctgattgaattggtgcattgcactcagaatacaaataccttaccttacttggaatgttatttttcaatgttgagggtggagaaccttgttccatttgggcagaaggatttactcagcaaagatcaaatgcaaaagccatagagtctcttggtagaatgctaacagaaggcattcacacagacatcaccatcaatgcttctgatggaagtataggagctcatagagctgttcttgctgccagatcacctgtcttccgcagcatgttctcacataatcttcaggagaaagagttatcaaccataaacatctcagacatgtcacttgaatcatgccaggcttttctctattatctttatgggataatcaaacatgaagagtttctgactcataggctggcccttctgcaggcggccgacaagtatgacatatctgacttgagagatgtatgccatgagagtcttctagaagatattgacacaaagaatgtacttgagaggctccaaaatgcatctctatatcagttgatgaaactgaagatgagttgcatccgatatcttgtgaagtttggtaaaatatatgaaattcgcgatgatttcaataccttcctgcgaaatgcagatagggatctgatttctgaagtcttccatgaagttcttgatgcttggaaaggattctgaagatcttgcagcttcaatgaaagataggaaagcttgttgttattcaacatacccaagaaataggttgtttcaatttgttgtgcaggatttgttttgatgaacctaattctttctctcagatgattttttattattattatgattttatgtacatacttatgttgtgctcttcaaatgtaaaccataaggtattattgtttacaaaaaatgtatatcatatgaaaagaaaagtaacatattcatgaatgcaaaaggtcctcctgaattctgatgataaaaaaaaaaaaaaaaaa

SEQ ID NO: 3822 - DNA, 1771 bp, Glycine max
tcagctacgtaggccccccccccccccaaaaaaaatttttccaaataacacagcgccaagacctttaacaaacctttctcagttttctgttgaagccgttatccaagccgtcgccgcacctcaccgcagcagcctctggcaacaccgtggggctccagaaacggcagcgtttgggacgacgaaaacaggctactttgtaccagctaaacctccaaaacaactggttttgtatagcatctaaattcctagctcacaagtcacaaacatgcaatctccttcttccctttacctcaacaagaacttcttcaccacacaccatcaccaccttggcttccaccacaccctctcttccacccacaattcccttacctctcttggcttctcgcccaagccatcatgttccacgaggcttataacagctcaagcttacaggcccaacaatcacaagaggaatggttcccccaaagagggtgcgagggtgaggggcagcaaggacaacatgtggagtattgacaatgagcttgccaaggcgtcttcttctcagaaggagaaaaggaggaggcagagagggaggagtgtggtgaggaggaagggcccaaagggtggaagggttattgtctctggggctatgctgctggaggttgagactgttcttcagactctggaaccagttataaaaccaatttggaatacatttactagcagtctcagtggaatttggaagggtgtaggtgctgtgttttctcccatcacagctgaaatggaaccaatggaaataggtagcaagaatgaacatctatatgactgctatactctttcccgcatagaggtagtaccatcagtttcaggtgagcatacatctcaaatccagagaaaggttaactgggtgactttgaatccttatggtgaaataccacagcatattaaaggcagcaatgtagccaaagatgggcagcacaaatccagcgttaatgtaataaatcatgttttgcctacatttgaatcgtttgactttaaaaggagtgatgtgatggaagaagatgtcatgggctgtgaaccaggccttgtttactttgaactgctgcactgggctcgtgcagtacagttagccaagagagttctggatagtctcaattgagtcacatgctttaaagttttggcaaaatattcacttctgtggctttcaaactgtgtcctagttgtagatagaagatgcttatttctacattccaagttctctattgatctggcagcctaaggctactctgagaggactgtcccctttattttacttgccaatattgtctgggatcagtggctgtccttttgtcatgtaagaaattgtatattccgctgattaagactatggtatactatactatttcagagttattgtgtcatatgggatacctctgtaaggagaagtgtacttttttcccgtttgctacactttggtttctaaacttgccgaatgacgtcatgacccatgtagctgaccgcatcttgtaggataaggctttgattttggtaatattacttgaatcatgtggtattgagctgatatccctaaattataagtaaagcgatcatgtgatatgcctaaatcctaatgttgtttattatccaaatgactagcagcatctgattgttcgtttatgttcctctcattatatatcataaataataaataattatgtttcgtaaattttaggacgggtcatattctcgagcggacgcgtgggcggacgcgtgcggtcggcccggtttttcc

SEQ ID NO: 3823 - DNA, 2172 bp, Glycine max
ctccgtccattcccgtcgttcttttgcgtttgactctctctttctctttctttgttcttcactttcttatcctctcatatccgtgatctctctctgttcccttcttctgtctcatgcacacaccactgtaccttgttctcaccgaaaccttcaactaggaatcgatcgagagtgtcttgtgttgctagtgcaagaggctgcaatatagatagatacgttcgtgcgtacgtaggaagggtacgtacgcggtagtacacaagacacgacgccgttttgcactctgttcttatttccgatcatgagggcgcacaagaagggtgttaccgtggggatcactgttgctgcttcttaagcctttttcttttcttatgtgggttccccccttcccctttcgattttctgcactttagagagacaaccagacatggctggcagtaaccaggtcaatctcaatgaatctaggagtgttgttccgttaaatacatgggtgcttatttccaatttcaagctgtcttacaagcttctcagacgtgacgatggaacgttcaatcgtgagttggcggagtttctggataggaaggtccccgcgaacgcaattcctgttgaaggggtgttttcaatcgattatgttgatagaaacgcgggtttgttttaccgtgtgtacttgccagcctctggaaacgaggctcaatggggtatcaaagaccttgagaagccgttgagtactacagaaattgttcctgtgatcatattcttccacgggggaagcttttcgcattcctcggccaacagtgccatctacgacaccttctgccggcgccttgtgaggatttgcagggctgctgtggtgtctgtgaactaccggcgatcaccggagcaccggtatccttgcgcctacgacgacggctgggcggcactgcggtgggtgaagtcgagagcatggctgcaaagtgggagggaggccaaggttcatgtctacttggcaggggacagttctggagggaacattgttcatcatgtggcagtgagggctgcagaggaggaaattgaggtcctggggaatattcttctccaccctttgtttggtggggagaagagaacggaatcagaattgagattggatgggaaatactttgtgaggcttaaggatcgtgattggtattggagagcttttctacctgaaggagagaatagagaccaccctgcttgcaacccttttggaccaagggggagaagcattgaaggactcaaattccctaaaagtcttgtttgtgtggctggtttggatcttctgcaggattggcaattggcatatgcaaaaggtcttgaggattgtggacaacaggtcaagcttctttttctcaaggaagccactattggcttctacttcttgccaaacaatgaccatttctattgcctcatgaaagaaatcaacaactttgtcaattctgattctgactgttaatatactattagtactaagacgacagacgactactactactactgctactacttaaccttaccttacctacaggaggcatacataactaaagcttgacattttacttgggttctcttttttttttttctctcccccacttttgtatcctgtcttttctctttttctagtttgtagtaaggtgtgtagttataagattgtgtagcattacttgttattgtcataacatctatggtggtcaatttgagagttctgtgacctggggactactgcttcctgttcctctctgtttgtgtcttttggaaggtagcacctatcaccggctttggcagtaccagaactcggttcatttggggggtttggtcgaaccaccgtatacaacgcttcagccccccttttaacgttttgaggtcaatggcaggaggggagatagaagatgaggattggttcatcactttgtttgattaagtgaatggtttcctcttgtagcactaattactgaatgtgaaccggagaatatcccaacctgttgttatatgaatctgtatgttatatgtatacctatgttgtataaatgtcttggatgtttggttttgctttttagttggattctcctcctccaatatgttgtgcttgtctgtctctcgtgaatcctgctatggttccaattaagcagtttcaatttattgagttgttgaagatgtttcatt

SEQ ID NO: 3824 - DNA, 1140 bp, Glycine max
tgggaccgggccccccctcgagtcagctattcaggccccccccccatttatattcccgctacctcgccccccccccactttccacacaacacacaaacatatcttgttgttatttgctctctctcaaaccatgggaagatccccttgttgcgagaaagaacacaccaacaaaggagcttggaccaaagaagaagacgaacgcctcatcaactacatcaagctccatggtgaaggctgttggagatccctccccaaagctgctggcttgctcagatgtggcaagagttgcagactcagatggataaattacctcagacctgatctcaagagaggcaacttcactgaagaggaagatgaactcatcataaacctccatagcttacttggaaacaaatggtctttgatagctgcaaggttacctggaagaaccgataacgaaataaaaaactattggaacactcacatcaagagaaaactctacagccgcggaatcgaccctcaaactcatcgtccactcaacgctgcctccgccactccggcaaccaccgtcacagccaccgcagttccatcttctaacagcaagaagaagataaagaacaataacaacaacaacaacggttttcagttggtgaataatagtgcttatgccaacacaaagattgggaccgacatgattgctgctgaagattctaacagcagcagtggcgttacaacagaagaatccttccctcatcatcaactcaacttggacctttccataggtcttccttctcaaccccaagtttcttcttcgttgaacccagaaaagttgaaaccagaaccgcaagagcatgatgatcagaagccacaggttttgtaccagttgtatgggaagaacatcactggccaacaaggtgtgtgcctatgttacaatctagggcttcaaagtaaccaagcttgttattgcaaaaccatgggtacttctactactacggttactaccacaactgcgaccgataggaatctatatagattttacagacccatgaacatttagaccttaaaatgtcatgttaattaattattgtgacctctttgttaacatggaaatagttgtagaatcccaaaattttgagaaaatttagatcattttttgtgtcc

SEQ ID NO: 3825 - DNA, 1273 bp, Glycine max
ttttaatatatttattaaacaagtacaattcaatacaaacaatttcattatatgtctcagctacgtaggccccccccccatatccagtctttatgttatttaaaaaattacaccatcatttttattatttttttccttctatgcagggtgcgtatttgttaattttctgatatcaagttaaaatttttacccaaattccaaatgcccgtttttatgaaaatcagaatatatttcattttataactgagccttgcatagttgcatttgataacacgtgcatgccatggctgacagtcatgtctagcataggcttgacttacattatacaaaaattgagaatgacatagtgcaccagaacaagaaacgaagaattaagagtacaaacagactagaagctctgttactaaaccttctgatatatagtagtcatagctaggaactatgtagtaatattattagctttaagaagattagagcctcttgtttgatcctctgaggtgattttgcattgcatggctatgaactccagataaatatagctctagccctcaaaagcaactgggcaagcctgttttggacgttgaggcatatgacttcgtcagcaccacctataagttgttgtccaatgaacactgctggtacagttgggcggcaaccaacctgaatcagtgccctctctatttgctgaccatttgtcattttgtcaatctcgataaccgtagggttggcaccaaagctgcatatgagagctttcacagaatggctaatggcacaagtgctcttgctgaagatcaccactggcttgtcagcagtcaaagttgccagcaagtccattgctacaaaatatgagtatttaaaaggagtaagagttggtaaactcttaactaatggtacaattggcttgaaattgtttttgttttgctctgttgaactcaagctctagagaaggtctatttatattagcttcagctggtttattctggtagatgacaccggatagtatgtagaataacatccgaaaaagaatagatgttctaaaagttttgtcattagtggattccctatattccctctttgattgcttgatggtaaccacccatatgctttattagcaaagtgaatgaggagtaacttattgctgcctcattgtatccaacccatgattgtggctatgtacctattgttatgtttgtagctctatcatttgcaaatgctaatttgtcatggaatattaatacattaaatttcagactgcaaaaaaaaaaaaaaaaaa

SEQ ID NO: 3826 - DNA, 1286 bp, Glycine max
tgctcgagcggcgcgagcggctcgagtgacactaataatatccgatcatctagaacgcaggcgttgagttgagaatggaaggagggaaacgaggcacgattctggtcaccaacgacgacggtatcgatgctcctggcttaagagcattggttcactccctcgtcaacgccaaccttttcaacgttctagtgtgcgctcctgatagcgagaaatcagctgttagccacagcatcacttggctccatccagtagctgttaagcaagtacagatcgagggaaccaccgcatttgctgtttctgggactcccgctgattgtgcttctctagggatttccaaagctctctttcccacagtacctgatctggtggtcagtggcataaacaagggtagcaactgcggttatcacattgtttactcaggcactgtagctggagctcgagaggccttcttcaatgatatactttctatctccatttcatatgactgggttaaaggaaagagtaagctacaagacttcacccttgctgcacaagtatgcttacctatcataagcgctctactggttgagacaaagaatcaaagctaccctagaaaatgtttttttgaatatagacgtgccaaacaatgttcctaaccataagggttacaagctaactaagcagggtaaaagtatcatcaagactgggtggaggcaagtcacatctgagacagaaggaccaaaaatcccccctgtttcggccattccgcacgcggaaacatcaaagaattttgactcatcatctgcatcaccagaacatcttttgtttgcgagagaggtaataggttctgtacttgatgaagatgatacggactacaaatgtttgcgggaaggatatattactgttactcctcttgctgctctcactcatgtggaggtagattgtcaggcctattttaagaattggctacaaagtgtccccgaactcccctcgtcatcatctttataatgctattcctccggttcactggaagtgatgccaactcaatctgttgctaaatcaattattttgatcctgagcaatttggttgctccggtatgcatgccatttctccattattatcatcgggcaataaagacatctcaacagtgttatataattgaatgagagcttaatttctggaatctaacaagtaataacatgccactcatttttagattaatatagtagcaattcttagtctgtcttcatccaaaaaaaaaaaaaaaaaaaaaaaaaaaaaaaaaaaaaaaaaaaaaaaaaaaaaa

SEQ ID NO: 3827 - DNA, 2000 bp, Glycine max
  misc_feature (401)..(405): n is a, c, g, or t
  misc_feature (1988)..(1989): n is a, c, g, or t
cctacgcgtccgcccacgcgtccgcccacgcgtccgcccacgcgtccgtttaactctttctctctctaatccgcgtctctttgcgtttcacggcccacattgctgcgttctctggagtctttggcctttcaaggaaaaaatggcagagacaaaaccagacacaccgttgatgccaccatcatcgcggaaccttccagatttcaagaagtccgtgaaattgaaatatgtgaagcttggttatcattacctcataacacatggcatgtacctctttctttcccctctggtggtgctcattgctgcacagctctcgagcttctcccttggagatctccatgtcatttgggagaatctacagtacaatttgatatccgttattgtttgttccactctcattgtannnnngtctaccctatacattatgactcgtccacggcccgtgtaccttgtcaatttctcatgttacaagccagaagaagctcgcaaatgctcgaagaagatattcatggaccagtcccggaagagtggttttttcacagaggaaactcttgaattccagcggaagattctggagagggctggccttggtgaaagcacttactttccagaggctgttctcaatgatcctcccaacccttcaatgaaagaggcaagaaaagaggctgaggctgttatgtttggtgcaattgatgagctgtttgctaagacttctgtgaagcctaaggacattggaattctgattgtgaattgcagcctcttttgccccacgccatcgctttcggcaatgattatcaatcattataaacttagagggaacataaagagtctcaaccttggtgggatgggatgcagtgcaggtctcatttcgattgatcttgctaaggaccttctccaagtccaccccaattcctatgcattggttgttagcactgagaacatcactttgaattggtactctgggaatgaccgatcgaagcttgtttccaattgtttgttccgtatgggaggggctgccattctgctttcaaacaaaggctctgataggagaagatcaaaataccagctggttgacaccgttcgcactaataagggttctgatgacaagtgctttggctgcgttgtccaagaggaagattccaatggcaagattggtgtcactttgtcaaaagatttgatggcagttgctggcgatgctttgaaaaccaacatcaccacattggggcctcttgtccttccaatgtctgaacagctcctgttcttcgccacattggttgggaagaagcttttcaagatgaagatcaagccttacattccagacttcaagctggcttttgagcacttttgcatccatgctggaggcagagccgtgttggatgaactggagaagaacttgcagctgtccacttggcatatggagccatcaaggatgacgctttaccgttttggcaacacctccagcagttctctttggtatgaattggcttacacagaagccaaagggaggatcagaaagggtgacagaacatggcagatagcattcggttccggattcaagtgcaacagtgcagtgtggaaggctctcaggaccatcaactctgcgaaggagaagaacccttggatggatgagatccacaagttcccagttgaagttccaaggatttcgcctctctaaacaacgtagttttgagtattttttggtcagcattaggtggtagctgttgaagtggtggaaagggatgagcggccgcccttgttggtaataaattttgtttgttattaagtctaatttagtcaacgacttgtgcaaaagctttggactgccggggtatttcagcaacctattgctctggggtagtgaaatgtaattccaattcaattcgagatttgttttaaacatttacaattttttcccattttgaaatggaaaaaatttgtatttttttggtttaaaaaaaaaaaaaaaaaaaaaaaaaaaaaaaaaaaaaaannaagggatcccc

SEQ ID NO: 3828 - DNA, 1086 bp, Glycine max
  misc_feature (1052)..(1052): n is a, c, g, or t
  misc_feature (1054)..(1055): n is a, c, g, or t
  misc_feature (1057)..(1061): n is a, c, g, or t
tcagctacgtagggccccccccccatacaaaccataaacaacaacaacgaacctcactcgctaccattcgattacaacgtcttctggttctttgaagaagaacccttctctttgcgcgtgtcccgttctcttctccaatcctcctccatccccactgtgtgatctgatcctaaaccctatagccatgactaccatggaggttaagctatggaatgacaagcgcgagagagaaatgtatgacaactttggggagctttatgccattatcaaagccactgagaggcttgagaaggcctatgttagagatataatctcaccccaggaatatgagttggagtgccagaagctcatagctcatttcaaaaccttagcttccacccttaaagacactgtgcctagcattgagcgatttgcagatacttacaagatggagtgccctgcagcgattaaccgtctcgtggtttctggtgtgcctgccaccgtggagcatcgtgcaactgcggctgcctctgcttccacctctgccgctactgtggccgagtgtgttcagaattttattacttcaatggattccttgaaacttaacatggtggctgtggatcaggtgcacccattgctctcggacctttatgcttcgcttaataagttgacaatcctgccgcctgattttgaggggaaaaccaaaatgaaggaatggattgcaaggttatctaagatgggtgcagctgatgagttgacggaacaacaggcgaggcagcttcactttgatcttgagtcttcttacaattcctttatggcagccctgcccaatgctggtacatgactgagtggccagtgcttgtatattaaatcagaatttccttttttttcatgttttttttttctttggatactaatcttgatgattggaaaggaattttctatttggttacagctcatacatttttaatgctggatcctggatatttacaaatgatggctatgtgctgatcattgaagcctttattttaaaaaaaaaaaaaaaaaaaaaaaaaaaaaaaaaaaaaaaaaanannannnnnaaaaaaaaaaaaaaaaaaaaaaaaa

SEQ ID NO: 3829 - DNA, 1226 bp, Glycine max
aatcaacgaccataaacaacaacaacgaacctcactcgctaccattcgattacaacgtcttctggttctttgaagaagaacccttctctttgcgcgtgtcccgttctcttctccaatcctcctccatccccactgtgtgatctgatcctaaaccctatagccatgactaccatggaggttaagctatggaatgacaagcgcgagagagaaatgtatgacaactttggggagctttatgccattatcaaagccgctgagaggcttgagaaggcctatgttagagatataatctcaccccaggaatatgagttagagtgccagaagctcatagctcatttcaaaaccttagcttccacccttaaagacaccgtgcctagcattgagcgatttgcagatacttacaagatggagtgcccagcggcgattaaccgtcttgtggtttccggtgttcctgctacggtggagcatcgtgcgactgtggctgcctctgcttccacctcggctgctattgtggccgagtgcgtccagaattttattacttctatggattctttgaaacttaacatggtggctgtggatcaggtgcacccgttgctctcggacctttatgcttcactcaataagttgactatcctgccacctgattttgaggggaaaacaaaaatgaaggagtggattgcgaggttatccaagatgggtgcagctgatgagttgactgaacaacaggcgcggcagcttcactttgatcttgagtcttcttacaattcctttatggcagccctgcccaatgctggtacatgactgagtggccagtgcttgtacattaaatcagaatttccttttttttcatgtttttttttctttggatactaatctgatgattggaaaggaattttctatttggtcacagctcatacatttttaatgctggatcctggatatttacaaatgatggctatgtgctgatcattgaagctttattttatattgtgaatgtgctttcagctttggttttcttacctgcagttgtttggtttgagtttctctgcccacctagcaagggtgaaatcttacagaaacttgattattgagtttatagctgtttatctttgtcctttgtaccaataaatgtgtttcagcaccactcctacatagagtggtagatccttcaaataattgacataattaatagcttttggtgtacaggatatatgcatataatcaga

SEQ ID NO: 3830 - DNA, 1997 bp, Glycine max
tcgagtcagctacgtagggccccccccccacacagcacagcacagcatagcatagagcatcttcattcatcagcagcacaaaaaagcaagaaaaaaatccgacccgtgaagaaggcaaagcaaaaaataataaaaaaagaaagaaaaaaaaacgtttaccctcttttgtctgcgcgtgcgtgtggatctggctagaaagcaagaaagaaagggagggtttctgtgcggatctgaattcgcagtgttaaggttttgaagggtttttccattttcttcaatggccacgccctttcccattcccgtcaccgcagctcaggttggaacgtacttcgtgggacagtactatcaggtgcttcagagccaacccgagttcgtgcaccagttttactctgatgccagcaccatgctccgtatcgacggcaacgccagggaaactgcggccgcaatgcttcaaatccatgcactgattatgtcactcagttacactggaattgaaatcaagactgcacagtctctagaatcttggagtggtggagttcttgtgatggtttctggatctgtgcaagttaaggactacagccggaggaggaaatttatgcagacatttttccttgctccccaagagaaaggcttttttgtgctcaatgatatttttcactttgttgaagaggatccagttcaccaacaacaagcagtcttgttacctcaaagcaatcttgatcctaaattgaatgcttcaagtgcaatcaataagccagtgtccaactacttgctgggtagagatatccaagctagggactatgttgctacaaatgaggtcaaagaaaatggtgtagttgataattatggattttcagagcaaagaatgcaacgggcccctgattctgagcatattagggaggataatgctgttgaagagtcaaatggttcacttcaatcttcagtgaatgcagtgcaagaccatgcacctgcttctcctgatgaacctgctggggagccacaaaagcacacttatgcttccattttacgggttgctaaaggacaatctacaccatcagtagcttctcagcataagaatgtgtccccttcagaatgggatcatgctccacagagtagtagtcagcaacagcaaatgactgcttctgcaaatgcatttgaaaggtctgaaactgatgcagcggaggagtttcctgcaacagaagatgaagatgaaatcaaatctgtttatgtgagaaacttgtcacctacagtgtctccttctgaaattgaagatgaattcaagaattttggtagaatcaggcctgatggtgttgtcattagaagtcgcaaggatgtcggtgtttgttacgcatttgttgaatttgaagatatgactggcgtttataatgcagtcaaggcaggatctgttcaaatagcagggagacaagtatacattgaagaacggagaccaaacagtaacatcccttctcgaggaggaagacggggtagaggcagaggtagctatcagtcagatgctccaagagggcgtttcaatccaaggaactttggcaggggacatggccaagatggcagtgatagggagtataacaaattgaaaggaaatggtttctatcgaccaagtccacgccaagagaggggaaattcagggcatcatcaagtaccgagaaatgggcagaatcttgctgagtcctgagtcaacaaaaaacttaagccagagaatccaattttgggtccagatatttcaaactctaaatagtcaacttcagtagattagaccaaatattgatatttttcatgtcttaaatttaagttgttcagggaatatggatgagatgttttcattcttgataaattttggtctgggggcttcttgtttcatttgtttctccatgaatttaatgtttagctggaaatgtgtttaaaacacttgacatttatttattcccaattgaaatttgaaatctagttgtttagctaacaaaaaaaaaaaaaaaaaa

SEQ ID NO: 3831 - DNA, 1301 bp, Glycine max
aaaaattcgccacagttagtcactgagttcattatttcattcatccttagcttattcctcttgtttgggtcatggcaatttgttcctcaccatcatcgtcatcgtcatcttcttcttctacgtcgtcgtttggttcctcgaacaccgcgaaggcgtggataatccatggcattgtggccggagtggcgattgctgcggcggtgggcgcacgcgcttacatgacccgattcagcaagtttcggagccgggtcgtgggcatcatacccgcccgattcgcttcctcgcgctttgagggaaagcctctcgttcaaatcctgggcaagcccatgatccagagaacatgggaaagggcaaagctggcagctacattagatcatgttgttgtggcaactgatgatgaaaagattgctgactgctgtagacaatttggagctgatgttataatgacctcagaatcttgcagaaatggtactgagcgctgcaatgaagccctacagaaacttgggaaaaaatatgatattgttgtcaacattcagggtgatgagccacttattgaacctgagataatcgatggtgttgtgaaagctttgcaggcagctccagatgcagtgttcagcacagcagtcacatctttgaagcctgaagatgcccatgatccaaatagagtgaaatgtgtggtagataaccgtggttatgccatttacttttcacgaggattaatcccattcaacaagtcagggaaggtcaatcaacagttcccgtatttgcttcatcttgggattcagagctatgatgcaaagtttttgaatatataccctaatcttcgacctactcctttgcaacttgaggaggatttggagcagcttaaagtccttgagaatggctacaagatgaaggtgataaaagttcatcatgaggctcatggtgttgacactcctgaagatgttggaaagatagaatctctaatgcgtgagaggaacttatcttgaactctcaccacggcagtgaaaccatatatgcaaattaatcattagcacaccaccacatcacatatagaaaaagtttttttttttttgtataaaccttcttgttgcttacaacatagtatgcgtgctattatttatgatgtattttattttatagcatcggcagtatgcatgactaggtttctgggtttcttgtacaattaatatgtgcagagaattaaaatttttgtcacacacaaaaaaaaaaaaaaaagtatctttatcaacagtgaaggttaacataaataaccccatggaagatatttatagtaaaaa

SEQ ID NO: 3832 - DNA, 1618 bp, Glycine max
  misc_feature (1606)..(1606): n is a, c, g, or t
tctcgagccgaatcggctcggctcgagcggctcttttcagttttgacgccgacgagtgtgttgttggatggatgttcattctccaacttgataccgcgttcgctcactctctactcaacttcaattaatcaaatccctcactttctctctcttgtcttcaaatctcaattctattttggaaaatcagaatcaaagacagttaaaaatacagaacaaacatctcactcaacatcaacacttcagatctacgtttccactctcacaacaacgaaaaaggaaagaaaaaccgattctacagcgacaacaaggaacgaaagaacgatcgatttctcgaagcgccctcaaaatggcgcgtgcacccttcacttctttccccttcgtcctcattatccttctgtcaatcgtccacctttcgcactgcaagaccctcaaacgtgacgttaaggctttgaacgagatcaaggcttcgcttgggtggagagtggtgtatgcgtgggtcggtgatgacccttgtggagatggggatcttcctccttggtctggtgtcacgtgttccactgtcggtgattatcgtgttgttaccgagcttgaggtgtatgcggtgtcgattgttggaccttttcccactgctgttaccagcttgttggatcttacacggcttgatcttcacaataacaagttgacagggcctattcctcctcaaattggacggttgaagcgtcttaaaatactaaatttgaggtggaacaaactacaggatgcaattcctccagaaattggtgagcttaaaagtttgacgcatctgtacctaagcttcaacaatttcaagggagaaattcccaaggagctagcaaatcttccagaccttcgctatctatatctccatgaaaaccgtttagctggaagaataccaccggaattgggcacactgcaaaatcttcggcacttggatgctggtaacaatcatttagtgggtaccataagggaactcattcgtattgaaggttgctttcctgcactacgcaatctgtatctaaacaataattattttactggaggaatacctgcacaacttgctaacctaaccagtcttgagatcttgtacttgtcctacaacaaaatgtctggagttataccatccactgttgctcatattcctaaattgacatacttgtacttggatcacaatcagttttcagggagaattcctgaacccttttacaagcatccatttttgaaagaaatgtacattgagggaaatgcattccggcctggtgtcaaccccattggtttccacaaagtgcttgaagtttctgatggagacttcctcgtttaatgaggctctaaatatttatatatatttttttcttcaggaggtgtacttgtataattattgaaacaatcgttcctctaattatctcaatgaaatagctaaataggtaattcaattttgtctaaatctatcttgtcagagtaaacagttgttttaagtttgctattttaagagctttccacgctccaaacagttgtattattgatagtcttgaactcttgatatcagcttcaaaaattgaggaatgatattacatattttttcagtgaaganataatattacaa

SEQ ID NO: 3833 - DNA, 1619 bp, Glycine max
agccgaacgctgacgagtgtgtgttggtcctgttggatggatgttcattttccaacttgataccgcgttcgctcactctcaactcaacttcaattaatcaaatcccacactttctctctctttccttcaaatctcaattctattttgcaaaatctgaatcaaacacagttaaagacgcacaagaaaacatctcgctcaacaccaccaacacttcggatctacgtttccactctccgaacatcaaaaaaggaaagaaaaaccgatttacagcgacaacaacgaacgaacgatttctcgaagcgctctcaaaatggcgcgtgcaccctttacttcattccccttcgtcctcattacccttctctcaattctccacctttcgcactgcaagaccctcaagcgtgacgttaaggctttgaacgagatcaaggcttcgcttgggtggagagtggtgtatgcgtgggtcgatgatgatccatgtggagatggggatcttcctccttggtctggtgtcacgtgttccactgtcggtgattatcgtgttgttaccgagcttgaggtgtatgcggtgtcgattgttggaccttttcccactgctgttaccagcttgttggatcttacacggcttgatcttcacaataacaagctgacagggcctattcctcctcaaattggacggttgaagcgccttaaaatattaaatttgaggtggaacaaactacaggatgcaattcctccagaaattggcgagcttaaaagtttaacacatctgtacctaagcttcaacaatttcaagggagaaattccgaaggagctagcaaatcttcaagaccttcgctatctttatctccatgaaaaccgtttaactggaagaataccaccagaattgggcacactgcaaaatcttcggcacttggatgctggtaacaatcatttagtaggtaccataagggaactcattcgtattgaaggttgctttcctgcactacgcaatctgtatctaaacaataattattttactggaggaatgcctgcacagcttgctaacttaaccagtcttgagatcttgtacctatcctacaacaaaatgtcaggagttataccatcttccgttgctcgtattcctaaattgacatacttgtacttggatcacaatcagttttcggggagaattcctgaacccttttacaagcatccatttttgaaagaaatgtacattgagggaaatgcattccggcccggtgtcaatcccattggtttccataaagtgcttgaagtttctgatggagacttccttgtttaatgaaagctctaaatatttataattttttctcttcaggaagtgcacttgtataattattgaaacaattgttcctctaattatctcaatgaaatagccaaataggtaatccaattttgtcaaaatctatcttgttatagtaaaacagtcgttttaagtgtactgtttaagagctttccacgctccaaaaagttgtattatagataagatagtcttggactcttgatatcaacttcaaaaattgaagaatgatattacatatttttcagtaaaaagtaatattactgtgcaaaaaatgaaaaacttaaatatgattttaatc

SEQ ID NO: 3834 - DNA, 1226 bp, Glycine max
tcagctacgtaggcccccccccccggtatgtaaaatgtaaaatattttccaaagatcagagacaatcagtgtcccacgttgttgcgattgcgactctctcttcctacgataaccgtttcctctcgccggaaaaccgacattgatctctctctccggcgatccccgcccatccctccgccatgagttccggcgagctcctccacatacagccccaggagctgcagtttccctttgaattgaggaagcagatctcgtgctctttgcagttgtctaacaagactgacaactatgtggctttcaaggtcaagacaacaaatcctaagaaatattgtgttagacctaacactggagttgtgatgcctaggtctacttgtgatgtcatagtgacaatgcaagcccaaaaggaggcacctcctgacatgcaatgcaaggataagtttctccttcaaagtgtagttgctagccctggggcaaccacaaaagatatcactccagaaatgttcaataaagaatctggtcatgatgttgaagagtgcaagttgagagttgtttatgttgctcctcctcaaccaccatccccagttcgagaaggatctgatgaagattcatcccctcgtgcatctgtatctgagaatgggcattcaagtgctgcggaatttacaggggcttcaaaagctttcaatgagcggggtgaacatcaggatgcttcctttgaggcaagagctcttatttctaaggtaactgaggagaggaattctgttgttgagcaaaacagaagacttcagcaagaactggagcttttgaggcgtgatgccggcagaagccgcggcggtgtaccattcatgtacgtagttcttgttggcatcattggactcatcttgggtttcctgttgaagaggacgtgacctgagtgatggccaagttctccaaaatgagatcaattgtagaaagcaacaagaaatatgtgcgatgatgtggaaaaaccaatttgttgtcttattgtcatgtattgctcctacaaatttggaatgtgtggtcaaaaaataggtacttgtatcagccatagcaatcatagacaagtggacaaatttgtatcatgggaagtgtattgttatctgatgtggtacatgtgatcaattctttagcagttcctatttcccagtctaattgctaaatcatggcaccatgatagtgccggcaccatgatagtgcctttttggagctat

SEQ ID NO: 3835 - DNA, 999 bp, Glycine max
gttaataggtttgttgggttgaatttatttttgtgccacattttccaattgatttccttttgctaatgaatcaatggatcatttcctaatatagtggtttccgcaacaggcaggaaccactggccattccgtttctcaaattttggccgcattctttcacaaattttggccaccaaaagagcttcttcaaccattgtgactctttagctttagaaatcacaattgggagagtatggctgtctctttgacacgtttgtcatggtggttgtggggtagtagcaaggagaaagagcctgtttctagtggctctacactgaattcatcttctgaatggagttttaaggaaagagagactgtgaagtttccttcagtgaagggaacaaagatagctccttctcacaggaaggttaaaaggaaatggcagagcagggaagagaggagacatgatagagagtatgatgttgtgttggtgccatctgatggtgatggttgtttgtcaagctctgaatctgatgactcagatttttccattgggtggttggagcctcatggctctgatttccttcagagtgatgatgatttggacaatagttttgctgtgctagttccttgctataggaaggaggtggagagttcaaacaaggagcttttgagtgccatcaagaaccttccaaatgaattttcttctgctggcaaaaattacatggaacactggctggcttctctcaagaatttagaagcgtagaaaactacatcttctatatgactacggacctttctgacatccttctagaagtagagaggaggcaaaataatccatcatccaatgtattctttgtacatagaatcatcctctcctcttactgtaaaagcttcaattgaaatggaaaatgtcgatctagaaaattctgtatggccaatcaatcactactataaataaaagtatttcactataaaaaaaaaagggattttcatgttgacaaaaaaaaaaaaaaaaaa

SEQ ID NO: 3836 - DNA, 804 bp, Glycine max
  misc_feature (677)..(677): n is a, c, g, or t
  misc_feature (689)..(689): n is a, c, g, or t
  misc_feature (693)..(693): n is a, c, g, or t
  misc_feature (720)..(720): n is a, c, g, or t
tcctctccttcttcttgattcttcattgttattagagtaattaataattcctttgtgattgttccaaatccaattatggcatttggactcaggacaaagagctttgggttcatagaaggagaggctcatgagtttgtgggtgcacttcaatggtggaaccagattgatgactcagatcaatggcagagaggcacttactatgccctttgtgccgcttatacgttggtctcctttgttgccctggtgcaactggtacgaattcaaaggagggtacctgagtatgggtggacaacgcagaaggttttccatttgatgaattttgttgtcaatggattgagggctgtccttttcggtttttacagaagtgtttttgcaattagaccaaaggcactagagcaggtgctaatggaggttcccggtcttctgtttttttctacttatgcattacttgtcttgttctgggctgagatatatcaccaggccagaagtgaaccggcacagaaacttaggccatcttattttatcatcaatggttttatttacttgatacaggtctgccctttgaattacatgagtgtaagcagaactgcagctggtttgggagctgcaaaactcttccttgcagttatatcattctttgctgctcttggatttttattgtatggtggaaggttggnttttcttgttgnaacnctttcccattgaatccataagccgtcnaaagaaactttacgaggttgggtctgttacaatcatttgtccaccttgttcctgatagatgtgctgtgcttgcattttctgcat

SEQ ID NO: 3837 - DNA, 590 bp, Glycine max
aggttatgcaatattaattatttaggtacctaataaagtttgaagatggcacaagttgaactgcgagatgagcatgggaacccagttgaactcacagatgcatatgggaatccggtttggttaacggacgagaaaggcaaaccggtgcacctcaccggtgtggcaaccactgcacacaaatgtttgcaagagaatgacacaccacaagagcttcctcactccaagagctcaagctctagctcttctgaggatgaagagcatggagggaggagcaagaagggactgaaggataaaatagaagagaagttaccaggaggagaagaaggtgagggaaaggagcatgcacacaccacaacagttacttctgctactaccacagatagtggtgctaatcaccacccaaccacaaccactgaccatgagaagaagagtataatagacaagattaaagaaaaattccaataagtataagtcagtgaattattcatgaatttaagctttgtttattttgtatgtttatctatgtcatggcatagatggtttttgagagtttcaaagcatatatcaataagagaaacgttattatgctc

SEQ ID NO: 3838 - DNA, 1154 bp, Glycine max
tacggctgcgagaagacgacagaaggggacagcagtaaagtgagttaaaagaaccgataatagttgttccttcactctccgctctctctgccactgagccaagaagatggcctcacaggtttgcaaatctgcttccagagccgcgaggtcccttctatcctctcgttttcactctcaaggacgtgcgcttggggctgctgcggctgtttcattgagcagcaaagtgcctcttttttacggaaagaacggttctggaaatggatccgcttcttcatcatcatcatcatcatggatttcaggagctcttgctcttcctgccgcagcttacatgttccaagatcaggaggtgcaggcagctgagctggagcgcactttcattgccattaagcctgatggagtgcagagaggcctgatttctgagattatatctcgttttgagcggaaagggtacaagcttgtgggaattaaagtagtgattcctaaaaaggaatttgcccaaaggcactatcacgacctgaaagaaagacccttcttcgatgggctgtgtgattttctaagctctggccctgttattgcaatggtgtgggaaggacagggagttatttcctatggccgaaagctaattggagccacagatccacagaaatcagaacctggaaccattaggggtgatcttgctgttgttgttggaagaaacatcatccatgggagtgatggtccagaaactgccaaggatgagattaagttgtggtttaagccagaggagttggttagtttcactagcaatgcagagaagtggatttatggtgccaactgattctttccctcatgccttgggttttctataacaactgctcagtgagtttttggaataaattatttgtcagaatgaactctagaagccataaataagcgcgattgagaatttgagattggtacggttaatatattttaataggaattgcattgtttttatcttttatcagtcgggtgaagacaatgtgtgacaattgccaatacttcaaaatgggtcaattggctttttgaaaagagttgaggatcatttgttcatcctataatagaaaaggtgattcagaattggtattttggcgtgttgtatttttatgtgttgtaatctccatcttgttaatttg

SEQ ID NO: 3839 - DNA, 670 bp, Glycine max
  misc_feature (668)..(668): n is a, c, g, or t
gcgattccgaattccagagagcaatatattccgttccgttccttctttctccgctcctcacttcgctctctcattctccattctcacttctcaaattgaatcgaacgaattcacaaaccctagttttcgaggatgggtcagatccagtactccgagaagtacttcgatgacacttacgaatatagacatgtggttcttcctcctgaagtcgcaaaactgcttcccaagaatcgtcttctctccgaaaatgagtggcgggcaattggggttcagcagagccgtggctgggttcattatgcaattcatcgccctgagccacacataatgctcttcaggaggcctttgaattatcagcagcagcaggaaaaccaggcccagcaaagcatgcttgtcaaatgaacactatctatgcaaatctgaaagtgggattacaatgttatataggttttaattttgttggtaatatggatgttatgaagaatgaagaaccctggtggaattctctttttgtggagaattttcatgtggtttcaactgtcattttaatgtgttgttgacatgatgatgtgtcatggatttttattggtgtacctctcgtgtactcttatgctcggtggattatataatagtcattatcggttaaattaaaaaaaaaaaaaaaactccanaa

SEQ ID NO: 3840 - DNA, 2067 bp, Glycine max
ggaggtgtgaaggacaacgtaacaataaagacaaaagggacccttcacgcattgtcgacaacgtagtcatgaacaagtcgctgaaaccagaagaacaagggtccaaacattgaaactcattcccattgaagctgaacaaccaaccccattttggttctgattttttcagtgctccaagtggcaagttttggaattttctgggggcttcgtctggattattcttcaatttgaaaacccaccaagggatgagcgtttcctcgttgcaatgactacttctggtgctgacctggttttgaagggtcggcttctgtaaattcttcacccctgcagttcttctccatgatgtcactttcacctagcttaggttctcccaacaatctcttgtttagagaaatgaaatccgaggaaaggggtttgtacttgattcatttgttgctcagttgtgcaaatcatgtagctgctggtaaccttgaaaatgcaaacaccacacttgagcaaatttccatgcttgcttcccctgatggggacactatgcagcgaatcgcaacatattttatggagtcgcttgctgatcggattcttaaaacatggcctgggatccacagagccctcaactcaaccagaatgactttgatatccgacgaaattctggttcagaagcttttctttgagcttttccctttcttgaaggtagcatttgttctcacaaatcaggccatcattgaagcaatggaaggggagaaagtgattcacataattgatctcaatgctgctgaagctgctcagtggattgctctccttcgagtattaagtgcgcatcccgaaggccctcctcatttgagaatcaccggggttcatcagaaaaaggagattctggatgaggtggctcatagactaactgaagaagcagaaaagttggatataccgttccaattcaaccctgtggcaagcaaattagaaaatcttgattttgacaaacttcgcgtgaagactggcgaggcactagcaataagttccattctccaattgcatacccttttggcctgggatgatgaaaccatgcagagaaagtctcctcttctgttgaaaacctcaaatggaattcacttgcaaagagtcctgccaatgggccaaagcacattgggtgatttggttgagaaagatatggttaatgggtacactctaagtcctgactcaacctcatcttcaccggcatctttaactacttccaattcaatgaatatggagagctttcttaatgccttgtggggattatcaccaaaggtcatggttgtgacagaacaagactgtaatcacaatggtccaactctgatggataggcttcttgaagctctatactcttatgcagcattgtttgattgtttggaatccactgtctcaagaacatcattggagagattaagggtggagaagatgctttttggggaggaaataaagaacatcattgcatgtgagggatctgaacgaaaggaaagacatgaaaagctggaaaagtggttccagagatttgatctagctgggtttggcaacgtgcctttgagctactttggtatggtgcaagcaaggaggttcctgcagagctatggttgtgaaggatacagaatgagggatgaaaatggttgtgtgttaatttgctgggaggatcggccaatgtattcaatatcagcttggagatctaggaagtaagagaattagagggatatattgatgttttttcttttcttttctttctttctttttatttgtatgagtgttttattcttatggtaatgactgttcttcaagatagttttttagagatactctttattcattgcctggtaaaactccatcaagtaagaaatttgggaagacaaaaaaagggtagaaggacggaagaagtagaagtcttaatcggggttctgtttatggtttcattttttgcagctgatcattttattttttatgaattatgagctcctgtaccctaacttgtacctagtatattacataatataatgtgtttttgtttaaaaaaaaaaaaaaaaaactcgagactagttctac

SEQ ID NO: 3841 - DNA, 1189 bp, Glycine max
cccaaaagcctcctcctctttctcttgttcaaccttcccacaaacactgcatgcgtctttgaccacaactgcttcttcaatttccaatctttttggacaccctctattgctattcctcccttggtgttgtttgtgttaaagggtatctctctacttaatataaagttccattgtctcttgaggcaattttcaaccttagttgtgtgttttggagagtttttttgtgttgttttgttgaggttgggtttgtgagtgagagaatggtgggtgctctatctgttgtgggctcatcagtgatggactctcacactggcccttgtttgtgtgttgatgctctcccaacaactagtgttaatctcaagagtggtggagatgttttgtacaagaatttgatgggaaggaagcataatttggtgaagcatggtggtgggaccatgaagttgagcagttcatttgttgatcctggaagagagtggaggctctttgttagcaaaagttgcaagaggcagcgcaaggataggagagtgaccattgtcaatgaacttggaggacaatatgaggacacttttgaagatgttaaagcgcaaatgctcaactatttcacatacaaggctgtgaggactgttcttcatcagttgtatgagatgaatccacctaaatacacgtggttctataattttgttgcttcaaacaaaccagcagatgggaaacgttttattcgatcccttgggaaggagcaacaagagcttgctgaaagagtgatggtaactcggcttcacctttatggaaaatgggtcaagaaatgtaatcatgctgagatatatcaagaaatctctgatgaaaacttggagttaatgagggaacggctcatggagacagtaatatggccctcagatgacacaaacacagaaaagattggctgataattcatctcaaatttttactttctgtcttcaacctcttcctagtctaggtatattttttgtttcaatatcaatctgttttgtttccaaaattgtcatttgtgtcattttcctttgataggattctcagttttacgttatgtaaattatgtatatatttgtaccttgttaaatacacaatccattatatatcgctagtttcagatgaattttaggccaattttaacctactccaaaaaaaaaaaaaaaaaaaaaaaaaaaaaaaa

SEQ ID NO: 3842 - DNA, 618 bp, Glycine max
  misc_feature (16)..(16): n is a, c, g, or t
  misc_feature (22)..(22): n is a, c, g, or t
  misc_feature (38)..(38): n is a, c, g, or t
  misc_feature (47)..(47): n is a, c, g, or t
  misc_feature (69)..(69): n is a, c, g, or t
  misc_feature (76)..(76): n is a, c, g, or t
aaggagcatgtaaaancaattnttttagaaataatagntaaaaaatntgcagaaaatgctcagcgtacncaatctngcatgaatatgttggtgataattgttcgtttcagtccattgctccttcgtggcagtgaagaggagctggtgaatttactgaaagataataatgatacaattcaggaaggtgttctaaatgttttagcaaaggctggtggtactattcgtgaacaacttgccgtcacatcaagttctgtagaccttatattggagagactatgtttagaaggcagtcggaggcaggcaaagtatgctgtccatgcactggctgcaataactaaggatgatggcctcaagtctctctctgtcctatacaagagacttgtagatatgctggaagataaaacacatctgcctgcagtacttcagtctctggggtgtattgcgcagacagcaatgcctgtctatgaaaccagagagaatgaaattgaagaatttatactaaacaagattccaaaaagtgatagtaaagaagataacatgaaaacattttgggatgataaaagtggtctttgtatggtgaagatatatggcattaaaacatttgtaaagagctacctg

SEQ ID NO: 3843 - DNA, 1122 bp, Glycine max
gcgggggtagttgagtagacagagaggagtgttcagggcagtttacaaagccaaattttgttccttagttgtttccttgttctctgtaactgatggctgattattcagcaggaactgaatcccaggaggtggtcgtaaatgtaaccaagaacacctccgaaacaatccaacgctcagactcccttgtctctgttcctttcttgcagaagttggtagctgaggcggtgggaacatatttcctgatatttgcagggtgtgcttcattggtggtgaacgagaactactacaacatgataacatttcctgggatagcaattgtttggggtctggttctgacggtgttggtttacactgtcggtcacatctctggtggccatttcaatcctgctgtcaccattgcttttgcctccaccagaagattccccttgatccaggtaccagcttatgtagtagctcaactcctaggaagcatacttgcaagtggaactctgagactattatttatggggaatcatgaccagttttcaggaacagtcccaaatgggactaacctgcaggcttttgtgtttgaattcataatgacctttttcctcatgttcgtcatatgcggggttgccaccgataacagagcggttggtgagttggctgggattgcaattgggtcgacattactgctgaatgtgattattggagggccagtgacaggagcatcaatgaacccagctagaagcctaggacctgcttttgtacacggtgaatacgaaggaatatggatatatttgttggcacctgttgtgggggccatagctggagcatgggtatacaacatcgttaggtacacagacaagccattgagtgagatcaccaagagtgcttctttcctcaaaggccgtgctgcctccaaataatttatatgagcaaatggagacactcaataatttcttccttgtaatagtaattaaaaaaaaataaatatgaatgaaagaaatcactcaaagaaactacgctatgctgtttcatttccttgttttatgaaaggtcatgcacttgaatatcatctccctctttttcctctctatttggattaaaaataaatgatttttgacattgttggtggatctt

SEQ ID NO: 3844 - DNA, 1105 bp, Glycine max
tcgagtcagctacgtagccccccccccaataaaatttaaagagcaaggaacaagaaaaagagaaaaaggatgattttgactgggatagtttaagaattgaagcacaggctaaggctgggaaaagagaaaagacagataacaccatggattctttggactgggatgctgtgagatgtgcagatgtcagtgaaatcgctgagaccatcaaagaaaggggcatgaacaacaggcttgcagatcgtattaagaatttcttaaatcgattggttgaagaacatggaagcattgaccttgaatggcttagagacgttccacctgacaaagcaaaagaatacttgctcagcataagaggattgggactaaaaagtgtggaatgtgtgcggcttttaacactgcaccatcttgccttcccggtagacacaaatgtcggacgtatagcagtacgactgggatgggtccctctacagccactgcctgagtcactgcagttgcatctcctagaattgtacccagtgttggagtcaatacaaaaatatctctggcctcgactatgcaagctagatcaggaaacactatatgagctacattaccagatgattacatttggaaaggtcttctgtacaaaaagcaaaccaaattgtaatgcatgcccaatgagagcagaatgtagacactttgctagtgcatttgcaagtgcaaggtttgcactgcctggaccagagcagaagagtatagttagcacaactggaaatagtgtgattaaccagaacccatctgaaatcatcagtcagttgcacttgcctccacctgagaacacagcccaagaagatgaaattcaactaacagaagtgagcagacaattggaatcaaaatttgaaataaatatttgccaacctatcattgaagagcccagaactccagagccagaatgcttgcaagaatcacaaactgatatagaggatgctttctatgaggattcaagtgaaattccaaccatcaatcttaacatagaaagagttcactcctgaatttacaaaatttccttgccaaaaaaaaattggaaaccttcccgggggggggaaaatttctaccagctttttttttt

SEQ ID NO: 3845 - DNA, 1019 bp, Glycine max
tcgtatgatttccggcaagattacattgagattggaagattctactctgaactccatttttttcttaccgtttcggcttctccttccacgaggaaaacatagtgtctccctcctcagatctaaaatctactctctttttcccttcacacggaactgtgacgatgtcgagcgacagcgacgaagacgagcttctccagatggcgctgaaggatcaagcgcagcgagatgtcaactacggcaaatcctcctccaattcccggaagcctgtcgccaactacgttcagcagcccaagaaacccgctcctccgccgaaacagtcgctgggcaaaggcagagtcgccgccgacgacgatgattccgaaatcgagatgctcagcatctccagcggcgacgaggacaacgtccaatatccggttgctgcctccaggaacaaaggcgccacggctgccgcaggctggaagaccggtgcgcgaagacgatcgcacctgggatggcgaggagcctagtcgctggaagcacgttgacgaggctgagaggggaatcttcggaatctgagatggtagtagagaaggatgatatggaaacatgtcttagagttaaaaataaagaagaggatccatagaccataggaaactctgaaattgattgaatgatgtgatatgatatgcagataaaaagagcttatcatacatttatagcaagaaaagttacagaaaactaatagatgcagcagctgaaacagagaaccctacttattggcaatataaacactaatgtatcatccttactcttagactggttcagtaaccacaacatgatagtttcgaaaacaaagttgaagaacagttcgtgaagtattgtagtttcacttttgattgctttactactttcctagtgcttttgcgacatgtgtgttctaatacaagaccctgatgtatatggtatacttgaaatggtggaactaatgtctttgtcaattcccttctttcgaggggttctttaatgactaaaaaaaaaaa

SEQ ID NO: 3846 - DNA, 1061 bp, Glycine max
tgcctcttcaagagatttattctccgccccttggggcctttattgccaatttccgggccaatccacaggaatatgtagtttttccaacaattccaaaccattacctgcttccttcacgttaccctcgatgcagaaattatctaattcctcaagtgtagctctatatggactatcattagatgccttgtctgattcgccatcatgatttgcattatttgatagatgagagccaacccctgatctttgtgcaatattcaagtttggcaaatatcgaccatcttttagactctgctgaaactgtccagaacctgggtactgttgacgcatttcatgactccctttgtaatgaacattttctggctgctgaaaatgatcaatgttttgatttaggtcccctctaagatttccctgtgactctaaaggcctaggtgaaccatatgcattgggagactgcatcttttgtccaggttcgtgtgtccaaccatgtttctcaaccaatggatttgcatgcatcccagagccccatgcactaccaacacctgccctaactttttgttgcattctcatgttgccttgaccaaagtacccattgacacttccattataacccaccaaattattgtgaacgttttgggtcatatttatatgacctccatctgcaatctgaccagctccataagaattttgctctgcatttgcttgggaaacataatcaggtctttgcttattcaaaagctcattagaatcaaccttattttggctttcctgataaaacccaacacgattttgctggtaacctgaagaatcatcattttgataaccaccagaaaactgtaaatctgtcctttcagcagcagtgctaacagcactcaatgtactaaggcctttgggcgagcaacatcctttgcacaacttcaaaagagaactaactgtaattgatgaggctctctttgaagacatcatttgggacttaacataataaatcacaataagcgagcaactgagagacgagaggaagagtgctctgtttgcatctttgtgaggatgtgggagaatcagaa

SEQ ID NO: 3847 - DNA, 3123 bp, Glycine max
gcgcgaggcttctgctgcctttgttgtagttgaagtcgctcccctcattcttctttcgttgctacttctactgtttcttcctccgatccctcattgccgcaaatgactcctcctgctagtgttaggtgaattccctcgcttcacatgcatgatcgcaccttcaactctcttcttcttcttcttctccatggctttttttcaaggttttggcgccgtggagttcgttttgtagcatcaccgtatcatcagcttcagcttgctttcaccaaaacggctttactatttggtgtgttccatgtcacaaaaaacgaaaggagatattccttttacccactcctcgtcagggaagatctgaagcagcgctagcagcacacgtcctctaatggacgccgactcctctggagaagaagtggttattaaaacaagaaaaccatatactatcacaaagcaaagagaacgatggacagaggaggaacataacagatttctagaagccttgaagctatacgggcgagcatggcagcgcatagaagagcatataggaacaaagactgctgtacaaatcaggagtcatgctcagaaattctttacaaagttggagaaagaggcctttgtaaaaggtgttccaataggacaagctcttgatatagacatcccccctccacggccaaaaagaaaaccaagcaatccttatccccggaagaccaatgttggtgccccaacattacatagcgaagcaaagcatggaaagtctctcatttcaattgcatcttcacatggtaaacaagcactggacttggagaaagaaccacttccagagaagcataatgtcgacctaaggccaacgactgtaaaagaaaataaggacggaagctgcttaaacgtatttaccattatccaagaggcaccctgttcatctgtatcttccgccaacaagaattcaacatcaatatcagtgccactgagaaattcatgtgccctaagggagtttataccttcggtaaaagaggtaataactcgagatgaaaccaacgaatcttttgttactgatgagcttgaaaatcagaagttggagatagatgatggcaagcacacacaaaagactaatgacacttgtgaagtctctaagttggagaattctggtgcttcagaattggttcaaactgagaaaacagatggtcgtaattgtgcattaacaatagatggggtgccaggcaatcagaattacccaagacatgtccctgtgcacgttgttgatgggaaccttggaactagtactcaaaatctatccccagatatggtgtttcaagactccatatttcagccgaagggaggggttaataggcaacctaaccttgtcaccaattctgctacatcacacataagtgaatgtcaaaacaacgccgcacggtcctctattcatcaatcatttcctcctagtcctcctttcgcacaggatgattatcattcatttcttcacatgtcctccacattttcaagtcttattgtctctaccttgctgcaaaaccctgcagcccatgctgcagcgagttttgctgctacattttggccatatgcaaatgcagaaacttctgcagattctcccgtgtgcactccagattttccatcaagacaaattggctcgcctccaagtgtgacagctattgcagctgctacagtagctgctgcaactgcatggtgggctgcccatggactgcttcctttatgtggtccactccatacagcttttgcctgtcctcctgcatcagcaactacagttccatcaatgattattgatgaatcaccacaaaaaacagaacgaggagagattaaaccacaaaatcctcctctgcaagatcagataccggatccagaacactcggaagctcaacattcagctcctaagtcaccagctgtttcttcatccaaatctgaggataggggagatgccaatttagatacttcaccaaaggctactaatcatgagatgaaccaagcaatttctgagaaccccgattccaacaaaatgaagggcagaaaacctgtagaccgttcctcatgtggttccaacacaacctctagcagtgaagagactgagttactagagaaggatgagaaagaaaaggaagagcccaaaacacctgatgcgaacgttttagataccgagcttagtaatcgtcgaagtagaagcattagcaaccttactgattcttggaaggaggtctctgaagaggggcggcttgcctttcaggctctattctccagagaggtgttgccacaaagcttttcacctactcatcatttgataaataaagataatcagatagatagcatcaaggataacgagctaaacacagactacaaagatgaagaccttgaaagcaagaaatgcagttctatttgtgatggggtgcagaaaaatctgctatttgtcaaagataacaatgaggaggagggactgctaaccataggtcttggaccaggaaagctaaagactcgtcgaacagggtttaaaccttacaaaagatgttcggtagaggccaatgaaaacaggatcggaacagcctgcatccaaggtgaagaaaaaggtcccaagagattacgcttgaatggggaggcttcaacttgatgcctgatattcccatgcaaccacacaaagaaaatctctagttttgcatatatttctaagtttccttgttcattgtctgtattgcttattttctaattctgcagctcacgaaacttgtcgtgtaggtctgtgtaccatattaaattactacatacacactttttactttcttggcctgatgttactgcagttaaaaactccgctaaaatagacttagacaagaaacattaagtaccgtttgagcatttgatcatttaagtaatttatgatgcttcattcagtcaaaaaaaaaaaaaactcgagactaattctctctgctggtgccacattctgcactacgtggtatgcagatcaccctcacgactattactgttaacactattgtgctgaacgtggacacgctcgacactatggacgatatgatggagaaaatgcaagacatcgaaggagtccaaccgaagctgcttatgcttgtcttacctgtcgaagatcta

SEQ ID NO: 3848 - DNA, 3051 bp, Glycine max
  misc_feature (2953)..(2953): n is a, c, g, or t
  misc_feature (3000)..(3000): n is a, c, g, or t
  misc_feature (3024)..(3025): n is a, c, g, or t
aggaaattctagtggctgagatgcttctcactgttgaacagttggctgtgcttgcttctgttccttgtagttgaagtcgctccccctcattcttccttttctacttgccactgtttcctattcgtcattgccgcaaatgaattccgtcgcttctcatgcatgatcgcaccttcaactctcttcttcttcaccatggctttacttcaaggttttggcgctgtggagttcgttttgtagcatcaccttatcatcagcttctgcttgctttcaccacaacggcctcactatttggtgtgttccatgtcacaaaaaacgaaaggagatattccttttacccactcctcgtcagggaagatctgaagcagcgctagctagcagcacacgtcctctaatggacgccgactcctctggagaagaagtgcttattaaaacaagaaagccatatactatcacaaagcaaagagaacgatggacagaggaggaacataacagatttctagaagccttgaagctatacgggcgagcatggcagcgcatagaagagcatataggaacaaagactgctgtgcaaatcaggagtcatgctcagaaattctttacaaagttggagaaagaggcctttgtaaagggtgttccaataggacaagctcttgatatagacatcccccctccacggccaaaaagaaaaccaaacaatccttatccccggaagaccaatgttggtggtgccccaacattacatagcggagcaaggcatggaaagcctctcatttcaattgtatcttcacttggtaaacaagcattgggcttggagaaagaaccccttccagagaagcatgatgtcgacctaaggccatcaaccgtaaaagaaaataaggaccaaagctgctcaaaagtatttaccattctccaagaggcaccctgttcatctgtatcttccgccaacaagaattcaacatcaatattagtgccgctgagaaattcatgtgccctaaggaagtttataccttcggtgaaagatgtgataactcaagatgaaaccaacgactcttttgttactgatgatcttgaaaatcagaagttggagatagatgatggcaagcacactcaaaagtctaatggcacttgtaaagtctctaagtcggagaattctggtgcttcagaattggttcaaactgagaaaacagatggtcttaattgtgcattaacaattgaaggggtgcaaggcaatcagaattacccaagacatgtccctgtgcacgttgttgatgggaaccttggaactagtactcaaaatccatccccagatatggtgtttcaagactccatatttcagccgaaaggaggggttaatgggcaacctaaccttgtcaccatttctgctacatcaaacataagtgaaagtcaaaacaacactgcacggtcctctattcatcaatcatttcctccttgtcctaccttcacacaggatgattatcattcatttcttcaggtgtcctccacattttcaagtcttattgtctctaccttgctacaaaaccctgcagcccatgctgcagcaagttttgctgctacattttggccctatgcaaatgcagaaacttccgcagattctcccatgtgcactccagattttccatcaagacaaattggctcgcctccaagtgtgacagctattgcagctgctacagtagctgccgcaaccgcatggtgggctgcccatggactgcttcctttgtgtgctccgctccatacagcttttgcctgtcctcctgcatcagcgattgcagttccattaatgaatattgatgaatcaccacaaaaaacagaacaagaagagattaaaccacaaaattcttctctgcaagatcagatactggatccagaacactcagaagctcaacattcagctcctaagtccccagctgttttttcatccaaatctgaggagaggggagatgccaatttaaatacttcaccaaaggctactaatcatgagacgaatcaggtcatttctgagaaccccgattccaacaaaatgaagggcagaaaacctgtagaccgttcctcatgtggttccaacacaacctctagcagtgaagagaccgagttactactgaaggatgagaaagaaaaggaagagcccaaaacacctgatgcaaacattttagataccgagcttagtaatcgtcgtagtagaagcattaacaaccttactgattcttggaaggaggtctctgaagaggggcgtcttgcctttcaggctctattctccagagaggtgttgccacaaagcttttcacctactcatgatttgataaatgaggataatcagatagacagcatcaaggataacgaccaaaacacagactacaaagatgaagaccttgaaagcaagaaatgcagttctaattgtgatggggtgcagaaaaatctgctatttgtcaaagataacaatgaggaggagggactgctaatcataggtcttggaccaggaaagctaaagactcgtccaacagggtttaaaccttacaaaagatgttcggtagaggccaatgaaaacaggatcggaacagcctgcaaccaaggtgaagaaaaaggtcctaagagaatacgcttgaatggggaggcttcaacttgatgcttgatatatccatgcaaccacacaaagaaaatctctagttttgcatatattatttcttagtttccttgttcattgtctgtattgcttattttctaattctgcagctcacgaaacttgtcgtgtaggtgtgtgtaccatattaaattattacattacactctttttactttcttggactgatgctactgcatttgaaaactctgctaaaatggacctagacaagaaacattaagtactgttttagcattgatcatttaagtaatttaatgatccttcattcagtcaatccccccttttaatttaattgtnttgccctgtgactattcctgtttacaaatccccccagttgaaaaaanttctgtttttggcgtgtgaccccnnctattgtttgaaaaaaaaaaaaaaaa

SEQ ID NO: 3849 - DNA, 837 bp, Glycine max
cggctcgagggcgatcatggttatctatatatttcaaagggtgagaatcaaccaaaagctgttgtggagatattagatgttcagaaatcttttggcaacatatttgttcacaagggtacagtccaaaagggtgttgtagaggttggcaaagaagttgaagcagcagttgatgtgaagctgaggcagcgagctaaggttcatcatactgctactcatttactacaagctgcacttaaaaaagttattggtcaggagacctcacaagctggttcactggtggcatttgatcgtctcaggtttgatttcaacttccaccgaccacttcgtgacagtgagcttgctgaaattgaagtgctaataaatggatggattgaggatgcaacgctacttcaaaccaaagtgatgcctcttgttgatgcaaaaagtgctggggctatagcaatgtttggagaaaaatatggagaagaggtacgtgttgtagaggttcctggtgtatcgatggaactttgtggtgggactcatgtccgtaatacttctgaaattcgtggttttaaaattatctcagaacagggtattgcatctggaatcagacgtatcgaagctgtagctggggaagctttcattgaatatatcaatgcccgagacttttatctgaagcagctatgttccactctcaaagtttgtcccgtggtcagtggcttcacggtccgcctacgtttcgaacagttataattcgtcctcaggagaaccagttaatattcattttgatctacatggaccgtaattttaaaatcatattgtgctgttaatatctacttgccatgcaattactgtgat

SEQ ID NO: 3850 - DNA, 1398 bp, Glycine max
ctctgatgcattcatcaatccaaaaacacaatcaaatttccccacttgccattcttttccggtccttcacttctattctcttctctctccctcaaattcgcatctcattctgaatctcgcgccgtttcgctctcccactcgccagtgatttgattttgattttgattatatgcgagagtgttgcggaattttcgagaagtttgaatgttcgttcatgcatgagtggttctgaaagtttccttgggaattttcgattgcgatattgacactgtgatggcctcagccgtcgtgaatttcttgaacgcgacgttggattggatgacgttcgcgtcggatggtccttctgcgcgagctgtagttttcggagtccatatcggtggacatttgtttatcgaagtgtttttgctggtggtcatacttttcttgctttcacagaaaagctacaagcctcctaaaaggcctttaacaaataaggaaattgatgagttatgtgacgaatgggttccagaaccccttattccttctgttaataaagagttgcagtatgaaccaccagtgctggagagtgctgctgggccacataccataattaatggcaaagaagttgtcaattttgcttcagcaaactatcttgggtttataggtcatccaaagctacttgactcatgttcttctgctttagcgaaatacggtgttggctcttgtggtccccgtggattttatgggacaattgatgtccaccttgactgtgaagcaagaatagcaaaatttttaggaacccctgaatcaattctgtactcttatggactttccaccatgttcagtgcaattcccgctttctctaaaaaaggagatgtaattgtggcggatgagggagtccactggggaatacagaatggcctttatctttctagaagcacagtggtgtattttaagcacaatgacatggattctttaagagaaactttagagaacattactgccaaatataagaaggccaagaatttgaggcgttatattgttattgaagctgtctaccagaattctggggaaatagcacccttggacgagatcattaaattgaaggaaaaatatcgctttcgtgttttgctagatgagagcaactcattgggtgtgcttggaagttctggaagaggtctcactgaatactgtggagttccagctgagaagatagacattataactgcttctatgggacatgcattagccacagaaggaggattctgcactggaaggacaagagttatagatcaccaacgattgagcagctctggctatgtcttttctgcttctttgcccccatatcttgcccgtgctgcaattacagctattgatgtcctcggaggaaatcaccatctgataaatatgctgagaaaa

SEQ ID NO: 3851 - DNA, 1645 bp, Glycine max
  misc_feature (132)..(132): n is a, c, g, or t
tcagctacgtaggcccccccccccattgcattatgcacaagaattgaagctggtcttgagcagcagattgctcttccacgggattcctaccttcagggttatttcagtaacatatctgagtaccttagagtnggaccacccgcttcgttggcccccccccattacaactacagtttggaatccaaacacacaaaccagctatgctccattagccactgtgattcaaattctcttttaaatgagatatctagagcatcattagtgccaacatcaagctacatagccaaaccagctgcctcatggcttgatgattttcttgtatggatatcacctgaagcttttagttgctgtcgaaaattcacaaatgactcttattgtccacctgatgatcagccgccttgctgtttaccagatgaagggccatgtgggttgggtggagtgtgtaaagactgtacaacatgtttccgccactcggatttggttaatgatcgtccatctacggcacagttcagagagaagcttccctggtttcttgatgcactgccatcagctgattgtgccaagggtggtcatggagcttacaccaacagtgtagatctgaatggttatgagggtggtgtcatccaagcttctgagttccgtacttatcacacaccagttaatagacaagaatagacaaggtgactatgttaatgcaatacgagctgcaagggacttttcggcaataatttcttcgtctttaaagatggatatttttccgtactcagtgttttatatcttctttgaacaatacctggatatatggaagttagccctgatcaacattaccgtagcactaggtgctatttttgttgtctgtctgatcatcacatccagcgtgtggagttcagcaatcttattacttgttctgatcatgataattttggacctcatgggtgtaatggcaattttgggtattcaactcaatgcggtgtctgttgtaaaccttattatgtcaataggaattgctgtggagttctgtgtgcatatagtacatgcattcatggtaagcttgggggataggagccaacgagcaaagacagcattgtgtaccatgggggcttctgtattcagtggaatcacacttacaaaattagtcggagtcctcgtcctttgcttctcaacatcagaaatttttgtggtgtattacttccagatgtatctggccttggttatcattggcttcttacacggtcttgtgtttctacctgtggtattgagcttgtttggtcctccgttaagatatagtcattaaggagcagctagaagacatgccttctgcttcatcagaacagcctctaattagatgaaagttagattttaattacgctgatcacatacttaatgaacaagaaaaaatgttttgattatagaggattaatagtatcttttgacttttagattgagaaagttcattgcttatatatctgaacatggtcacggagaaactctgccagtttttagtcatttctgatgtttggaaggtttgatcatcagagttactgtgtatataatgccgagaacatttcctgatatttgaagcaaatatacctttataattattaatatacttctgtttttttttattaaaaaaaaaaaaaaaaaa

SEQ ID NO: 3852 - DNA, 806 bp, Glycine max
cccacgcgttcggttgaatccgccctctgcggagcgaaatgaaggtacatgcgttaggcgggaaagagatggattactgacacgatatatgaaggaggttcatgcaccatttcttggactatgtggagttaaaatcttggtcattgccgtatttgctgcatttaccttagcaagcattgcattatgcacaagaattgaacctggtcttgagcaacagattgctcttccacgggattcctaccttcagggttatttcagtaacatatccgagtaccttagagttggaccacccttatattttgttgtaaaggattacaactacagtttggaatccaaacacacaaaccagctatgctccattagccactgtgattcaaattctcttttaaatgagatatctagagcatcattagtgccaacatcaagctacatagccaaaccagctgcctcatggcttgatgattttcttgtatggatatcacctgaagcttttagttgctgtcgaaaattcacaaatgactcttattgtccacctgatgatcagccaccttgctgtttaccagatgaagggccatgtgggttgggtggagtgtgcaaagactgtacaacatgtttccgccactcggatttggttaatgatcgtccatctacagcacagttcagagagaagcttccctggtttcttgatgcactgccatcagctgattgtgcaaagggtggccatggagcttacaccaacagtgtagatctgaatggttatgaggggggtgtcatccaagcttctgagttccgtacttatcacacac

SEQ ID NO: 3853 - DNA, 1512 bp, Glycine max
ggctcgaggtcgagtgtagctgatattgaatttaacactgtggatggttttcaaggtagagaggtggatataatactactttctactgtaagagcagctcattcaggcattactgcttctgaaataaactcaaactctattggatttgttgctgatgtaagacgaatgaatgttgccttgacaagggccaggttatcactttggattttgggtaactctagaactttacagactaaccagaactgggctgctcttgtgaaggatgctaaagaaagaaacttgatcatgaaggctaagatgccataccattcaatgttcaaaacagataaaaataagtcttatgctgaaaattctgataatcatccgcgacgttggaagcacaagaaggttaaggatactggtcagagtgtaacaaaaattttggttcacggcaaggatattgttgagaggaaaacgaaatgtgttgcctctgaagttagggacaggaagggtaatgtggatgagaatacttcttcagctttgggaaaatatactccatgtaaagaaaggaaatctgaagatgagcatatttccattacgaaggatatgggatatgaagttgaaaaatatgaaagcagaagctcctgcggtgacatgtttacaatgtcaggtcaacaggtttgtaatgggggaagagaaggcaaggataagttgaagatcagcatgggaaagacagcattgggtaaaagacaactaaaattcgaacattcaaggaataatttagaatattctgtggaagagacaggtggtgggcataaggcatcaaaactttcagtgtcagacagacaggttatgcattctggagggaataggagcagttcttcagaaatttctgcttcctcaatgaaaggctgtcacaaagagagagatgccattgatcaaggtactgctcctaatcgaagtaaagttgatgaaatttcaaaaaggaaacagcagcgtgaagctgttgatgctattctttactcatctttgatatctgcaaagaaggatgagacattaccaaaagtttctgctaaaaggcctttttcctcatttgttgctagtgggagtactaagccgcccaagacaaaaagtgcaagacaagatcaatgagcatgggatcaaggaaggaacaatattgttctgaggactaaggctgaagtttttcatggttcttgtgatcaccatcttggcttaccttggatgaagatttttttgcttctcatcagatgatttcccatcaatgatataatggtgagtggaatttcaattcaagcggagaccagtgaaactttaaagtgatttcatgcaataagtatttgtatatatagcggaagatttgtgtaaatgaaagaaattgtttataatggtttttcttttttgggggtgaaaaaaggaacaaatggctgcattatacaacttattttctctttctttcccgatggattaatttgctgagtttctcaaatccaactgcaagtaaccaatttggtg

SEQ ID NO: 3854 - DNA, 2553 bp, Glycine max
  misc_feature (2284)..(2285): n is a, c, g, or t
  misc_feature (2288)..(2288): n is a, c, g, or t
  misc_feature (2290)..(2290): n is a, c, g, or t
  misc_feature (2292)..(2293): n is a, c, g, or t
  misc_feature (2304)..(2305): n is a, c, g, or t
  misc_feature (2307)..(2307): n is a, c, g, or t
  misc_feature (2310)..(2310): n is a, c, g, or t
  misc_feature (2313)..(2313): n is a, c, g, or t
  misc_feature (2316)..(2318): n is a, c, g, or t
  misc_feature (2323)..(2323): n is a, c, g, or t
  misc_feature (2326)..(2328): n is a, c, g, or t
  misc_feature (2332)..(2334): n is a, c, g, or t
  misc_feature (2337)..(2337): n is a, c, g, or t
  misc_feature (2343)..(2343): n is a, c, g, or t
  misc_feature (2347)..(2351): n is a, c, g, or t
  misc_feature (2354)..(2355): n is a, c, g, or t
  misc_feature (2358)..(2358): n is a, c, g, or t
  misc_feature (2364)..(2364): n is a, c, g, or t
  misc_feature (2368)..(2368): n is a, c, g, or t
  misc_feature (2376)..(2376): n is a, c, g, or t
  misc_feature (2383)..(2385): n is a, c, g, or t
  misc_feature (2402)..(2402): n is a, c, g, or t
  misc_feature (2404)..(2405): n is a, c, g, or t
  misc_feature (2418)..(2420): n is a, c, g, or t
  misc_feature (2423)..(2423): n is a, c, g, or t
  misc_feature (2430)..(2432): n is a, c, g, or t
  misc_feature (2437)..(2438): n is a, c, g, or t
  misc_feature (2446)..(2446): n is a, c, g, or t
  misc_feature (2448)..(2449): n is a, c, g, or t
  misc_feature (2455)..(2455): n is a, c, g, or t
  misc_feature (2458)..(2458): n is a, c, g, or t
  misc_feature (2460)..(2460): n is a, c, g, or t
  misc_feature (2463)..(2464): n is a, c, g, or t
  misc_feature (2466)..(2466): n is a, c, g, or t
  misc_feature (2468)..(2468): n is a, c, g, or t
  misc_feature (2471)..(2473): n is a, c, g, or t
  misc_feature (2484)..(2484): n is a, c, g, or t
  misc_feature (2490)..(2490): n is a, c, g, or t
  misc_feature (2492)..(2492): n is a, c, g, or t
  misc_feature (2500)..(2501): n is a, c, g, or t
  misc_feature (2506)..(2506): n is a, c, g, or t
  misc_feature (2508)..(2511): n is a, c, g, or t
  misc_feature (2517)..(2517): n is a, c, g, or t
  misc_feature (2520)..(2520): n is a, c, g, or t
  misc_feature (2523)..(2523): n is a, c, g, or t
  misc_feature (2530)..(2530): n is a, c, g, or t
  misc_feature (2532)..(2532): n is a, c, g, or t
  misc_feature (2535)..(2535): n is a, c, g, or t
  misc_feature (2539)..(2539): n is a, c, g, or t
  misc_feature (2547)..(2547): n is a, c, g, or t
  misc_feature (2550)..(2551): n is a, c, g, or t
atgcacccgtcggtagctcggaatgtaggaaggaggtgcattggtccattatccgttgttaatggaaatggaagtggaagtagcacttccattttccaatttccaatttccagtggagtagaacacattcattcaattgcaattttttataatttcatatatcctccaatattgctggtggttagcactcacaagagacaggctcaactaccagacaaattttccattcccggcatctcctccaaacctacgtaccccagataccctaaattcgattcatacacataacacaacacaacctcgttcctttgctgaccaactcggttgttgtttttttctttcactttcacctatggttatggcttctttgattcagttttccccaactcccctctcctctgttcccatcactacccgtttcacccggacccacaagtctcgccttcgttgctccttagatgctaatgtttccgacatgagcgttaacgcgccaaaagggttgtttcctccggaaccagaacattatcgaggaccgaagctgaaagtggcaattattggagctggacttgcaggcatgtcaactgcagtggaactcttggatcaaggacacgaggtggatatatatgagtcaaggccttttattggtggcaaagttggttcttttgttgacaaaggtgggaatcacattgaaatgggattgcatgttttctttggttgctacaacaatcttttccgattgatgaagaaggtgggtgcggataacaatctacttgtaaaggatcacactcacacttttgttaacaaagggggtcaaattggagaactagattttcgcttcccaattggggcaccaatacacgggataagggcgtttttgtccacaaatcagcttaatacttatgataaggctagaaatgctgtggctcttgcactcagtccagttgtcaaagctcttgttgatccagatggtgcactgagggacataaggaatttgggatagtaccccccccccagactggtttttatccaaaggtggcacacgcatgagtattacaaaaatgtgggatccagttgcctatgcccttgggtttattgactgtgataatatcagtgcccgctgcatgctcaccatatttgcattgtttgccacaaagaccgaggcttcccttttgcgaatgctgaagggttcaccagatgtttatctgagtggccccatccgaaagtacatcacagacagagggggcaggttccatcttaggtggggatgtagagaagtacttcatgacaaatctgctgatgggagtatttatgttacaggactttccatgtcaaaggctactgccaagaaaattgtgaaagctgatgcttatgtagctgcttgtgatgtccctggaattaagagattacttccatcaaagtggagggaacaggagtttttcaataacatatatgaactagttggagttcctgtagtcacagtgcaacttagatacaatggttgggttacagagttgcaggatctagaaaagtcaaggcgactggggaaagctgttgggttggataaccttctctatacacccgatgcagatttttcttgctttgcagaccttgcactttcatctccagaagattattacattgagggacaaggatcattgctccaatgtgttctgacgccaggagatccatacatgcccttaccaaatgacgaaattattgcaagggtagcaaaacaggttttagcgctgttcccatcatctcaaggtttggaagtcacttggtcttctgttgttaaaattggtcaatctttgtaccgtgagggacctggtaaagatccatatagacctgatcaaaagacgccagtgaagaatttctttcttgctggatcttacacaaagcaggactacatagacagcatggaaggtgcaaccttgtctggcagacaagcttcggcctatatctgtgatgcaggggaaggattagtggcattgcggaagaagctcgatgatgagtttaaagacgacttaacaatatcaaatactaaagatgaattgagcctagtatgataaatttccacgaggtggtcacgttgacatgaagctagctcgttctttttccatgcaacattttacaatgtatattcaatccaaaaataatttcagaactgattgtttcgaagcaagtagtgttgtttatagttgtaatatccggtgtctataaattgtgattcctatccagccaaaaaaaaacattaaaaaaaaatttttgcttttcaaccgataanngantnanntgtttatttgnntnatngtnggnnncttgnttnnntctnnntgnacgtanagtnnnnnttnnaanttcccncccnggggtccnttttttnnnggcgccccgggggggcncnngttttctcttttnnnggnaatttgnnntggcnnattgggtngnntccggnaantnttnngncnttnnnaatttacggantaatgnanctggggcnnagggntnnnnttattnggnccnccccttntnggnctgngcgatttnatnncg

SEQ ID NO: 3855 - DNA, 2247 bp, Glycine max
  misc_feature (2229)..(2229): n is a, c, g, or t
  misc_feature (2231)..(2231): n is a, c, g, or t
ggtacgcggctcgtgcattggtccattatctatcgttaatggaagtggaagtagcacttccattttccattttgcatttcccagtagagtaggcaaagccaaatccaaagggaacacgttcattcaattgcaattatttatattaattaataataattcacaaattgtgtgtggccagcactccaatcccctccctcaactacccgacaaattttccattcccggcatctcctcccagcctcgtaccccagataccttaaattcgcttcataacacaatttcgtttctttctttgccgaccaactcggttcttttttttttctttcaccttcacctatggccatggcttctttgattcagtgttctgcaacttccctctccgctgtccccatcactacccgtttcaccaggacccacaagtctcgccttcgctgctccttagatgctaatgtttccgacatgagcgttaacgcgccaaaagggttgtttcctccggaacctgaacattatcgaggaccaaaactgaaagtggcaattattggagctggacttgcaggcatgtcaactgcagtggaactcttggatcaaggccatgaggtggatatctatgagtcaagaccttttattggtggcaaagttggctcttttgttgacaaaggtgggaatcacattgaaatgggattgcatgttttctttggttgctacaacaatcttttccgattgttgaagaaggtgggtgcagaaaacaatctacttgtgaaggatcacactcacacttttgttaacaaagggggtcaaattggtgaactggattttcgcttcccaattggggcaccaatacacgggataagggcgtttttgaccacaaatcagcttaatacttatgataaggctagaaatgctgtggctcttgcactcagtccagttgtcagagctcttgttgatccagatggtgcactgagggacataaggaatttggatagtattagcttttcagattggtttttatccaaaggtggcacacgcatgagtattacaaaaatgtgggatccagttgcctatgcccttgggtttatcgactgtgataatatcagtgctcgctgcatgctcaccatatttgcattgtttgccacaaagaccgaggcttcccttttgcgaatgctgaagggttcaccggatgtttatctgagtggccccatccgaaagtacatcatggacagagggggcaggttccatcttaggtggggatgcagagaactgctttatgacaaatctgctgatgggagtatttatgttacaggactttccatgtcaaaggccactgccaagaaaattgtgaaagctgatgcttatgttgctgcttgtgatgtccctggaattaagagattacttccatcagagtggagggaacaggagtttttcaataatatctatgaactagttggagttcctgtagtcacagtgcaactcagatacaatggttgggttacagagttgcaggatctagaaaagtcaaggcgactggggaaagctgttgggttggataaccttctctatacacccgatgcagatttttcttgctttgcagaccttgcactttcatctccagaggattattacattgagggacaaggatcattgctccaatgtgttctgacgccaggagatccatacatgcccttaccaaatgacgaaattattgcaagggtagcaaaacaggttttggcactgttcccatcatctcaaggtttggaagtgacttggtcttctgttgttaaaattggccaatctctgtaccgtgagggtcctggtaaagatccatatagacctgatcaaaagacaccagtgaggaatttctttcttgctggctcttacacaaagcaggactacatagacagcatggaaggtgcaaccttgtctggcagacaagcttcggcctatatctgcgatgcaggggaagaattagtggcattgcggaagaagctcgacgctgagtttaaagacgacttaaaaatatcaaatactaaagatgaattgagcttagtatgataaattttcatgaggtggtcatgttgacatgaagcaatctggtttttttgcatgcaacatttttcaatgtatattcaatcgataaataattacagaatagattgtttcgaagcaagtagtgttgtttatagttcttatatccggtctctataaattgtgattcccatccagccattgacnanaaaaaaaaaaaaaaaa

SEQ ID NO: 3856 - DNA, 844 bp, Glycine max
tcgagtcagctacgtaggcccccccccccccaatccaatgtagaggacattcactcgtattaatattgttccaaactcccaagtcccaaccttctctccctgtctttgcttctgcaattactcccactctggaaatgggttcgctacccgattttgacactctcccccctctgagctcgaggatttcaacggtggttccagcaacccctcgagaagatgaaaacggtgcgtttcaactcaactacatggacctcctcgtgaagctccattacatacgacccgttttcttcttcacttccgaagccgttcaaggcctctcaatctccgacttgaagaaacctatgttcccgcttctcgacccgtattaccacgtttcgggtcgggtcagaagatccgaatccggacgcccctttgttaagtgcaacgacgccggtgttcgcatcgctgagtcgcactgcgacagaaccctcgaagaatggttccgtgaaaacggaaacggcgccgttgaagggcttgtccatgatcacgtgcttggacctgatcttgccttttctcctctcgttttcgtcaagttcacttggttcaaatgtggaggattatccgtgggattaagctgggctcacgttcttggagatgccttttctgcatttaatttcctgtccaagtggagtcaaatactagcaggtcaagctccaccaaaatctcttcatgtgtcaagtttccctgaacccaaaatctcacataattccattgttgatgaccctccagtttccattaaaaagacaaatattcttggagagtattggctcgctactaattaccacgatgtggctactcactcttt

SEQ ID NO: 3857 - DNA, 1597 bp, Glycine max
acaaccacttggccagaactgacagcactgtaccgtaagtcttattatctccgaaagctttctaagaagagagagagagagagaggaaatgggtaaggggggaatgtcaattgatgaacatggagaaggcaaagaagagaatatggctgcttggcttgttggaatgaacactctcaagattcagcctttcaagcttcctactttgggaccccatgatgtcagagttagaatgaaggctgttggtatctgtgggagtgatgttcactacctcaagacactgaggtgtgctcactttatagttaaagaaccaatggttattggtcatgagtgtgctgggatcatagaagaagttggtagtcaggtaaagagtttggtgcctggtgaccgtgtggcaattgagcctgggatcagttgttggcattgcaaccattgcaaacacggtcgatataacttatgcgatgatatgaagttttttgctactccaccagttcatggttccctggctaatcagatagtgcatcctgcagacctatgttttaagctgccagacaacgtgagcctagaggagggagcaatgtgtgaacccttaagtgttggtgttcatgcttgtagaagagctaatattggaccagaaacaaatgtgttgatcatgggagcagggcccataggacttgttacaatgctggcagctcgtgcgtttggggcacccaaaacagtcattgtggatgttgatgaccatcgtttatctgttgcaaaatctcttggtgcagatgatattattaaagtctcaacaaacattaaggatgtggctgaagaagttgtgcagatacagaaggttatgggagctggtatagatgttacctttgattgtgctggttttgacaaaaccatgtctacagcactgagtgctactcagccaggtggcaaagtttgcctagtgggaatgggacattctgaaatgactgtcccactcaccccagctgcagcaagggaagttgatgtggttggagtttttcgctatatgaacacatggcctctttgccttgagtttctaaggagtggcaaaattgatgtgaaaccccttataacgcacaggtttggattctctcaaaaggaagtggaagaagcctttgaaacaagtgctcgtggtggtaacgccatcaaggtcatgttcaatctttagatactggactgtgactttacaaactgtcgtatgttgaacaaagtaggtaatttacatgttcatgctcatgttaaataccaatgtattgataacacgggttatgaataaagtggtttcaagaaggacttgtaaaacatgtgaatggtaactgcagcatctacagattcagttatgaggtgaaactttttcttaatatgtaaatgagtaaaccctcaaatttgtctagtagtaattgagaatttcaatgcacaataacaaactgttgcttccaaagtagaagttcttttaggttctatcaacttttatccaaacatgtactaaaactttatttgtggttcttaagaaatcatgattgctggccacattagtcattttaaggaattggcatgttatttgcttaagaaaaaaaccaaa

SEQ ID NO: 3858 - DNA, 1225 bp, Glycine max
atcaactcgagtgtttggggtggaaaccgatgaaaaccgcaacacccttccctctcctctcccacataaaacccacaagccccttcttcccattgggtaccgcagaggcatggccaagaagagaaaatccatatccacaagcctcgacgaggtggatcgaaccatctactcttccttctccagtgccgccaattccctctctcacctctacactctctccatgaaccaccagaaactctccttccaagccggtgaacgccactcccttgaaaaactctatcagtgggtctggaggcaacaagagagtggatcaagagttgcaactgttgatatactcagctacattcagaatgagctggattactgtggagaggagccatgcatgtcccctagagctccactgcatcaacaacagtcacaaccggtaatgcaagtcactactggtgcaggttttccagtaactacaggattttctggccaaactattgtggggcaggaggtcagacctgagcactgtgataatcaatcaaagaattctatgttttcaaatgctttgtcaaaccctgttcgtcaaattggtgagggagggaaccacccaagtggtctttccatggggaatggaaaccagagcaccgactctgctgctttcagttccaatgattctgccatggacatgcatgcagactagtcctgtccaaggttttatctacttaatatttgtttgatcacccctctacattacctgcaaaagaagtgaataaccaatggaagggcatatctggttttgctcgttgcatcctacaacaaatagagcagtgtggaaccagttttattatcttattaaattagttaaaatgcgtatgtcatccaagtgaccgcttggatgttaaatgttctttgtaaagttttttcaaatagtttaaaggcatttaaatttgtaccttgattgtctcctcactcctctttctcaaagacaaccttttcaatgtagggattgcttctatctgaagtttcctcatgtaaatctgtccttttcgcaaaattctatatgcagcaatttacaacttcaggcatcttttgtaaaaaacgttgcttttcatgtctcgtgtcttgccctctccaaaaaaaaaaaaaaaaaaaaaaaaaaaaaaaaaaaaaaaaaaaaaaaaaaaaaaaaaaaaaaaaaaaaaaaaaaaaaaaaaaaaaaaaaaaaaaacgggggggc

SEQ ID NO: 3859 - DNA, 1056 bp, Glycine max
aggtgatctagcaaacagcatgacagaaaattcccagggaacaaccctttcaagaggagggatgattgctgggttagagccaatcaattttataactttagcaacaccacatcttggcgtgagaggaaagaagcagcttccatttctgttgggtgtcccaatcctagaaaagcttgctgcacctatagctcccttttttgttggtcagacaggtagtcagttattccttactgatggtaaacctgacaaacctcctctcctattgagaatggcttctgattctgatgatggaaagtttttatctgcacttggagcatttagatgtcgtatcatttatgctaatgtttcatatgatcatatggttgggtggcgcacatcctctataaggagggaaactgagctcagtaagaagcctcctcgccaatctttagatggatacaagcacgtggttgatgtggaatactgtcccccagttccttctgatggccctaaatttcctccaaaagcagtaaaagcaaaagaggcagcacaaaatgcgcccaatacacagaatactgtggaatatcatgaaattgtagaagatgagatgattcgaggattacagcagttgggatggaaaaaagttgatgtcagctttcactcagcattctggcctttctttgctcataacaacattcatgtgaaaaatgaatggtttcacaatgctggtgtaggagttattgctcatgtggccgaaagcttaagacagctagaagcatcatcatttttgtctgctagcttgtaactagtgtactagtatgtgattccactttgccgggaacatgcctaatgttgtctttggttcagagaataaaaatagagatgtaaattgaagagaattttttattattaaaataaggtgtaaaaggtatgggtccacatgagacccaccaaatttctttcttatttctctcctagcttcctaaactaaacaccgcctaacttatacaatgcaagatgagaaaacatttttttttatcatagtagtcattaatatacttacaatattttattatt

SEQ ID NO: 3860 - DNA, 729 bp, Glycine max
aaccccaggcttctcgggccggaattaccgcgtcgacccacgcgtccgttcactttctcgctctcttcccttccatctccacccacgcagcttcagatccactgcactgcactcgtccaatttcactcactctcacattcccaatttctccatgaaaccctaatttcagccatggttgttacatccaaaccttctccaatggcgctagatctcaaaacctccttcactctccccaaaaccctaaagctcaagacgaagcagcaagagcttctgatccgcgtcgccacgctctccctcatctacgtcctcgccttcatcacgcgcctcttcagcgtgctccgctacgagtccatgatccacgagttcgacccctacttcaactaccgcaccacgctcttcctcactcgcaacggcttcgccgagttctggaactggttcgactcggaatcatggtacccgcttggccgcatcatcggcggcaccctctaccccggactcatgctcaccgccgccgccatccactccctcctccgcttcctccgcctcttcgtccacatccgcgaggtctgcgtcctcaccgcgcccttcttcgcctccaacaccaccctcgtagcttacttcttcgcgaaggaggtctgggactccggcgccggcatcgtcgccgccgcgctcatcgcgatctgcccccgctacatctccccccccgtcggcggggtcctatgacaacga

SEQ ID NO: 3861 - DNA, 1031 bp, Glycine max
agattctcttatgtttagattgcaaaattcacatattttattagtatgaatacatgaaaactaatcaaattgagctcaaattaaataaggtgaaaaatagtacaattcacggctagaaaaatcaactgtataatggagaaaatgggagtgatgctaattactctattcctctttatagctgcaacagttgcagaagatgctgataatattggtgaagccattattcccgagaaccctaaattcaaaaagtttgtgacagattgcacatcgcatgttgctgaaagatgtagtagtggaagcgaagcattgcatggcgagggagggttggctctttgccttttcgattctatggaaaattgcttggtagagcatggagcggccaaagttaaccaacgatcattattcgtgctaccaaaaggatccacacccattgaaccaaaagattcattaccttcatttattccatcaccacccatacctcccaagtccaaatttgaatgttggtgtgaaagtttaatatcttgtgtgtgtacttggacgtccatggtgccgagtacaaggttattaaataaccaacaattaggtcaaggtttctattatttccaatatgagccactcctacaattcagaaccgtcttgagaacatgttctctggaaagtgcaaggacttgtctcaatgctcctaatgttgctacatcacctttagccgcttgtctcattccatccatgaatcaatgtgtctatcccagtggagctgaatccggtactggtagcctacctattaaggcgtaaaattatcttgtgcataaaggcaaatatactggaagtacttgcaatagtagaagaataactgagttagatcagcctattggcttccaggctagctagcttgttttatgaataaagctacatcactgaatgtcatgatccatattggcgttcctacgtacttaataaataaaaagtaataagacatgctttacttcttttttttacagaaaaaatatgatttacttctatttctcatgttt

SEQ ID NO: 3862 - DNA, 1613 bp, Glycine max
cattcaatttttatttctttcacttcacggaaacgcaaaactctcttgtcttttttcatcttcctctgttcctcagaacaattctcactaccccttataaatattcagctacgtaggccccccccccatctgggtcatcatcaactctttcttgttctctaaccaattatttaattgccttttccctgctgttgttgcaactaattgattttcatggttacaagatgaagtgtttcttcttcaaggagaagtgcaaatccgccccggaactgcacaagaagaaaacccccgccgtgaaccgcgccgcaaactccaccggctccgtgtcttcgcccaagagcgtgaaggacttgtacagagagaaagagcacagctttagagtcttcactttgcaggaactgagagatgccaccaacggcttcaataggatgctcaagcttggagaagggggtttcgggagtgtctataaaggatccattacgcaacctgatggacaaggtggtgatccaattccagttgcaatcaaaaggctcaacactcgtggcttccagggtcataaagaatggcttgctgaagttcaatttctcggcattgttaatcacccaaatttggttaaacttttgggatactgctccgtggatgcagaaagaggaatccaacggttgttagtgtacgagttcatgcccaacaggagcttggaggatcaccttttcaacaaaaacttaccaaccctgccttggaaaacaagattggagatcatgcttggtgctgctcaaggactagcttatctacatgaaggactggaaattcagatgcggacttccacccaaagctctcagattttggtctggctagagaaggaccacaaggtgatcagactcatgtatccactgcggtagttggaacacagggttatgctgcaccggagtacattgaaacgggtcacctgaaagttcagagtgacatgtggagttttggtgttgtattgtatgagatcctcacaggaagaaggtcattggaaagaaaccgtcccacagcagaacaaaagcttctagattgggtcaaacaataccctgccgacaccagcagattcgtcatcataatggacgctcgtctcagaaaccagtattctcttcctgcagctcgcaaaatagctaagttggctgatagctgcttgaagaagaatccagaagatagaccctccatgagtcagatagtggaaagcttgaagcaagcattgcaatattcagacactacttctcaggacattgctgaatcctcctcctcatctcgttctaaattggtccgaaaaaagtaaatatggagctttttttttttttgaaggacttgtgggaaatttagcattttaaggtaagttgattagatcatctatgtagtaagtatttaccaccattgaggtagttttctggtcaatcttggaagtcagttttgaggatttttcttacttgtctgtttggcctagttcaaacaaaaccaagtccttctttactttgtcagctgttggcttttaatacagtttagatgtcattgtagaaaattttcaattaacaaaattattctttacttctaaaaaaaaaaaaaaaaaagaattc

SEQ ID NO: 3863 - DNA, 1668 bp, Glycine max
gactttcacaccaccttcttcttcttcttaagggttcccttcctaggccccccccccccacttcatggaaacgtaaaactcttctctctcttcatctttctctgttcctcacaattcactaccccctacaaatatattcaaggtcccatttttctcatctgggtcatcaacttaatcatctctctcttgttctctatccaattaattgcttttccctctgagtttctctccaccttgttgttgttgcaacttgatttcatggttgcaaaatgaagtgtttcttctttaaggagaagagcaaatccgccccggaactgcacaagaagaaaacccccgccgtgaaccgcgccgcaaactccaccggctcagtgtcttcaccgaagagcgtgaaggacttgtacagagagaaagagcacagcttcagagttttcactttgcaggagctgagagatgccaccaacggtttcaataggatgctcaagcttggagaagggggtttcgggagtgtgtataaaggatccattgcgcaacttgatggccaaggtgatccaattccagttgctatcaaaaggctcaacactcgtggcttccagggtcataaagaatggcttgctgaggttcaatttctcggcattgttaatcacccaaatttggttaaacttttgggatactgctctgtggatggagaaagaggaatccaacggctgttagtgtatgagttcatgcccaacaggagcttggaggatcaccttttcaacaaaaaattgccaaccctgccttggaaaacaagattggagatcatgcttggtgctgcacaaggattagcttatctacatgagggactggaaattcaggtgatctaccgagatttcaaatcttcaaacgttctattagatgcggacttccacccaaagctctcagattttggtctggctagagaaggaccacaaggtgatcagactcatgtatccactgcggtagttggaacacagggttatgctgcaccggagtacattgaaacgggccacctgaaagttcagagtgacatgtggagttttggtgttgtattgtatgagatcctcacaggaagaaggtcattggaaagaaaccgtcccacagcagaacaaaagcttctagattgggtcaaacaataccctgccgacaccagcagattcgtcatcataatggacgctcgtctcagaaaccagtattctcttcctgcagctcgcaaaatagctaagttggctgatagctgcttgaagaagaatccagaagatagaccctccatgagtcagatagtggaaagcttgaagcaagcattgcaatattcagacactacttctcaggacattgctgaatcctcctcctcatctcgttctaaattggtccgaaaaaagtaaatatggagcttttttttttgaaggacttgtgggaaatttagcattttaaggtaagttgattagatcatctatgtagtaagtatttaccaccattgaggtagttttctggtcaatcttggaagtcagttttgaggatttttcttacttgtgtgtttggcctagttcaaacaaaaccaagtccttctttactttgtcagctgttggcttttaatacagtttagatgtcattgtagaaaattttcaattaacaaaattattctttacttct

SEQ ID NO: 3864 - DNA, 1559 bp, Glycine max
aaaaaatatatctaaaataatactcgacccggacaatagttgtgttgtgttcagttaagggtgagccttagcaacaacatgctcatcactattctgtgtggaacctgttaaatgtgctatagcttatttcaacttctccatggcttcttttctttccttatctcttcccaaattaaacttaataaaggcctcttcagcagctaacaccaatacaacaaccactcttcccacagctgagacactcaatgagaaatttggcaggaaaggcatcaagttcttggagtctgataacattcccatagttgagctaacagtgagaaatggcagctccttgaggctgaggatacctgatgctcatgtgacatcatacaaaccaaaagttaattggaaagatgatggcttccaggaggttctttacacaattcctgcaactgaaactggcccttacaaggccaaaggtggggttggtttggtcatgaatgaattgctgcaacctggagccaaagggttgctcccttccactttggagtggactgtaaatgatgttgattctgattccattgatgctctccagcttgaattaagctgcactagtagattctttgacatcacatacattgtgaccctctatcctgtgagcatggccacagcagttgtagctaagaacataggccccaagcctgccactctaaccaatgctattctaagccattttagattcaagaaaagaggtgaaacagcaattcaaggcctcagaagctgctcatatattccacacgctcctccatcttctccctttcaaatcttgaccccatcagaagctaccatatctgagcctcctagatggttgtcctttggtaatgagcctgaagccaagcccggcacgtggggtcagcaagctttgtctattaccctccttgagaataagatgagtagagtttatgctgcgcctccaaaggaaagattaaaggcattctataacacccctccctccaagtatgaaaccattgatcagggacgtgggctttgcttcagggtgataagaatgggttttgaggatatttatttatcaagccctggttccttgtcagagaaatatggaaaggactacttcatctgcactggccctgcttcaatactggtgcctgtgactgtaaatcctggtgaagaatggagaggggcacaagttattgagcatgataatttaacatgattagcttgttcaaaaatccaatgagaagtaagaaatcgagtctaaagatgtgaaaagtcataatataactattagcttctcagtaaagatgaaaaaacacgtctgagacgtggaaccaaacacgtttttacatctaaaatctttcccttctctctctctttctttctttcttcttcctgcttctcctccattttgatttttttttttaatttttttttctggagcagggtttgtattgttcttccctaaaactatgtatattttgtttatttgatttatgtccaatagtcaaatactatatcaataaaagaggttacataatgcttgctgaaaaaaaaaaaaaaaa

SEQ ID NO: 3865 - DNA, 2064 bp, Glycine max
acggtcatgttccaagagggccaacagcaacattatttcccattggttgatgagtgcaaagagtgcacctaaagtgtgcagagtgtggcacctaacaacccagatggacatgctttagaatatcatcagtttgatttacatcaggactatgatcatggcttgtatactggttttaatggtacaggttattgtgaggaggatgcgattcctcatatatctagctacctaccaagtatctgccctcctccttctgctttcttaggcccaaaatgtgcactttgggactgtccaaggcctgcgcaagggttggactggtgccaagactattgcagtagctttcatgctgccctagctttgaatgaagggccaccaggcatggcccctgttctacgacctgggggcattgggttgaaggataatttactttttgctgctcttagtgcaaaggcacaaggaaaggatgttggcatcccagaatgtgagggagctgcaactgcaaagtctccatggaacgcacctgaattcggcacgaggatggaacgcacctgagctctttgatctgtctgttcttgagggcgagactattagggagtggctcttcttcgataagcctcgaagagcatttgagagtggaaacagaaagcaaaggtcattgccagattatagtggacgtggttggcatgaatccagaaagcaagtgatgaatgaatttggagggctgaagaggtcctattatatggatccacagccactgaaccattttgagtggcacctttatgagtatgagattagcaagtgtgatgcatgtgccttgtaccgattggaactgaagctagttgatggtaagaagaactccaagacaaaggcagcaaatgattcagttgctgatctgcagaagcagatgggaaggctctctgctgagtttccacatgacaacaaaagggctgccaaaggcagagccaaaattaatgccaaagttggcataggtggtgtctatccagcttcacacagagtgactccactgaatggaacatacgagtatgggttagctgcaccatatgactatcttgtcgacaacatgggtgactactatgggacatgatctgcaagatgctctgcattcaacttggctatacactattttgtgctggttttctattttgcccgtctcaatgctcttttttttccctccttttttcaagttacaagaaatcaaggtcattttttgccttgtcaagatattttgtgaatagctcattctcactggagtgcagcattaagaagctgctggatgctgaattctaactgcaaaatttggtgtatagtatatgatgagcaatttggtgaatgctagaatctcattagcatcacctgaattgacctatcgtttaggctaaaaagttgctgtgattcagctgactctaatttccaaatcatgctaatgtaagttgattacagtattttatggtattagctgctggacataccttcgaaggtacattatattggctcagtaataaaattggtttagttcccgtttgaaaaaaaaaaaaaaaaaactcgagactagttctctccctcgtgccgaattcggcacgaggatttatttatcaagccctggttccttgtcagagaaatatggaaaggactacttcatctgcactggccctgcttcaatactggtgcctgtgactgttaatcctggggaagaatggagaggtgcacaagttattgagcatgataatttgacatgattagcttgttcaagaattcattgagaagtaagaaatcgcgtctaagatgtgaaagctataatatgactattagctgctcagtaaagatgaaaaaccacgctaaacataaaaaatctttcccttctttctttctttcttccctcctgcttcttctccattttgatttttttttttagttttttttcttggagcaggatttgtattgttcttccctaaaactatgtatattttgttaatttgatttatgtccaatagtcaaatactatatcaataaaagaggttacataatgcttgcatatttttcctttcc

SEQ ID NO: 3866 - DNA, 1862 bp, Glycine max
tcgagtcagctacgtaggcccccccccccccagtgattcctcctgaaccatcaagtgaggagactctctaatgggtgcagctggaaagaaagattgccatgacactgtggtatcacagtgcagagatgaaaacgttgaacatgaatatgtttttccttcctcaaatgaagaagcaacttctaatgtagatgtagctttgtcgtctatgggtgaggaacaatctgtaaagataacacaaactgatgatgtttcaaaggaatctgagaccaatgactcacctattgtcagaggaaacaaagattcggtcattgcaaatggatcaatcagtgttgagtcttctgccatggctgaacttcaagttcctagttctataccctgctcgagtgatctggataatgctgtaccagctcccaagaaggttggaatgaatggtttcttacaaagtgatagtggaaaggagctggagcatcctataatcccaaattcacgtactttagtggttgttccaaaacatcagcttactaatgatgatgtaagggcagttcatgatgttaatgacctaacaaagggagaagaaagagtgaaaatttcatgggtgaataacactactaatgatttcccaccaccctgtcactacataccccgaaaccttgtgttccgagaggcttatgttaatatttctctatctcgtattgggaatgaggattgttgttcaacttgtatgggcaattgtgtattgtcatctaaatcatgttcttgtacaaataaaactgggggtgaatttgcttacactgcaaaaggcctactaaaggaagagttcttggatgagtgtattgccctcaaccgtgatcctcaaaattatttctattgcaaagcctgtcctcttgaaagatcaaagaatgatgattgtttagaaccatgtaaaggacatttaaagagaaagtttattaaagagtgctggagcaaatgcggctgtgggaaacattgtggtaatcgggttgtccagcgtggaataacttgcaagttgcaggtgtttttgacttcagacagaaaagggtggggtcttcgtaccttagaagatcttcaaaaaggcgcatttgtatgtgagtttgttggggaaattttaaccatcaaggagttgcatgagaggcgcttgaaatatcccaaaaatgggaaatatacatacccaattttattggatgcagattggggttcaggaattgtgaaggatagagaagctctttgcttatatgcggcatcgtatggaaatgctgctagatttattaatcacagatgtttggatgcaaacttgattgagatcccagttgaagttgagggcccaactcatcactactatcattttgccttcttcacatccagaaaaatagcagcacaggaagagctcacttgggattatggcatcaactttgatgaccatgatgatcatcctgttgagctgttccagtgcagatgtggcagtaaattctgtaggaatattaagcgatcaaatagatccatgagatcgtcaagttcatgatggtcattctctgctaaaccaattttgtggtctgatgcatgccatcgatcaatagtaactagtttcaacctactgagttggtctcttttgtattgtatctttcattattttgcttggaggttagatacaagttactattgacagtcttctaaaaactacaaggcagtcatgggacagaataagaaagaaaataacctctaggtgttaataactccgaacagttctgtcaaatgcctgtggatgattttgcctgagtttatgttgtgctgaatgcatgacacattaatggttaagaaaacttattcaaaaaaaaaaaaaaaaaact

SEQ ID NO: 3867 - DNA, 2255 bp, Glycine max
gaaagaagtagacggctttgtagttttctaacacttgcaaggtccagcagctgtttgacaacaattgccactgtcccctcctctcctcctctcctccgtgtttcttaggtcaaatccaaccaagcgcccttgtctccacctctctttcctcgttccctccgaccgatttttaattacgattgcttcctcctcctgttcctgcattttcaacttccatcactctctcacaggtctcagattcttcattcttcacacaacacagatttctctttgatgggttccatctcgcacgtgatcaccacaactcttcctcacctaccgtctacacgctccctcggattcccaatctcccactccaattcgcgtcttctctcactgccacccaccagagtcgccaagaaagttggtgtctttgccgagcatagcagcagaagtagcaccgcttccgccgcctccgtagatttcagcgaccctgattggaaaatcaagttccaggaagatcgtcagctacgtaggccccccccccatctcaccgacattttcccaaatgctcctccgattccgtccacgttttgtctcaaaatgagaactccgattgatagagactttcctggccattattctttggatgaggagtggcatggatatattaataacaatgacagagtgcttcttaagacaatatactattcatcacctacatctgctggtgctgagtgcattgatcctgattgtacttgggtggaacaatgggttcatcgagctgggcctcgtgaaaagatatactataagccagaagaagtaaaggcagcaattgttacttgtggagggctctgccctggtcttaatgatgtcatcagacagcagattgtaatcacccttgaaatatatggtgtaaaaaacatcgtggggattccttttggttatcggggattttctgacaaagaattgacagaagtgccgttgtctagaaaagtagtgcagaatattcatctttctggtggaagcctgttgggagtttcacgaggaggacctggagtcagtgatattgtggacagtctggagaaaagagggatcaacatgctttttgtattgggtggaaatggcacacatgctggtgccaatgcaattcaccatgagtgccgcaaaagacgcctgaaggtatctgtaattggtgtgcccaaaactatagacaatgatattttattgatggacaaaacttttgggtttgatactgctgttgaagaagcacaaagagcaataaactctgcctacattgaggcacatagtgcatatcatggaattggggttgtgaaattgatgggccgtagcagtggattcatagcaatgcaagcatccctgtctagtggacaggttgacatatgcctgattcctgaggtacctttcaatttacatggacctcatggagtattgagtcatctcaagtaccttttagaaacgaagggatcagctgtagtctgtgtggcagagggagctggacagaatttactccaaaagactaatgctacagatgcatcaggaaatgttgtatttggagatattggtgtatatattcaacaagagaccaaaaaatatttcaaggagattggtgttcatgctgatgtgaaatatattgatccaacttatatgatccgtgcaattcgagcaaatgcatcagatggaattctatgcactgtacttggacaaaatgctgttcatggtgcgtttgcaggatatagtggcattacagtaggtttatgtaacacccactatgtttactttcccatccccgaagtgatatcccatcctaggttggtggaccccaacagtcgaatgtggcatcgttgcttaacttcaacaggtcaacccgatttcatctgataatttaccctttttccaataaattcaagaggcttggaaattcaggttaccaaaaagcatatatcataggaagaaagcttcaaactatgtctggccaatttgttgaacaggtatatgtgaaaataatattaaggatgacatttcctccttatttgaaaaattggttatttgtatagcatggcagtttcaagtcctgtcaattgcattcatattatactttagaggaatcaccaagcactacgtgcttcattttgatcgatttgtaagttgtaacattatttaaccgatgttaggggtcaaatggcccaaatttaatgagtaaattagcagatgaactgttgtgtttgaaaaaaaaaaaaaaaaaaacgcgtccg

SEQ ID NO: 3868 - DNA, 2057 bp, Glycine max
gccttctgtttctccaaatcgctccttctgcaattttcttctcttccttcagcatcttcttccaaaattatgagttttttttatcgttcatctcataggtttttgtaggccgaagatgaagagctttgtatattctgacacctcttgtatgagatggatctttcattaaaggtttcatctttgagcacagaaagcaactctctgagtcctacactaccagggttccgattccttacattcgttatttcaatttctttgatttaatttaaattctattcgaataacgatttattcctagcctaatattgcaattctttgcacatctaattggtatgtcaaagaatctatcgttaggccatatgaaatttatttttaacatgtatgtgtataatgatatgtgtacgtgttgtctatctttagctccgagtatcctttttcttgatagggtttttcggtgacaagatagataaaattcttttaattttttattaaattatttattatatatttttataatgctataatttgatctaggttttctagataaatatatgggtattgaatatatgatgttgaatgatgtgaaatcagacggattcccactgatattatttgtatatgattacacaaccagctactactgacaacatcatgttcatgctctttgttttgtagattcttagtgttttaagtttcatctgctgtgtagatatgttttaaaatagttttttaatgttaacaatggccggtgatgctagaaaatatttgctactcttgatggcaatcgcccatttgatgagtctcttccacccagctctctgaggcttctttttcaatttttgatatattatttttggcatggtttcacttttatgattatgtaagctacgtaggccccccccctatagaatgcttcactatctggtctatgtggattttcagttcccatttgactcgttcccttgaagcgaaattatttgtgttgcttttttcttatcactcttgcaaccttttcattgttgctttgggagaacaaagaagcagctaaattcttttttacaagagtagatttttttctatcataatttttggattttttttttcaagaaacatacaaaaataaaattatatacccaaatgtaactcacctaattttaaaaaacatacaactttattgtgcataatgtaaatttgggttggggatccaaatttttaccgtgttttcaattttttttcaaaaaccttttgagattttgggtccccaacccgaattctcaacagcttacggcgaagcattcgttcggtgttttcaacagggagaggtgacgccgacgtcgatgtagatgatggatgaggcctgtgctggggacgttgacgcggatgctcatgacctggaagcagaggaagagatcctgggcctcgaggccgtagattgcgtcgattttctggggagtacagtccttatggccagcctgtgctcgttcaattttaaaaaaatcacgtcaataataaaagcccgttgtgaatcctggtcacttgaattttccttttttttataaaaaaaaaacagactaaatccagatcttttcacgatgtactgtaaaattgtatttttttaaatagtgatgagttgtatagttgggtatgtaaatgtatgtaatcattatttttggacccttttgaatatcatgaaatacagtttgtattgttaagttaatttttaagctttattatattacaatcgcgtcttatctttgacatgtcgttcccttgaagctaaatttggtgtgtttcttttgttttgtgacactcttgcagccttatttctttgatgctttaggagaacagatgattaactaaattttttcaaggattatttattttcttgataaaaaaagtccttatgtttttcagttggcatggcttgagtctctgcagacagggtgatgtttagtgtaagttcttaaagtaatggactcttgtcttttgttatcggatctttagattatactgcacaattatagatgaaaaatttgaataaaataacttgttttggt

SEQ ID NO: 3869 - DNA, 1155 bp, Glycine max
tctgcacaatataattttttaaaagcaaaaataaccacgcgctcacacgcgcaccttccactctgagaagcgagtatttctccctcttcaatgttctccctcctccgatgactttcaccatacaaccaacgaagaacacactctcacatattattagcttttagctctctctctctctctctcagtccttcttcttcgcccagccaacatgagctcaatcgttcagggtttcaccaagtcgctggccatgaccattctctctgagatcggcgacaaaactttttttgcagctgcgatactggctatgcgacacccaagacgcctagtcttatcaggttgcttatcggctttgattgtgatgaccattctctctgttcttgttggctgggctgctccaaatctgatctctcgtacatggactcatcacattacaacatttttattcttgggatttggactttggtccttaaaagacgctatatttgaagaaggggatgcggaagaattggctgaagttgaagctaaattggataaagattggaaggctagcaatggagctacaaaaaatagcaataaggatgatgatgccacaaaaaagcataaacggtcatttttatctcagtttttttctcctatctttttacaggcattttctatcaccttttttggtgaatggggtgacaagagccagttggctaccataggtttggctgcagatgagaacccatttggtgtggttcttggagggattctgggacaagcattgtgcactgctgctgctgttgttggaggaaagagtttagcttctcagatatctgaaaaaattgttgcactctcaggtggaattcttttcattgtttttggaattcagtcattcctctctccagttgaatcatgaaggctgtgcttttggttagtgattattcttctgcgtttttttacaagacatgtttagcaaatatgtttgttattatggttggagttggttgctaaaaaagctcagcttcatgcctaatcctccctgggtcatagatttcattatttcgacccttttgtagttcaaaataaatttaccattgtagaatgatagccaaattcaatataaatagtcaacatgagtggattgttctgtttagatgaaaaaaaaaaaaaaaa

SEQ ID NO: 3870 - DNA, 2648 bp, Glycine max
gttgcttcctctttccttttctccgctcttgtgatgacagcgacttaatctgtgagggaccgagattccgccataaatgctttcttctcattctcgctcctcactccatcttctcgttccgttcagcatcgctcatttctctccgacgaggttgttcatatgtgatcaactgttgaaagatgtttgactgtggtcccaagtcagaatacatgggtggccagcgggaaaattttttgaggttggaggccttggattctacactatcttcatcttctgatgccggagttataaaatctggatttagtattgataaattaagccatggtcatggaaacagcacaacttctaggtctttcaaaaggggaatgagaaggggatctgaaggactgaaatcaattgggcgatcgcttgggttgggagtatctagggctgtgttcccagaagatcttaaagtgtcagaaaagaagatatttgatcctcaagacaagtttctgctcttatggaataaactttttgttatctcatgcattttggccgtctctatagatccactatttttttatctcccagtcattaatgattcatttcattgtcttggcatagaccgaaagttggcaacaatagttacaaccttaaggacattggttgatgctttctatcttctacacatggctctccaatttcgtactgcttatattgctccatcttctcgtgtctttgggcgtggtgagcttgtgatagattcagcacagatagccaagcgatacttgcagcggtatttcatcattgatttcctatccgtgttgccgataccacagattgtggtttggagatttcttcagaggtcaaaaggttcagatgtactagcaacaaagcaggccttgttgttcattatcttgcttcagtatgttccaagatttctccgaatggtaccattgacttcagagcttaagagaacagccggtgtctttgctgaaactgcatgggcaggggctgcatattatttgctgctatacatgcttgccagtcatatagttggtgccttttggtacttgttagctattgaacgcaatgactcatgctggcagaaggcttgcagtgacattaggtgcaatgaaaatttcctatattgtgggaaccagcacatggaaggttatagtgcttggaataaaacaagtgaagatattcagtcaaggtgctctgcagatggtgatcctgcgcattttgattatggaattttcgggcaagtcttgtcttctggcatcatttcatctaagaagttcatctccaaatactgttactgtttatggtgggggctccagaatttgagtacacttggccagggacttcaaactagcacctatcctggggaggttatcttttcaatagcactagctataagtggcctcatcctttttgcccttctgattggcaacatgcagacatatcttcagtctctcaccattaggcttgaggaaatgagagtcaaaaggcgtgattcagaacagtggatgcaccatcgcttactcccacaagatcttagagagcgtgtgagacggtatgaccaatataagtggctggcaacgcgtggtgtagatgaagaaaatttagttcagagtctaccaaaggatcttcggagagatattaagcgtcatctctgtttggccttagtgaggagggttccactatttgagagtatggatgagagattgcttgatgctatatgtgagagattgaaaccgtgtttatttacggagaatacttacattgttcgggaaggagatcctgttgatgagatgctgttcatcatacgtggtcgccttgagagtgttaccacagatggtgggaggagtggatttttcaaccgcggttttctaaaagaggctgacttctgtggggaggagcttttaacctgggccctggatcccaaatctggttctaatctcccatcttctactagaacagttaaggcattaatggaggttgaggcttttgccttaactgctgatgagttaaaatttgttgctagtcagtttaggcgccttcacagtagacaggttcaacacactttccgtttttactcccaacaatggaggacctgggctgcatgctttattcaagcagcatggcgtcggtattccaaaaagaaaattatgaagcttcgtcaaaaggaagatgagtcagacggagctcatgaaaatgttggtggcagttcctacagctttggtgctgccttgttagcctcaaagtttgctgcgcacaccctacgtggtgtacatcgcaatcgacttgccaagactgccagggagttagtgaaactacagaaaccccctgagcctgacttctctgcagatgatgctaactaaaaattttcatgtataactactctcttaaaatacttgttttcgttgactattatgattgaatttgtgaagaaaggtcgaaagcaaagtattacacaattatcctggttacagttgtgagggtttcaagacttgtaatgactcttgatctgtttccttgtaaataatagtaatcagccattttggctgtctgctaccgagcatgtaaacttatgtactattctcaattaatgaagttatagttactggttggcagaatcaaaaactgtcttatttgccatccac

SEQ ID NO: 3871 - DNA, 1336 bp, Glycine max
tcagctacgtaggcccccccccaaattcattaccttttccactttgatatcatcctggcttctatttcttgtaggagtgctattttcagctttcttctcatctgcatctttctttctgtttacaatatcaaagtgtgtgaggcacaagccaagcctcccacagcgaaggggctatcatataacttctacgacaaaagctgtcctaagcttaaatctatcgttagatcagagctcaaaaaggtcttcaacaaggacattgctcaagctgctggcttgcttcgccttcacttccatgactgctttgttcagggttgtgatgggtcagtgttattggatggatcagcaagtgggccgggtgagaaagaagcaccaccaaacttgactttgagacctgaggcctttaagataatcgaaaaccttcgtggtcttttagagaagagctgtggaagagtggtctcctgctccgacatcactgccctcactgcacgagatgctgttttcctttcaggaggaccagactatgagattcctttgggaaggagagacgggctaacctttgccacaagacaagtgacattggacaaccttccaccaccttcaagcaacgcctcaaccatcctaagctccctcgccaccaaaaacctcgacccaaccgatgtcgtagccctctcaggtggccacaccataggcatcagccactgcggttccttcaccaacaggctctaccccacccaagaccccgtcatggacaagaccttcggcaacaacctcagacgcacgtgccccgccgccaacaccgacaacaccaccgttcttgacatccgatcccccaacaccttcgacaacaagtactacgttgacctcatgaaccgccagggcctcttcacctccgaccaagacctttacactaatacgaggactaagggcattgtcaccgactttgccgttaaccagagcctcttctttgacaagtttgtgttcgctatgctcaagatgggtcagcttaatgtgctcacggggaatcaaggggagattcgtgccaattgctccgttagaaatgccaataacaagtccctcttgacttctgtggtgcaagacgtggtcgaaactttgatagaaatgtaatgtacgtaactgggtcgatagtgtatgtgtgttgtatatgttgtggtcatgaataattgataagcccttgtttcttgttcctagaggtcttttttggtgataaggaaccattgtgtaatggccctagctagttgtacttctgcagtaatggaaaaatatgaatgagagcttctcatttgcaactaaaaaaaaaaaaaaaaaagaaaaaaaa

SEQ ID NO: 3872 - DNA, 1025 bp, Glycine max
aggatcttcggagagatattaagcgtcatctctgtttggccttagtgaggagggttccactatttgagagtatggatgagagattgcttgatgccatatgtgagagactgaaaccgtgtttatttacagagaatacttacattgttcgggaaggagatccagttgatgagatgttgttcatcatacgtggtcgccttgagagtgttaccacagatggtgggaggagtgatttttcaaccgcggttttctaaaagaggctgaactctgtggggaggagcttttaacctgggccccggatcctaaaactggttctaatcttccatcttctactagaacagttaaggcattaatggaggttgaggcttttgccttaactgctgatgagttaaaatttgttgctagtcagtttaggcgccttcacagtagacaggttcaacacactttccgtttttactcccaacaatggaggacctgggctgcatgctttattcaagcagcatggcgtcggtattcaaaaaagaaaattatgaagcttcgtcaaaaggaagatgagtcagacggaactcatgaaaatgttggtggcagttcctacagctttggtgctgccttgttagcctcaaagtttgctgcgcacactctacgtggtgtacatcgcaatcgacttgccaagactgccagggagttagtgaaactacagaaaccccctgagcctgacttctctgcggatgatgctgactaaaatttccatgtgttctcttaaaatgcttgttttggttgactatgatgattgaatttgtgaagaaaggtcgaaagcaatgtattatacaattatcctggttacagttgtaagggtttcaagacttgtaatgactcttcatctgtgtccttgtaaattatagtattatacattaagccaacttggctgtgggccaccgagcatgtaaacttatgtactattctcaagtttattattgaagttatataattactggttgacagaataaaaaagaaaaaaaaaaggaagg

SEQ ID NO: 3873 - DNA, 1034 bp, Glycine max
tcacctgcctaggccccccccccgaagacgagacagtagctgaattgcacacacgagtcatgagaaagcgggatttggccattctcatgctctccgctttcgctattttcttcactcttcagcaagatggcggtatttcgttcaaagacgcatggatgcacctaactgatgaatatccaatcaaatatgaagccgaacgccttccgccgccgctcgtcgctgatctcaacggagacggcaaaaaggaagtacttgtggctacacacgacgctaaaattcaggttttggagccccatagtagacgtgtcgatgaaggattcagtgaggcgcgtgtgttggctgaggtgtctttgttgcctgacaaagtacgtgtgatgactgggagacgccctgttgctatggcaaccggctatattgaccgctataaaattgggcagccgcagaaacaggttttggttgtggtaacatcgggttggtccgtgatgtgttttgattccaacctccaaaagttgtgggaaaataatttacaggaggattttccacataatgctcaccatagggaagttgcaatctctataagcaattatactctaaagcatggagatacaggattaataattgtcggtggcaggatggaaatgcagccacatatttttatggatccttttgaagaaatggggatgggtgcaaggtttgccgagcaacatcgaagaagtgctgctgaaaaggaggcttctgaaaactccggaactgtggatttacgacattttgcattttatgcatttgctggtcgatctggtgttgaacgatggagcagaaaaaatgagaacattgaagtgcattcttcagatgcatcacagttacttccgcaacataactacaagcttgatgttcatgctctgaatacccgccaacctggagagtatgaatgcagggaattcagagaatcaatcctgggagttatgcctcaccaatgggctaggagagaagatactttattgaagcttgcccacttcaggcggcacaagaggaaa

SEQ ID NO: 3874 - DNA, 2069 bp, Glycine max
aatttgggggagcgcatttctttccccaacaaaagaaaatggatgctccaagagaattccatattgatcacacggttacaaatgctgcttcttatcagaaatggcaacggtcagaacgagtgcaagaaattgtcttgtgggcctggccaaccccttattagatttcccttccaactggtgaaggggatcaaagatgaatgtgctaatcccgggttttgtttatattgtactgataaaaaggaaaccatggttgtgctctctacaatagaattccgtgtctacaccatacactacgaatctaacttctttatgttgacggacccggaaaattgccttccgaacaagtttctacaaatcgacaatttttttctacagcataaccaacttgaattaggattatttggagatgaaagaacaaacaacttgagcttctttaactgttcttcagttgggcttagacacctcagaaaacaggtttatggttctgacttttctaatcaacaagatatgatctcctgtccgattttcgtttctgaatcttacgacagcgtcctcggtttggatctaacatcctgtaccaagatgttcgacaccacttcgccagttacggcataccgcctgcagtcgaatattttgattatgagatggtccataccaaattgtacaaagtgcgaagcaactcgcgagagatgtaaatggaagaacatcagcaacacagaagcagacattgaatgtgttgactgcaaacggaaaagaatccatgttccccaatcttttatcttcgctactacaggctcaattcttttggggctggtggccattgttgtctttaagatagcactctattttagacagaaagaagacgaccaagcaagagtggccaagtttttagaggattacagggcagaaaagcctgcaagatttacctatgctgatttgaaaagaatcaccggtggctttaaagaaaagttaggggaaggagctcacggggctgtattcagaggaaaactttcaaatgagattctagtggctgtgaagatcctcaataatacagagggagaagggaaggagttcattaatgaagtgggaatcatgggaaaaattcatcacatcaacgtggttcgtttgcttggcttctgtgcagaaggatttcatcgtgctcttgtctacaatttgtttccaaacggatccttacaacgatttatagttccaccggacgacaaggaccatttccttggctgggagaagctgcaacagattgctcttggtatagctaaaggaattgagtatcttcatgaaggttgtaatcaacccattattcattttgacatcaatcctcacaatgttctacttgatgacaacttcactccaaaaatttctgattttggcttagccaaattgtgttccaagaatcctagtttggtgtccatgacagctgcaagaggaaccttgggatacattgcacctgaagttttctccaaaaactttgggaatgtgtcttataagtctgatatttacagttatggaatgttattgttagaaatggttggaggaagaaagaatgtagccatgtcttctgctcaagatttccatgttttgtatccagattggatccataacctgattgatggagatgtacatatccatgttgaggatgaatgtgatattaaaattgcaaagaaattagcaattgttggactttggtgcattcagtggcagccagtgaatcgtccatctataaaatctgtcatacaaatgctagagactggaggggaaagccagttaaatgtgcctcctaatccattccaatcaaccacttcaactattacaggtggacacactagagttacaagacgacctttggagttagaagttattcaagaatgatttctagtgggcgcaccttaatagtttaatttgtagaaaagtaatagatgtatgtattttatgtaatatcattaaatccaaccatagtgtttaagggtactttttctactaagaaggaaagttttggtgtgtttgaattaactatatgaaaataaattaaactattcaacaattattatttt

SEQ ID NO: 3875 - DNA, 2150 bp, Glycine max
atttcagctacgtaggccccccccccatgctaatttcaactcaacttaactaccgatgaacttaaatattcagtgtttctaactggcacgaaaagaaaacaaagcacacgttgctgagatgacagagcttcctagtgtgctgcccctccaaataatgttaatccttctccttatcaaaagtggcagcagcaacaatgagtgtggggaatggtcttgcggctctggccaaccacctatcagatttcccttcaaactcatcaagggaattaaagatgaatgtggttatccggggttttgtctatattgtactcaaaaacatgagactatgcttgctctctcctccgtaaaactccaagtcagttacataaactacgaaaatcatgaaattgtgttgaatgacccggaaaattgccttccgcacaagtttctgcaaatcaacgattctcttattcatccttacaaatttgacgatgaagctaaaacaagtaagttgagcttcttcaactgttcttcagttgagcatcaacacctgagaaactaccagcagtcactgtcagactcacaagacatgatctcctgtccgatttatgtttctgatcttgatgacagtgtgctcagtttggacctaacatcctgtaccaaaatgttcgatatcgttacgccagtttcggcatacgggatgcagcgaaattcgttggatttaagatggtccgaagcaaattgtagtcagtgcaaagcaaaaggcaagaaatgtaaatggaagaacaacagaggtgacatcgaatgtttcgactgcaaggacaagcgaaaaactattcatgttcccaaatcttttatttactctgcaccaggttcgattcttttggggttcgtggttattgtcgtttttaagatcatataccattttagacagaaacaagaggaccaagcaagggtggagaagttcttagaggaatacagggcagaaaagcctgcaagatttacttatgctgatgtgaaaagaatcactggtggttttaaagagaagctaggggaaggagctcatggggctgtattcagaggaaaactttcaaatgagattctggtggctgtgaaaatcctcaataatacagtcggcccacgcgtccggttcatcaatgaagtggaaattatgggcaaaatccaccacatcaatgtggttcgtttgcttggctattgtgctgaaggaatccatcgtgctctggtctacaatttctttccaaatggttcacttcaaagcttcatatttccaccagatgacaagcagaatttccttggctgggagaagctgcagaacattgctcttggtatagctaaagggattgggtatcttcaccaaggttgtaaccatcccattattcactttgacatcaatcctcacaatgtgttacttgatgacaacttcactccaaaaatttctgattttggcttagcaaaattgtgttccaagaatcctagtttggtgtccatgacagctgctaggggaaccttgggatacattgcacctgaagttttctccagaaactttgggaatgtgtcttataagtctgatatttatagttacggaatgttgttgttagaaatggttggaggaaggaagaatgtagacacgtcttctccagaagatttccatgtgttgtacccagattggatgcatgacctagttcatggagatgtacatatccatgttgaggatgaaggtgatgttaaaattgcaagaaaactagcaattgttggactttggtgcattcagtggcagccattgaaccggccatccataaaatctgtcatacaaatgttggaaagtaaagaggaagacctattaactgttcctcctaatccatttcactcatccacttccactattcctagtggattcacttcggcaagactacctttggaattggaagtaattcaagaatgagaaattagcttattgatttatttacaacgggagatgatcagtgtttacacatattttgttttctcctcaaggaaatattgttgtgtttgaatcaaatgtatgaaaataaagtaaattattattataattaatcaattattcttttatatatatatatatatatgtatatatgttgttttatatttggataaatcccgtttaatatttg

SEQ ID NO: 3876 - DNA, 2021 bp, Glycine max
gacctgcagcatgagacatcggatgatttgttatttaatgtgaactatagtttttttttttgctgattaatattaatatagcttacgcgccttttattaggtttggatggcgtttgagcccattcgtatccttttatattatctgattttggtcacaattagcttacgtgccttttattagttcttcagcgttattgttttggtcttccgaacgtttctcctcaatattgagttatttagatcattcaaactcgacttttattcaaatatatttgttgatgataaattgataatcaacatttgaaatgtaacttttcttgtatgtttcatgtgtgcatcaacaatatctcagtcaacacttcaaaacataaagaccattatagccctcaacaaaaaaggtcaaaataaggggattagaactaaaaaaatagtcagatacaagtactggagaaataaatttacaataacaatatttataatgtgaaaaatcaaaaaagttgtctggtgttttgaaactctagcgtgtgaatattggaagccagtatctctttaagaactgccagtaccggaatctgaacatctcaagtgctccacaaattcatcatataaaatctgatgagccttgatgtcatgccatgtgtctatggtttcaactaccaacttcagcaaattactaaatttaacctaatcattgcttgagtaactgtgtgtaaatcatttccaaataatgtcacccagaaatttgagagctggaacacctcttatctcaacatctatgagtggtgcctggatcatcaataagctggagagttctggatcgttctgaactatatcaagagcacgcatttgatcctttcttttcatagcacaaaacttgcaatcagatgtagatggtggaagaatctggttgacaataagtctcttcacaggaacattttccttcttcagggaagcactcaatctagatgactcactaattgccatcaccgtggggattgtaacaatgacaaattcggtcgaatcagtatcacgaaagagttcgcgcacttttatcatcctctctctgagtttctccaatttgtcagcagcattctgtcgggtttcttcttgcccaaacacggatttaattgctgaggtagcagaagctattttttgtcttagcttcagtatctttccaatggatgcatccaagaaatcgggtaaggacaataatcgtaatgtgtgacccgtaggtgctgtatcaaatactattcgagtaaacatgctatattcctgtgattcaagaaattgcataaccttggagatcgcaatagcttcatccagtccaggaggaggagaatccagtaattctcccagttttagttctcccaactggtctgcaatcattccaagacccatgccatccatgaagtctttgactccagttccaccatttttctgggcggcatttcgaaactcttccctagacttctcagggtttatttcaagagcaaaaagaggataatcaggtccttctactggcaccaatgcaccccctgtcaaatcctgagcaaaagaatcactcaaagaatgcgctggatcggtggaaaccacgagagtagggtgtccattattggcaaatttaacagcaagtgaagcagcacagcttgtcttccctactccccctttcccacctagcatgtaatacttcctcttagtcccagaaaccatctcatcaaaccccgatgcagcttctgtagtaccagcaattgatctcacttgaaaagacttagtgggggatttagtggaagcagaaaaggaaagaaaggtgacagctttggggagacgaagaagcagaggaggatttggtgcgaaggagaggacacccttgatggccatggagttcgttatgtgaagaaaagatgaaagaacagagccacatgccatttccgtactcctcctgctactcactttgcctttcgttttggtttactctatctctgtctctttcactcttcaccgctgcaaggtttttcttttca

SEQ ID NO: 3877 - DNA, 842 bp, Glycine max
tccggaattaccgggtcgacccacgccggcccgagcaaaccacccaatggaacactcgttttggtcactcccatgagacatgatcgcatccacctccaccaacgttggacctcaccctctgcgttttctgtccaaaccaaccacacattccgctacgaggtttctgtctctcagactccactctcggggcagcgctgttgcactttcctcgtccacacggaccacacccttgaagcccacgtgtcacttcaacggcaaagatggaagctttgagcagcacgaggaagagggtgagcgtgaggtgcattgtgaggttcaagtgatatcgtggagggaacgcagagttaacgcccaaattacggttgatgctgacactgagtccgtttggaatgctctcactgattatgagcatctcgctgatttcatcccaaatcttgtatggagtgggagaattccttgtccttacccaggaaggatatggttagaacaaaggggattccaaagggcaatgtattggcatatagaagcccgcgttgtgttggatcttcaagaagtcgtcaattcagcatgggatcgagaacttcacttttccatggttgatggggactttaagaagtttgatggcaaatggtctgtaaaatctggaacaaggtcatcaactgctattttatcttatgaagttaatgtgataccaagattcaatttcccagctatttttttggaaaggattaccagacccgctctccctctgaaccttcgagctctggcttacagagctgaaaagaactttgtgggatatcagaaaacttcagtgtcagaaaaccacttgcacataacttatg

SEQ ID NO: 3878 - DNA, 1721 bp, Glycine max
tcgagtcagctacgtaggtcccccgctacgtaggccccccccccttttttggaaaggattatcagatccgatcttcctgtgaaccttcgagctttggcatacagagctgaaaggaactttgtgggatatcagaaacttccagtgtcagaaaaccacttgcgcaaaacttatgcggccattaacgggtcatctgttaaaaagataaatggtgcttcgtctgaaagttttaaaaagataaatggtgctttgtgtggaagtgataagttgcctcctgcagagaacaaaaaagaaattgccacctcagtttctggttccatgctcacatcttccagtgaggtgagaagcaactggggtgtatttggaaaagtttgcaggcttgacagacctcggatggtggatgaagttcatctccgcagatttgatggacttctggaaaatggaggtgttcatcgctgtgttgttgcaagcataacagttaaagctcctgttcgtgaagtatggaatattctaactgcctacgagactcttcccgagatagttccaaatttagcaatcagtaaggtggtatcacgagataacagtaaagttcgcattcttcaggaagggtgtaagggtcttctttatatggtgcttcatgctcgtgtagtgctggacttgtgtgaatatttagaacaggagatcagttttgaacaagttgaaggggacttcgattcattccggggaaaatggatttttgagcaactaggaaatcatcacacactgctaaagtactctgtggagtcaaaaatgcgcaaagatactttcctttccgaagccataatggaggaggtcatttatgaagatctcccatcaaacttgtctgcaataagagactatattgagaacatgaatgcatcaaaatcttctgaagtttgtgagcagaatacgaattcagggcaacaaattgtttcatcaggctctcaaaaagatgacaactctggttcaactgaggaagttcctcattgcgacgttcgatgttcatctcagcaaagatctaaagtgccaggcttacagaggaatattaaagtactagaatctgaactactgaaattcattgcagaacatggacaggaaggatttatgccaatgaggaagcaactccgtttgcatggaagagtggatattgagaaggctataactcgcatgggtggattcagaaagattgcaaccatattgaacctttctttggcttacaaacaccgcaaacctaagggttactgggacaatcttgaaaatttgcaggaagagataagtcggtttcaaaggagctggggcatagacccttcatttatgcccagtagaaagtcatttgaacgtgcagggcgatatgatattgcacgtgcactggaaaagtggggtggactacacgaggtttctcgccttctgtcgctcaaggtaagacaacggagcagacaggacaaccttgctaaggataagaggagtgatcatacagatagtgaaatgaagacaccatgtattcctcaagacacacaaaagtggcttacaaaactaaaacagtttgacatgaattggtttgagtaaaagaggattgattttatattgtgtatacccgtgttagtgtggttatagttcagttcaatgattctccaccaggccattcagtattcaaaaaaaaaaaaaaaaaaaaaaaaaaaaaaaaaaaaaaaaaaaaaaagaaaaaa

SEQ ID NO: 3879 - DNA, 2462 bp, Glycine max
  misc_feature (1)..(1): n is a, c, g, or t
ngggaaacacccccccacccttttaaggggggttatttttggaaaaataaagggggtttcgccgatttccgccctttgtggaaaaaaaaagggggtttttacaaaaaattttgccggggtttttcacaaaattttaccgggttacaattttccatttccccttaagggggggccaaatttttgggaagggggatatgggggggggctttttcttatttttcccaacaggggaaaaggggagattttttccaaggcgtttaaattggggaacccacagggtttttcccgtccggcgtttgtaaaacggccggcccaggaattgtaatacggctccactttggggggaaatgggttccgggcccccccttggagttaggctagcagcatgccccccccccccccccagaaagaatggcttatttcggcctttcggttaacatggtggcctttatgttttatgtgatgcatagaccttttacaagttcatccaacgcagtcaacaatttcttaggaatatcacaagcttcctccgtgctcggtggttttctagccgatgcatatcttggacgctactggaccatagccatcttcactacaatctatcttgcgggtttaacaggaataacactatgtgcaacaataagcaagtttgtaccgaaccaagaagagtgtgaccaattttctctactattgggaaactgtgaggcagcaaaaccgtggcagatgacatacctctacacggctctatacatcacagcgtttggagctgcagggataaggccatgcgtgtcttcttttggagcagaccagtttgatgagagaagcaaaaactacaaggcacaccttgacagattcttcaacatcttctatctgtcagtgaccataggtgcaattgtggccttcacagtggtggtgtacgtgcagatgaaatttggatggggatctgcatttgggtcactggcaattgcaatgggaatatctaacatggtcttcttcataggcactccattgtacaggcacaggttgccaggaggtagccctcttactcgtgttgctcaagtcttggttgctgcatttagaaagagaaatgcctcttttggtagcagtgagttcataggcttgtatgaggttcctggcagacagtctgctatcaagggaagtagaaagatttctcacactgatgatttcaggtttcttgacaaggcagctctgcaattgaaagaagatggtgctaatccgagtccttggagactgtgtactgtgactcaagtagaagaagtgaagatccttatgaaacttatccccataccagcttgcacaatcatgctgaacgtggtcttaacagagtttctcactctctcagtccagcaggcttacactctcaacacccacttgggtcgcttgaaactcccagttacatgcatgcctgtattcccaggcctcagtgttttcctcatactttctctctactactccatttttgtccccgtctttcgacgcatcacgggccatccccacggtgcatctcagcttcagagggtaggaattgggttggcagtgtctattctatcagtggcatgggctgcaatatttgaaaggtacagaagaaactatgcaataaaacatgggtatttggctagtttcctcacagcaatgcccaacctaagtgcatattggttgttgatccaatactgcctcataggtgtggctgaagtattttgcattgtggggttattggaattcctatatgaggaagcccctgatgccatgaagagcatagggtctgcttatgctgcactagctggtggcttgggttgttttgtggccaccatcataaacaacatcatcaaatctgccactggcaacttagacaaaggccaaccatcttggctgtctcaaaacatcaacactggcaggtttgattacttctactggcttctcacagctttgagcatcatcaacttcgccatcttcgtatattcggcgcatagatacaagtacagggaacaccaagttcatgagatggagaaacatgaaatgacatatgttgggagctcctagctagctacataggaactcaactcataccaacacaaagtgctgtctttgttccattgaataacttgtaatagtcttcttgaatggtaaaaaattaccgtcaagattttcaatattaagtcgtcatagggattgaaaacgcaaactagctagggagtattctgcataagacaatggatttggtggtgatggacgattaaacacttacatgtaagcaaagatgaaaacaagataattgcataaatgtttttcttttatgaagatttatgcaagttagttgaaaatagtttaaatcagtcatctgaaaaatatataaagtggtttttcttttactaaaaaaaaaaaaaaaaaaaaaaaaaaaaaaaaaaaatttgtactaataagcatttccctatttatttttt

SEQ ID NO: 3880 - DNA, 778 bp, Glycine max
gggagaccaattaccataatcgttgattttcgcattcataattcgagcggtctaatgttttacggaagaagttaataaaattatggaaagaccttgaaaaaagcagatcattatagcagccacacaaagacactacatttccatagattgtaatccagttgaagcctttgatttcttcttctttttggatccatttttgttcacttttttcttgggttgttcctctactacaagttgtttgctctgtatatattgatgaatggcagacaggggatctgctcgaaagttagggtcgttgagaacagcagaaattcgatctctttcagtcaatactaatatctgcctggatttacacttaagtttgccgtcattctcacaaactggtttctttgatgacttcacctcgggaagggactctaaaagtgaagatagattatatgccttcaatttgttctgccgcctttgttgtttgctctttttctttttcttagtaatagacttttgggtactcaaggaggtaacagcatctttcaccttggaataaaattggaccttcttttcgaacttgcgatcgaactttgaatctaaccttttcttgcccattgcagcaaaatctgagaggagggaggaacagatccggcggtgtcgtttcgattagggatagagatagtgtttcttaacggctaacaacagggattccactaccgtgctgcgctttgaggactgagttgttctctgcaaccaaattgagggatcccttctgtcgtcttctcgcagc

SEQ ID NO: 3881 - DNA, 812 bp, Glycine max
  misc_feature (13)..(13): n is a, c, g, or t
  misc_feature (807)..(807): n is a, c, g, or t
cagtcacctattncaataaatactgcttttttttttttttttttgaccaattaccatagttatttgcattcataattcgagtaatctaatgttttacagaagtagtaaaattattgaaagaccttcaaaaaaagttgatcattatagcagccacacaagacactacatttccatagattgtagcccagttgaagcctttgatttcttcttcctggatccatttttgttcacttttttcttgggttgttcctctactaccggttgtttcttctgtatatattgatgaatggcagacaggggatctgcttgaaagttaggatcattgagaacagcagaaattcgatctctttcagtcaatactagcatctgcctggatttacacgtaagtttgctgtcattcgcacaacctggtttctttgatgccttcacctcaggaagggactctaaaagtgaagatagattatatgccttcaatttcttctgccgcctttgttgtttgctctttttctttttcttagtaatagacttttgggcactcaaggaggtaacagcatctttcaccttggaataaaattggaccttcttttcgaatttgcgatcggactttgaatctaactttttcttgcccattgcagcaaaatctgagaggaggaacagatcccacggtgtcgttttggttagggttttgtgtcactctctcgatggatattagatataatgtttcttaatgtgtgttctgcgctttgaggagtgagtgatatcaacaactctcgggggggggcctacgtccctcgctcgaggggcccnccggt

SEQ ID NO: 3882 - DNA, 1127 bp, Glycine max
gcaacaagttggtctgcgataaagacggccgtcccgcccgcccgcggctttcttttctcttcttattcgttagggcactcaacattttacactcttttcttcttctcgttgttgcttcggtgttgaatcatggatcagaaagtcgatttcagtgctccgcattccatgggaaccactatcatcggcgttacttacaacggcggtgtcgttctcggagccgactctcgaaccagcactggagtgtatgttgccaaccgagcatcggacaaaatcacacagctcactgataatgtttacgtgtgtcgctctggatcggctgctgattctcagattgtctctgactatgtgcgctacttccttcaccaacacacgatacaacttggacaacctgcgacagttaaagttgctgcaaaccttgtccggcttctcgcatataacaataagaatttcttacagaccgggttaattgttggtggttgggataaatatgaaggtggacaaatttatggagttcctctgggtggaacaatagtacagcaaccttttgctatcggaggatctgggtccagttacttgtatggtttctttgaccaagcctggaaagagggaatgaccaaggatgaagccgaggatttagtaaaaaaggcagtttcactggctattgctcgtgatggtgcaagtggtggggtggtgcgaacagtcataataaactcagagggagtgaccaggaatttctaccctggcgaccaacttccattatggcatgaggaaatggaggcccacaactctctgctagacattcttggtgtcccagagccgatgagcatgtgaagtgaagaagtttctgtgttcataatcgtttccggatagattatatcttgtcacctctccttcatgaactagttaacgatttgtggagtcgattacattgtttggttggatattgtttctggtcaggttatccttgtgttatgtaccatgtttaacctttgtttcatcatatagctccaaagtaacatgtaaactttggtgaattggtgttgatacaaagcaattatcaaatcattttaaattcttatttttggtaaaaaaaaaaaaaaaaaaaaaagaaaaaaaaaaaccaccac

SEQ ID NO: 3883 - DNA, 1127 bp, Glycine max
tcgacccacgcgtccactgttgcagctgcgtgcccccacacaggggagagcgagacctgctttctttttccatcttttgcgttagggcactcaacattttacactcttttcttcttctcgttgttgcttcgctgttgaatcatggatcagaaggtcgatttcagcgctccccattccatgggaaccactatcatcggcgttacttacaacggcggtgtcgttctcggagccgactctcgaaccagcaccggagtgtatgttgccaaccgagcatcggacaaaatcactcagctcactgataatgtatacgtgtgtcgctctggatcggctgctgattctcagattgtctctgattatgtgcgttacttcctccatcaacacacaatacaacttggacaacctgcaacagttaaagttgctgcaaaccttgtccgacttctctcatataacaataagaatttcttagagaccgggttaattgttggtggatgggataaatatgaaggtggacaaatttatggagttcctctgggtggaacaatagtacaacaaccttttgctatcggaggatctggctccagttacttgtatggtttctttgaccaagcctggaaagagggaatgaccaaggatgaagctgaggatttagtaaaaaaggctgtttcactggctattgctcgtgatggtgcaagtggtggggttgtccgaacagtcataataaactcagagggagtgaccaggaatttctaccctggcgaccaacttccattatggcacgaggaaatggagccccacaactccttgctagacattcttggtgccccagagccgatgagcatgtgatgtgaagaagttgccgtgtttcagaaatgtttcctgatagattatatcttgtcttctctcttttatgaactagctaacgatttgtgtagtcaattactttgtttggttggatatttttgatggttgagttatatccttttgttacgtaccatgattaacctttgtttccttcatcatatagctccaaagtaacgtgtactttggtgaattggtcttgcatagaaagcaattatcacaattcattttaaaaaagtttttgttcgtggtgcggccgctctagagga

SEQ ID NO: 3884 - DNA, 810 bp, Glycine max
  misc_feature (628)..(628): n is a, c, g, or t
  misc_feature (692)..(692): n is a, c, g, or t
  misc_feature (715)..(715): n is a, c, g, or t
aagggttttaggaggaaacaagagaaacagagtgttagtgaggaactgttctgttccgaagtgattcattccactgctatgaagtttcttcaatctctcattgctcaatcccgttatgcagcgcgtgccgggtcactgaatcgggtctcggggctccgattcttctccgtttccacggaagagtattccaagagaaactatgcaaacaacgttgccgagtacaacactgttttgggttctctcactgcacaaagaaggaatttcttgctgagggatgtgtacgatgatatgatgcttgatggggtaaagcctacgcgtgacactttccattcccttgttgttggaaccatgaaaggagctagaatgcaagatgctttctacttcgcggaccaaatgaaaatcatgggtttgcttcctgatgttactttatacaactttctgatttcgacttgtgggaaatgcaagaactcgaataaggctattcagattttggaagagatgaaatgattggaagtaaagccaaatatacaaacatacatctgcctgctaaatgcttgtgctgctgatggacgcatagaccgagtgtatgcaattgttcgtgatatgactgcagctggtctgggataanacgagttctgctatgctgggcttatagttgcacacaagaataaaaaacctcttcctgatgattntgctgcaaaagtattgagtttgnggagagacaaagatgtggtcttcagttgaaccaacagtgccaagctgagaatgtgatgatgggtgtactgaggaggagtatccacttaccacagc

SEQ ID NO: 3885 - DNA, 1164 bp, Glycine max
tcaattcttgacttgaaaccctgtttcagctcaatctttagttcctggcgacctctttccatcaatgacctttcagattctgtaggaagtaatggaccaaatcccatcatgtcatgcccttccgcgctagattgatctaaagaaatatccatttgtaaatcatcttcatcatctgacattgttgcaccagttccttctcccaaactcactccagtgagagcttgtaaggcattttcgatatcacggcaggccatgacagcctcgacggcgtggactctgacatgttgctgaagctgttctttaaatgtacacaaaactatcaaatattgtgccaggaagttgtcaagttcttggcggtgatgaggggagagagaaagagtgttgtgtgagacataagagcgtagaagatggtgagactgagataattgagcatcaatgagtggaagctgatcgatgggagtcgccacacggaggcatgccacgtgtgctgccagaagctgctcgtacagcggatgagtcgctatctccgccttcagctgacggtgctgatcgccggagacctcacccatcattcccaagcctgcttcttgcatctcttcctttcttttcctcaaaggcaaagggaaaggaggattgggttgaataatatagggtaaagaggaaaggaaaaggcaaaaaaaaagagtgaggctttaggttgaggttgaggaccactctattcggtaatagctaggtgtagtagtaatatgtaaaatgatgatattgagagagagagagagagagagaagcacggtgcacactgtacacagcacacagttgtatcgttttcggtgtatatagggatctgagacacaactttctgcaccacctctgataaaaacaaagattttacatacacacagaaagagggagaagcaaaggcattaaacacgatttcattgattgattgatttgtgtgctgcgctgtgctggtgaatattgagaaagagagagagagagatgaagaagcaaagtaaggggcatgtatgtatgtatgtattcaagttttgttttgttttgagagagaaaagagaaagagaaagagagacagagaaaagagtaagctgcggaatcattactatgggggggggggggggcctgcgcagctgaagaagataaagctgc

SEQ ID NO: 3886 - DNA, 1269 bp, Glycine max
ctcgagccgaatcggctcgagacggctgcgagaagacgattttccttggacaaaaggaaaggaagaaatgcaagaaccaagcttgggattgatgggtgaggtctccggcgatcaccaccgtcagctgaaggcggagataacgactcatccgctgtacgagcagcttctggcagcacacgtggcatgcctccgtgtggccaccccgatcgaccagcttccactcatcgatgctcagttatctcagtctcaccatcttctacgctcttatgtctcacacaacactcattctctctcccctcatcaccgccaagaacttgacaacttcctggcacaatatttgatagttctgtgtactttcaaagaacagcttcagcaacatgtaagagtccacgccgtcgaggctgtcatggcctgccgtgatatcgaaaatgccttacaagctctaactggagtgagtttgggagaaggaactggtgcaacaatgtcagatgatgaagatgatttacaaatggatatttctttagatcaatctagcgcggaagggcatgacatgatgggatttggtccattacttcctacagaatctgaaaggtcattgatggaaagagttcgccaggaactaaagattgagctgaaacagggtttcaagtcaagaattgaagatgtcagggaagaaatattaaggaaacgtagagctgggaaattaccaggtgacacaacttctgtgttaaagaactggtggcagcaacatgcaaagtggccttacccaactgaagatgacaaggcaaaacttgtggaggagacagggttgcagctgaagcaaattaataattggttcatcaaccaaaggaaacgcaactggcacagtaactctcaatcggttacctctttgaagtcgaagcgcaagaggtagacatattattttgtccctaactatgtggaacagctagcaagcaacacaactatatataaggacatgcttaatattgctgatagagtgtagtcccactaaggatgcaaaagatggtagatgcatgtgggttactgtaatattgtaagatagctgaaacaaattatagactggctgtaaatttgtggaatttaacgtatgcaaacttttcttttaggtgtggttaagttgcctctctttttaactatctttgtaaattgtttgctacttttctgaccggtgggagaattattactattcctactactacacagatgattgaaagattctcggttctttatatatatgctctttggtcc

SEQ ID NO: 3887 - DNA, 916 bp, Glycine max
atctaagatggagaaaataatggcttagcaaatttgtgctatttcccccctctaatttctgctttttgtggtgataggaaagtgattgctgaatatggggaggaagtggttaagctaggaggaaggatactcaaaatgatgtcaataaaccttggcttgaaagaagatttccttctcaatgcatttgggggagagagtgaggttggtgcatgcctaagggtgaatttctacccaaagtgccctcaacctgacctcacttttggactctcccctcactcagaccctggtggcatgaccattcttctctctgatgattttgtgtctggccttcaagtaagaagaggagatgaatgggtcatagttaagcctgtcccaaatgcattcgtcatcaacattggtgaccaaattcaggtgctgagcaatgcaatatacaagagtgtagagcacagggtgattgtgaactcaaacaaagatcgtgtgtccttggcattgttctataatccgagaagtgatttactcattcaacctgccaaggagcttgtgacagaggagaggccagccttgtactcaccaatgacctatgatgaatacagactttacattaggctaaatggaccttgtggaaaggcccaagttgaatcactggctttccaaccatgacttaataatgtcaattaataacgtgtttggtttcacaatgtaattttctatgtttcatgtgtaattttaagttgatagttataacttatatttcccacataattttgtacttcttaagagttttcaaacatgttattacctttcctttaaaagtattgatgtttaaagtcaatgtatagatattaagaaataactatttaataatacccttaacttattatttgacaaaaaaaaaaaaaaaaaaaaaaaaaaaaaa

SEQ ID NO: 3888 - DNA, 1016 bp, Glycine max
gtaactgcgtgcactatctcatttctttctattcatttcttcattccaccatcaccatggtcaaggagaagaagaacgtggtggtcaagaacaagaagccaaacaacaatgccgacgagcttcacttccgcggcgtccggaagcgaccatggggccgctacgccgccgagatccgtgaccccggcaagaagacccgcgtctggctcggcaccttcgacaccgccgaggacgccgcccgcgcctatgacgccgccgcccgcaacttccgcggccccaaagccaaaaccaacttccccgtgccccccgacgacaacaacaacaacaacgttaacgtgaacaaaaacaagagtgttaacgttaaatctcacagtcccagccagagcagcaccgtggagtccgccaccccggagcgtgaagccacgcgccgctccacctccgccgcaatcgaccgtttcccgttcctacccatccagcagcaaatcctcatgacccaccccgtcgcagcacccatgcgcccggttttctttctcgaccgggcccacttcatgacccagtctttcccgctccggttcgaacccggtccggtccagagcgactccgactcctcctccgtcgtcgtcgattgtcagcccaaaagagagctcaatctcgatcttaacttggctccgcctaatgaatattaacccttttttttatctctttattttttcataaaaaaagatagcagaaagaaaggactaaggagattttttttctctctttttttttttggaagattaatcttccattaagaagttaattagtacatcctttgatgtaaataggttgattttctcttcttttttgttttttaggtccttgatagtattatcagaggacatgatctgaaattgtctagatctgatataatttttcatgtaacatctgaatatctgatgtaattctggctaatatcaattaatcttcttttattacaataaaaaaaaaaaaaaaaaaaaactcgagctagttctctc

SEQ ID NO: 3889 - DNA, 1030 bp, Glycine max
ccgggctcgacgtaactgcgtgcactctctctctctctacaacaagaattcatctattcatttcagcccatcagcatggcgaaggagaagaaaaacttgtccaacaagaacaagaagccaagcaatgcagacgaggttcacttccgcggagtccggaagcgcccctggggccgctatgccgccgagatccgcgaccctggaaagaagacccgcgtctggctcggcaccttcgacaccgccgaggatgccgcccgcgcctacgacgtcgccgcccgaaacttccgtggccccaaagccaaaaccaacttccccttcctccccgacaacaacaccaacgttaacctcaacaagaagaacaacaacgttaacgttaaatctgacagtcccagccagagcagcaccgtggagtcctccaccccggagcgtgaattcacgcgccgcgccgcccccgccgcaatggatcgctttccgttcctacccatccagcagcaaatcctcgtgacccaccccgtcgcacccatgcgcccggtttactttctcgaccgggcccacttcatgacccagcccttcccactccgattcgaaccgggtccggtccagagcgactccgactcgtcctccgtcgtcgtcgattgccagcccaaaagagagctcaatctcgatcttaacttggctccacctaatgaatattaacctttttttttaatcttttaatttttcataaaaaagacagcagaaagaaaggaaaggactaaggagatttttttttctctttttttttttttggaagattaatcttccattaaattgtcgtgtagattagataagatgttgttaattacatcctttgatgtaaataggttaatttttctgtttttttaggtccttgatagtattaacaaaggacatgatctgaaattgtctagatctggtataattttcatgtaacatcggaatatctgatgtaattctggctaatgttaattttctcttattacaataaaatctgctaaacaaaagacctcgtgcc

SEQ ID NO: 3890 - DNA, 1579 bp, Glycine max
gggaaagctcgggtcagctacgtaggcccccccccccaatgtcaggtacgagctctaccctttctaccgcgtcactgcttcccctccttcatcttcaccttcaccgccaacacttcttcctcctccaacttcaccaatttccccaggaagcagtgggatctcagctggaacgattgttgcaattgtggttccaattacggtcgctgtgcttatatttatagtcggaatttgtttcttgagtagaagagcaaggaagaagcagcagggttctgtaaaggaaggaaaaactgcgtatgacatccccaccgtggactccttgcaattcgatttcagcacaattgaagcggccacaaacaagttctctgccgataacaagttgggggaaggtggatttggtgaggtttacaagggcactctttcaagtggacaagtagtagctgtcaagagactctccaaaagctctggacaaggtggagaagaatttaagaatgaagtggtggtggttgccaagcttcaacatagaaatttagtcaggcttcttgggttttgcttgcaaggagaagagaagatacttgtttatgaatatgtgcccaacaaaagtctcgactatattctctttgatcctgaaaagcaaagggagttggattgggggagacgttacaagattattggagggattgctcgaggcattcaataccttcatgaagattctaggcttagaattatacatcgtgatcttaaagctagtaacatattgttggatggagatatgaatccgaaaatctcagattttggcatggcaagaatatttggagtcgatcaaactcaaggaaacaccagcagaatagtagggacttatggttacatggctccagagtatgccatgcatggagagttctctgttaagtctgacgtgtacagttttggagtcctgctcatggagattttaagtggcaagaagaatagctctttctatcaaacggatggtgctgaggatctattgagctatgcttggcaactttggaaggatggaacacctttggaactgatggaccccatattaagagaatcctataatcagaatgaagtcatcagaagcatccatattggtttgttgtgtgtccaagaagatccagctgacagacccacaatggcaacaatagttcttatgctagacagtaacactgttactctaccaactcctacgcagcctgcatttttcgtccacagtggaactgatccaaacatgccaaaggagctgccattcgatcaatcaataccaatgtctgtgaatgacatgtcgattagcgaaatggatcctcgataagcttgatcgcttggaggttctaatatgtattattatccatgtacttatttctcctagttttaaatgacgaaaccttggaacactttgtattatagttgcttatttttcaactaaataaaatatatgtattatgcaggtaaaaaaaaaaaaaaattttatgcaagacaattattgttttctccccgacgaatgtgagttcctgaaatgtatcgaacatagtaaagacttgttgagttaaaaaaaaaaaaaaaa

SEQ ID NO: 3891 - DNA, 1931 bp, Glycine max
gtcctttccggctttccccggtcgaccccgctctcacctcaacacagcagaagcagcaatgaagaagaagatgatggcaagcacggccatctccctcgtcttcgccgcgctcttcctcttctcctccgtccactctttctacctccctggtgtcgctcctcgcgatttccaaattggtgaccccctctttgtcaaagtgaacaagttatcatctaccaagactcaacttccatatgactactacttcttgaagtattgcaaacccaaaacgatattgaacaatgcagaaaatttgggagaggttcttagaggtgatcgtattgagaattcagtatatacatttcatatgaggaaggaacagtcttgtactgttgtttgtcatgaaactttggatgctgaatctgcaaagagttttaaagaaaaaattgatgatgaatatcgagtgaacatgattttggataaccttccagttgctgttcgtagacaaaggagggatggaggtcaatcaacaacatatgaacatggttttcgtgttgggttcaaaggaaactatcaagggagcaaggaggagaagtattttattaataaccacttgagtttcagagtcatgtatcacaaggatcctgaaactggttctgctcgtattgttggatttgaggtcaccccaaacagtataaatcatgaatacaaggagtggaatgacaagaatccacaggtaacaacatgcaataaagataccaagaatttgatgcaaggtagtactgtcccacaagaagttgatacaagcaaggatattgtattcacatatgatgtttccttcacggaaagtgatatcaaatgggcatcacggtgggacacatatcttttaatgaatgatgatcagatccactggttctccatcattaactctctgatgattgttcttttcctgtctggaatggtggcaatgatcatgatgagaactcttttcagagacattgccaattataatcagctagaaacccaagatgaggcccaagaagaaacagggtggaaacttgttcatggagatgttttcaggccaccagtcaattcaaatttgctttgtgtttatgtcggtactggtgttcagatctttgcaatgacacttgtgacaatgatatttgctttgctagggtttttgtctccatctaatcgtggaggtctcatgactgctatggttctgttgtgggtttttatgggcttatttgctggctactcctcagcacgtttgtacaagatgttcaagggcacagaatggaaaaggaacaccttgaaaactgcatttatgttcccaggcattctttttgctgtcttctttgtgctgaatgctttaatctggggggagcagtcctccggggcagtcccttttggaacaatgtttgctctagtctgcttatggtttggtatatcagtacccttggtctttgttggcagttacttgggttttaaaaagccagcaattgaagacccagtgaagactaataaaattcctaggcaggtacctgagcaggcgtggtatatgaaacctgtcttctcaattcttattggaggcattcttccatttggggcagtgttcatcgagctcttctttatcctgacatcaatatggctgaaccagttctattacatctttggcttccttttcatagtgtttgtgatcctattaatcacctgtgccgagattaccattgtgctttgctacttccaattgtgcagtgaggattacaattggtggtggagatcttatctcactgctgggtcctctgcgttgtaacctcttcctctactcaattttctacttctttaccaagatggacattaccaagctgccatcgtggcatcctttacttctcaattcatgatcaatgatccatatggccctaatggggttagcggaaaatcgcccttcc

SEQ ID NO: 3892 - DNA, 702 bp, Glycine max
gcttatcttaattgcttgaaactagaggccagatacaaaattaccctctagctttctgctgtattgcatattttcttgttttgaatttgaattttgatgcaacaggtttggtatcttcctatcttctgtaaatctgtatattttccccctaacataatattttggcctttttttcgtcgcaattgttgatcgagtctgactcatggcggagattgaactgaaaactgcacctgctgattttcgttttcctacaacaaatcaaaccagacattgtttcactcgctacatagagtttcatagatgcttggcagcaaagggtgaaaactcaggtgaatgtgagagatttgctaaatattaccgctccctttgcccgggtgaatgggttgaaaggtggaatgaacagagggagaatgggacttttccaggacctctttgaaatcatgtggcacttggatatccttccgaggcatgagaagtctttaacattctattctcttcagttgttgagtaattgtgaataaggcagtttgtggatattcattacttcacaaatggttgaagccattttgattttaaagttgatttaattgttctgtggaaaaaaaaaaaaaaaaaacaattgttctgtggatacgcatctgagttacggaactaaaaggaaaaagtaagcgaaggaacctttaaaagagtaaaaaaaaaaaa

SEQ ID NO: 3893 - DNA, 637 bp, Glycine max
ggctcgaggttctagatcgcgagcggccgcccttttccggtgtttttctttcgtcccatttgttgatcgagtctgactcatggcggagattgaactgaaaactgcacctgctgattttcgttttcctacaacaaatcaaaccagacattgtttcactcgctacatagagtttcacagatgcttggcagcaaagggtgaaaactctggtgaatgtgagagatttgctaaatattaccgctccctttgcccgggtgaatgggttgaaaggtggaatgaacagagggagagtgggacttttccaggacctctttgaaatcatgtggcacttggatatccttctgaggcatgagaagtcttgaacattctgttggctcattttcttcagttgttgagcaattgtgaataaggcagtttgtggatattcattacttcacaaatggttgaagccattttgcttttgaagttgatataattgttctgactgtggtattttctttcttcagcattgaattgaatattaattagtaaactctatccccacaacaagctaccctacaatggattaatttttcacttcactttattttggaaaaaaacaattaaaatggggaaaaaggaatttgcgtggaagttttgt

SEQ ID NO: 3894 - DNA, 1038 bp, Glycine max
tacggctgcgagatgacgacagaaggggattcatctttttgttcgtgttgtgtttgctttgaagaagtgaggggtgttctttgttggtgaatacacccactcacgcgttcgtggttgcaggctctaatcagatcccaaatgatcaactttgtgcttctcattagtcgccaagggaaggtgagactgacaaaatggtactcaccttattctcagaaagaaaggagtaaggtaatccgtgagctcagtggaatgattctttcccgtgctcccaagcaatgtaattttgtagaatggcgaggacataaagttgtttataaaaggtatgctagtctctatttctgcatgtgcattgatcaagatgacaatgaattagaagtccttgaaataattcatcattttgtggagattcttgaccggtattttggcagtgtctgtgaactggacttaatattcaactttcacaaggcctactatatactagatgaaattctaattgccggtgagcttcaagagtccagcaagaaaacagttgctcgattgatagcagcacaggattcgttggtggagaatgcgaaggaagaagtcagttcattaagtaatataattgcacaagccactaagtgaggaaaacaaatgtttcagtttcctgctcctcatatagtatgtcgaattgtcaatgtccgattttactgttactaagttgtctttcttgatgttgtctttctcacatatcatgtttgtgtatgcctgaactgtattacttgttgtggtgagattgagcccccagggttacttttactttgcatgttctgagattgaaattgaatagattccttggtaatatcctttttctttttcccattttgtaatatattgtttgctataaagagtttgtaagaatgattagaaattattttaataggtagagtattattttcatggataagaaattatcgtaaataacgcctccggtcttggtggtcttacttgtaaagcactgacaatttggctaatccagtaaatatgttatagctcaaa

SEQ ID NO: 3895 - DNA, 1055 bp, Glycine max
gctcgagggccggcgggccgggcggccccgctggaggccgggcagggcccgggaccgatccaataaagttctcaaaagtgcaaactagtttatcactaagagaaccaattaatggagaaaatgagagtggtactaattactctattgttgtttataggtgcagcagttgcagaaaaagctggtaatggcaaagctgccaataatcctgcagaagatgctagtgatggcgaagccattaatcttgtagaagaagctggtggtattggtgatgccattactcctgcagaaggcaaagccactaatcttcaagcgtatgagtcagctagattcaaaaagtttgtgacacattgcagctcacatgttgctcaaacatgcagtggaaatgatccattgcatcatcaggaaggtggccatggaataaacgttccacttgggttgtcattttgcctttttgattctatggagaaatgcttgggagaccatgaagccaaacttatagatcccaacccaggtcccatgtcggctattcctaattcaatccaatctcagcaactcctcattgagactgtaaaattcagaactgtcttgaaaacctgtactcgtgttagtgcacaattttgtttaactgctcctaacgttgatacatcggttttaccggcatgtctcgggccatctctcaatcaatgtgtttatcctgcagctgatgcatttacacctggcccgccgctcgaactcccacctattattatttataattagatctcggaagtactgcaaacagaagaataattgggtttgctcgatcagcctatctaataatcctttggcctagtgaagggactaaagtctttatctctcttgaaacgttccagtgatatgtcaattatacatgattgccttggcaattaaccttgtattatgatgaaggatctgttataccttcattattccaatttgctacatctggtctgtataagaaatcactcatgtcatgaatcatgatcgataattacattcctactaaatagtaattactaaaacatgttttacatcta

SEQ ID NO: 3896 - DNA, 1805 bp, Glycine max
aaatttccgccaaaaaaggagggttagttaggaagacacacacacaccacaactcttcctaaacctaacacacacacacttacactttgcattccaaattccacaactttcactttctacaacactatttaccccattttctctaaatccaaacaggccccaaaagaaagagagggaaaattctcttccatggcctcttcacgccctgccaatgtgggaatccttgccatggacatctacttccctcccacctgcgtcacccaggatgctttggagggtcatgatggggtgagcaaagggaaatatactattgggcttggacaggattgcatggccttctgctctgaggttgaagatgttatctcaatgagcttgacggtagttacttcacttcttgaaaaatttaatgttgatccaaagcaaattggacatttggcggttgggagtgaaactgttattgacaaaagcaaatcaattaagaccttcctgatgcaagtttttgaggcaagtggtaatactgacattgaaggtgttgattcaactaatgcatgctatggaggaacggctgctttgttcaactgtgtgaattgggtggagagtagctcatgggatggacgttatggacttgttgtttgtacagacactgcggtatatgctgaaggacctgctcgtcccactggaggagctgctgcaattgccatgcttgtagggccagatgctcctattgcttttgaaagcaaactcagaggcagtcacatgtctcatgcatatgatttttacaagccaaaccttgctagcgaatatccaattgttgatggaaaactctcacagacctgttatctcatggcacttgattcctgttaccggctttactgtgagaaatttgaaaaattggaggggaggcctttttcaatgtcagattctgattattttgtgtttcattctccatataacaagcttgtgcagaaaagttttggccgactatacttcaatgacttcttgagaaatgccagttttgttgatgaagttgccagggaaacccttgcaccatatgcatccttatctggtgatgagagttatcaaagtcgtgatcttgaaaaggcaaaccagcaagctgcaaaacatctatatgatgcaaaggtgcagcccagcacactaatcccaaagcaagttggtaacatgtacactgcatctctttatgcagcatttgcatctcttcttcacaataagaacagttcgttggtaggtaaacgggtagttatgttttcatatggaagtggtttaacagctacaatgttctccttccagcttcaagagggtcaacatccgtttaacttgtcaaacattgtaacagtgatgaatgtttcggacaagttgaagcagagagttgagattcctcctgaaaagttcgttgaaacattgaagatcatggaacaccgttatgggggtaaggactttgtgacaagcaaggactgtagctacttaactccaggcaccttctatctcaccaatgttgattccatgtacaggagattttatgccaagaaggactaggttattggttagttgatgatcgctgatatattcaaatatggagttaaaatgtattttcttatggttcacctgtatttgatcccataaggttgtgtatcaaaatgtttataagatgtttcatttttttgtggtgatcaggttgtaaccaaaataagaataagtttatttgcgaattggcaattgtttttaaatgcactaataatccaaatatattagtagtttcttcttgagtgcaaaaagcaaaaaaaagg

SEQ ID NO: 3897 - DNA, 613 bp, Glycine max
tttttccaaatatatgtgtgtccatttgccgtaagatgcctcgctcgcagtcgctggtcaaatgtttgaccgagtagagcaggttttgcttcaacttttattctgcattccatcatcgtccattttcatgatcctaagatggattggctagggcaaaagattgcagagcagctaatgcagataatgctgcttgcatttactgtgattgcattcgcaacaggataccttatggcttctttccaaatgatgatcctcatatatgctggtggtgtggttctcaccacattggtgactgtccctaattggcccttcttcaaccaccatcctctcaagtggttggatccaagtgagttagaaaagcatccaaagcctcaatcatctctgaatgtaaattcaaagaacaagtccgttaagaagtaggcttctttgacatatcttagtgctagtattttcttgagttaaaaaattcttgctttggcagaattttgtatttcttactcttcttccctccctttccccttcattggatattacgatgtactttacttctttggactgcaaaggttatatctgtttgcttgagttttgattttttttatatatatctcacaaa

SEQ ID NO: 3898 - DNA, 1065 bp, Glycine max
ccacgcgtccgcagacctgctggactgaccccatcagctgcattaccgtcatcaacatctccaatctcaccaatgccgcagtcatctccaatctcaccaatgccccagtctacaactgttaacactaaagcattaggtgtatctggaaatgggttctcctccaattcagttttgggcaatgattttttctctgctgcctcattgacaccgaaacaagaacctgctggactgagttactctgtcagccaggtctcatcagccattgttcctgtttccactgctccccaacctgcaattaagcaaaattctcttgactcattgcagagtgcatattcttcaatgctgcctgcaaatagtcagtttcagcgggcacaatctgcaccaaacataagccaacaaatttcaccaccagcttcttcttctccaaatacaccatctgggcttggaaatgcaaattctgacaattcacagctttcttggccaaaaatgaaacctactgatgtgcagaagtatacaaaggtgtttatggaagttgacaccgacagggatgggaaaatcactggggagcaggcacgcagtctatttttaagctggagattacccatagatgtcttaaagaaggtgtgggacttgtctgatcaggataatgatagcatgctttctttgaaggagttttgctttgctctttatttgatggaacgttacagggaaggtcggcctcttccacagtctcttccaagcaatgttatgtttgacgagacactgatgtcaatgacaggccaaccaaaaagtgcttatggaaatgcagcctggggtattggccaaggttttcggcagcaacaaggtattccaggtgctcggccagtggcaccaacagctggtttgaggccatcagtgcatggaagttttgcccgggctgatggcactcaacagcccaatcagcaaaagtcaggaacacctgtgttggaggattcctttttgaatcgtgagcagaatatattgaattcagagcctcaagaggcagcaactgcagagacaaagttttgaagaaactcagaatgtgat

SEQ ID NO: 3899 - DNA, 1302 bp, Glycine max
  misc_feature (1287)..(1287): n is a, c, g, or t
agaagatgtcgaatcaatactgtataaactacttgtggcagcagatttcaatgttgcagcagctcaacaaggaataatttacattgatgaagttgacaaaataactaagaaggccgagagcttaaatatcagtcgggatgtttctggtgagggtgttcagcaggcattattgaaaatgctggaaggaactatagtaaatgttcctgagaaaggagctaggaagaatccacggggggataacattcagatggacacaaaaaatattctttttatatgtggtggagcatttattgatcttgaaaaaaccatttcggagagacgacaagattcttctattggttttggagccccagttcgtgccaatatgagagctggtggaataacagattctgcagtaacatcatctttacttgagtcagtggaaagcgctgatcttattgcatatggcctcataccagagtttattggacgattccccattttagtcagcttgtcagctttaactgaagaccaacttatgatggtcctcactgaaccaaaaaatgctcttggcaagcagtacaagaaattatttagcatgaacaatgttaagttacacttcacagagaatgctctaaggctgatagcaaaaaaagcgatggccaaaaatactggtgccaggggtttaagagccctactggaaagcattttaaccgaagccatgtttgagattcctgatattaagacaggaagtgaccgagttgatgcagttgtaatcgatgaagagtcagtaggatcactaactgcccctggatgtggagggaaaattcttcatggagatggtgctttaaagcagtacctcgctaagatgaaggattcagcggtgaatgtagacgtaggtgaatcagatttacaagagggggatttggagctttcatcaagagccattagcttgtgatattactacatctaccatattcggggtataatttatcattgtcattgttatttgtaaaaatcacataaaaattgctgtaattatccctttgtataacagcatagctactggtctaagttcactggataggaaagaaataatagaagataaagaaaggagtagtgtagcattgctaatttaggcagcacatcatacaaaatttcaattattttttaggaagtctcactgaagacattttttcctttgtactagatattactagatttccactgagcaatttacatattatggatttattgtaagcagtcttatgctgatttcataaagtcttatgctgatttcatcgactntatatattttaactc

SEQ ID NO: 3900 - DNA, 1685 bp, Glycine max
ggaaaatatttgagttttgagaaataaatcgcaatcagctacgtacgccccccaattcaaccgccacggcgttcaatcaggataacaaagcaacacttttcccttttcattcaccactcgcctatttccttcgtctcttttgtttcgtcctttccttcaccacttttcccttttcattttcaggataacaaaacaacactccttgcaggattaaacttcacttcaattgaactaacctatctgtgggttttttgtagattgattcaattcaatggcttcagtaatgctcagtggaactgaaaagctcactctcagaaccctaaccggaaacggcttaggtttcactggttcagatttgcacggtaagaattttccaagagtgagttttgttgccaccactagtgctaaagttcccaactttaggagcttagtagtacccaagtgtagtgtctctgcttcgaggccaacctcgcagccaaggttcattcagcacaaaaaagaggcgttttggttctataggtttctctcaattgtgtatgaccatgtcattaaccctggccattggaccgaggacatgagggatgatgcccttgaacccgctgatctcaatgacaggaacatgattgtcgtcgatgtcggtggcggcacgggtttcaccactcttggtattgtcaagcacgtggatgccaagaatgtcaccattcttgaccagtcaccccaccagcttgctaaggccaagcagaaggaaccactcaaggaatgcaaaataatcgaaggggatgccgaggatctcccctttcgaaccgattatgccgatagatatgtatccgcgggaagtattgaatactggccggatccacagcgtggcatcaaggaagcttacagggttttgaaacttggagccaaggcatgtctaattggtccggtctaccctacattttggttgtcacgtttctttgctgatgtttggatgcttttccccaaggaggaagagtatattgagtggtttcagaaggcagggtttaaggacgtccaactaaaaaggattggcccaaaatggtaccgtggtgttcgccgacatggcttgattatgggttgttcagtgaccggtgttaagcctgcatctggagattctcctttgcagcttggtccaaaggaagaagatgttgaaaagtccgttaatccttttgtgtttgcactgcgcttcgttttgggtgccttggcagccacatggtttgtgttggttccaatttacatgtggctcaaagatcaagttgttcccaaaggtcagccaatctaagagatattagtagttagtgatccttttgatactttatcagtatctttttcaaagtttcatcaaatgtactctcaattaagagaaatttgatcaaatgtcaagtagtttattacgtaactgagctcaaatttgctggctgctcttgcaagctatgataattttgggcgggaagcccgaatgcaaccatattgtacacgtccacttgtcattttgttctgtccatcagcagtcttaagaggtcaattattccaacattgttttatgtaatgattatataaggatgttaatgtcgtttagaggttaacatccctttcttttttccaactgatactaatgcaatatgtctgtttatgttaaaaaaaaaaaaaaaaaaagggcggccgcc

SEQ ID NO: 3901 - DNA, 957 bp, Glycine max
aaccttacgcattagatcaatattaaagctaaccactcgtttgcatttgtatggtatatcattccaagaatctcagctgcagtaaacaacgaccatgaaactaatgacagcaacaacaacgtttgatgtctctgccacttgcttccgtgcccctcctccttcgtgctcaatgaatccatgccacaccagtttttcagttataaactccctgaatcctcacaagggacgacggataagcgttgctgttccacccaagtttccaaacttccggagggaagcatctctgcaggggaatttggaggctattagagtcccaacttcggtgcctgtgcgtgtagcatacgagcttcttctagctggtcatcgatatttggatgtaaggaccccggaagagttcgatgctggacacgctcctggcgcaattaacataccttatatgttcagagttggatcagggatgacaaagaacagcaactttattagagaggtgtcttcacagtttaggaaagatgatgaaattattgtcgggtgtgagcttggtaaaagatctatgatggccgcaagtgacttgctagctgctgggttcactggactcacagacatggctggtggttatgctgcatggacacaaaatggacttccaacagagctatgaagtgtttctgttggaactgtagctgtaaatagaataagttttgggaggagtccaatgcatggaaatgcagaaacacttcaccaagacagtgacaatctgacactgggaaaacaaaaatctataaatggaaaattaaatgtatttgtcgatatcaacaataaataaaatgttaatatatatccaactttgcaaagaaactctatttcctggctgaaaaaaaaaaattaaagatgccttcccttccttccaattcgaacggatgatatattattaatgaaaattgcctagccaaaacttaattc

SEQ ID NO: 3902 - DNA, 997 bp, Glycine max
cccacgcgtccgatcatgcaccctttcaaatatttggcttgggagcggcaaccttacgcactcgatcatcaatattaaagctactaaccactcgtttgcattgggtagtatatatcattctaagaagtaagaatctcagcaacaccaattagacaataaacagcgacgatgaaagcaatgacagcaacgacaacgtttgatgtctctgccgcttgcttccgtgcccctccttcttgttcaccgaatccatgccacaccagtttttcagttataaactccctgaatcctcacaagggacgacggataagcgttgctgttccacctaagtttccaagcttccggagggaagcagctctgcaggggaatttggaggctgttagagtcccaacttcggtgcctgtgcgtgtagcatacgaacttcttctagctggtcatcgatatttggatgtaaggactccagaagagttcaatgctggacacgctcctggcgcaattaacataccttatatgttcagagttggatcagggatgacaaagaatagcaactttattagagaggtgtcttcaaattttaggaaagaagatgaaattattgttgggtgtgagcttggtaaaagatctatgatggccgcaagtgacttgctagctgctgggttcactggactcacagacatggctggtggttatgctgcatggacacaaaatggacttccaacagaactatgaagtgtttcttttggaactgcagctgtaaatagaataagttttgggaggagtcccatgcatgcaaatgcagaagcacttcaccaagacagtgacaatctgatactggaacatgtaaatgcagaaagagcggggggggcagtctcccagatttcttatgcagacttaatgtctcccactctaactagtaccttatccaattcaacaataaataatgaaaataaaatgttaatatttatccaactttgcaaagaaaatatttttcttggctcaa

SEQ ID NO: 3903 - DNA, 1220 bp, Glycine max
atgttccaaatgagcggcgaacaacggccgactccacaccaaactagtctcaaattaagtaaggtgctaattattagcggctagctaagtaaccaagtaattaatggagaaaatgagggtgatagtaattactgtattcctatttataggtgcagcaattgcagaagatgttggtattggtctccttagcgaagctgaggcgtatgtgtctcctaagttaaaaaagttcatcacaccttgcacttcgcatgttggtgaaacatgcagtactactagtagtagtggaagtgaagcattaatgcagaaccagggtgggttggctctttgccttttcgattctatggagagatgcttggtagaccatggtgcccaactttatcaaacaagtgttactaaccttcaagttgaaccttctgaagtatttccaaggaagaataatccacaaggtggacgtaagtccaaattagatgaccatcaagttcaacccttatcatttcgattaccaccatttcgattaccaccaatgccaaaactaggaccaacaagtccgattataagaacgattccatcaccacccatagctcctcgagatttgtcactcattgagactatacaattacgaactgccttgagaacctgtactcatgtcactgcacgaacttgtctcactgctccaaatgttgccacatctgatttagaggcttgtctcactccatccatgaatcaatgcatctatcctcgtggagctgaatatggtagcccgcctattagggcgtaaattatttcaggcataaaggaaaatatgttggaagtattgctagtagaagaatagccagacatgcgtcaactagatttaagctagctagcttgttttatgatgaaggatttgttataccttcaaaattccaagtagctactacattgacatgcataaataaacattgaatgtcacgaacgatatggtgttcctactaaataataataaaacatgctttatttctatttaaaaaaaaaaaaagaaaaaaaaaaaaaaaaaaaaaaaaaaaaaaaaaaaaaaaaaaaaaaaaaaaaaaaaaaaaaaaaaaaacccttggccccaacccttttttaaaattacccaaaattttaaaaaaaatttgggtttttttccttaaaaaaaaaaattttttgggggaaaccctttttaaaatttttgggggaaattttccccaaaacggggg

SEQ ID NO: 3904 - DNA, 1372 bp, Glycine max
tttatgtgacctataggaaggccggcgggccggctgagcggccgctcgagcccggccgggccggggaattaagtaagaaaatggaggagaaaatattaatgagagtgatagtaattaccgtattcctatttataggtgcagcaactgcagaagatgcagcagctgaggcgtatgagtctcctaaattaaaaaagttgataacagattgcactgggcatgttggtgaaacatgcagtactactactagtagtagtggaagtgaagcattaatgcagaagcaggatgggttggctctttgccttttggattctatggagagatgcttgctagaccatcaaacaaatgttggaactcttggagacctaattacacttccaccctttccaccaagacctccagtagatcctaacataattccatttccaagacctccaaacatagttccatttataaaacgtcgtcgctccaaattagataaccatcaaacagatgctggaactcttggaaaagtaattccacttccaccgattcgaccaggaccgccattaaaaataattccatttccaggaactaacatagttccatttccaagacctccaaacatagttccatttccaagacgtcgtcgctccaaattagataaccatcaaacagatgctggaactcttggagacctaattatacttccaccctttccaccaagacctccagtagatcctaacataattccatttccaagacctccaaacatagttccattttcacctcgtggtcgtcgctccaaattagataaccatcaaacagatgctggaactcttggaagagtaattccacttccaccgattcgaccaggaccgccattaaaaataattccatttccaggaactaacatagttccatttccaaaaccttacattcctcattcatacaatacaattacgaaccttcttggcgcacgacgtgatcaagttcaagatttgccactcctcattcagactacacaattacgaaccgtcttgggaatctgtagtcatgtcactgcacgaacttgtctcactgctccaaatgttgctacatcagatttagaggcttgtctcactccttccatgaatcaatgcgtctatcctcctggagctgaatctggtagcccgccaatataattagggcatacaggaaaatatgttggaagaataaatggacatgtcaactagatttaagcaagctagcttgttttatgatgaaggattttgtatcccttcaaaattccaatagctgcatcactggcatgcataaataaatagctgaatgttacgaacgatatggtgttcctactaaataaatagtcataaaaaaggcttatttctattttttt

SEQ ID NO: 3905 - DNA, 1571 bp, Glycine max
tccagctacgtaggcccccccccccccaaaaaatgacacagaatcgtcatcctcaaaatttatgattatattttctttctctacttcgtcactacctctttctcatgagagagtatgttactgcgcaaagaacaacaaactaattaggtactgaccatttccgtctatatataaggccaataacccaacacgttctataaacatatagtgactaacctcccactgaagagtaattggtggattccagcaatggccgtggttcatggcagttgggtcaagcttgatcaaagaggagaagggcaaggagcgagaagctcacatgctatagccatagtagcacagaaggtgtatgcatttggtggcgaattcgtgccacgtgtccccgttgataacaaacttcacgtgttcgacctagagactttgacttggtccgtggctgatgcatcaggggatgccccaccgccacgtgtcggtgtcacaatggccgtagtgggagaaaccatatatgtctttggtggaagagatggtgaacacaaagagctcaatgagctctattcttttgacacaagggccaacaaatgggccttgatttcaagtggcgatattgggcctcctcaccggagctaccactccatgaccgcagatgaccaacacgtgtatgttttcggtggttgtggggtccacgggaggcttaatgacttgtgggcttttgatgttgttgagaacaagtgggtggagtttccttctcccggtgagaattgcaaggggagaggtgggccgggcttggttgtggctcgagggaaaatatgggttgtgtatggcttcgctggaatggagatggatgatgtgcattgctttgatccagcccagaaaacttgggcccaagttgagactagtgggcaaaagcccaccgcccgcagtgtgttttgcagtttcagtgatgggaaacatataattgtgtatggtggggaaattgatcctagcgaccaaggtcacatgggtgctggtcaattttctggtgaggtttatgcattggacatggagacactagcatggaagaggttggaggataaggtggatttcggtggccatcctgggccccgagggtggtgtgcttttgccagagcttggcggggcggccacgaggggttgttggtgtatggtggcaactctcctagtaatgataggcttgatgacatcttcttccttgctctttctcaagggttggtgaaatagtatgatatggtcgcataatctatgatggattctaaatgtgtttatgatgtcaatgagtggacaatgacatgagaacttatgaatcgttgatggtcaatttagtagcttgtgaatgttcttgcgtagtgaaacaaattaggaagtgtgtgcttaattctcaattagatgatatgatgaattaaaaatatatttatcaccctgtgagaggacaatggcatgggaattagggaatcttttatacttattgtatgtagcttgtgaatgtacttgtgcttttgtactggaataaattattaagtgtgtgatcaattctcaaaaaaaaaaaaaaaaaactc

SEQ ID NO: 3906 - DNA, 690 bp, Glycine max
atcaatggccacttttccttactacacccttcatcctctatcttcttctctcactccttcttctaaaggctctgttcatctttgtccatgctcttccacacgttctcgctctcttccccaattcccttccaaactacgacgcaaagccaccatcaagccgaggctgttgacgatcatcgaccccattttgctctttaacggcgtcgccaccactttctatttcgacacgcaaacacttatcgtcactgtcagtgttttggccgccattgctctttctctcttccttggccttaagggtgatccggtgccttgtgagcgctgtggtggcaacggtggcacaaaatgtgtattttgcaacgatggcaagatgaagcaagaaatggggttaattaactgtaaagtatgcaagggttcaggattgatattctgcaagaaatgtggaggttctggctattcccgtcggctatgagctgtgaaattcgtgttatatctaaaaaccatctgttctgaaatatgtaaggtcttgtaacaattttattgtccatagtgtcttttttctgtgaatcattttaatcacgttaatctgcggccctttgaggtattggccaattgcttttgcataaaatcagtcaaattttgatcttatgttaaattttcgttgcggagataaaaaaaaaaaaaaaaaaaaaa

SEQ ID NO: 3907 - DNA, 2400 bp, Glycine max
cttagcttcatattaagaagagaccacaatcattgcaataagcaaaccacaactcccatccccttccgccttcccctcacacaatgtcttcttcttttctcttccctcaaactcaatccacagtcatcccagacccttcaacctacttctcaccaaacctcctttcatcaccactccccacaaactctttcttccaaaactttgttattcctaatgggacacagcctgagtacattcatccttacctcatccaatcctcaaactcttcactctcagcctcataccctcttctcctcttcaccacagcactcctgtaccaagcttttgtgccagatctcactatctctgcctctaaaacatactcatcatatcaacaaaaccgtgtagtctcatcctacagtgaccttggtgtcactttggacattccaagctccaaccttagattctttcttgtcagaggaagcccttatataactgcttctgtcacaaagccaacacctctttccatcaaaacagtgcacaccgtagtttccttgtcttcagatgattacaacaccaaacacacccttaagcttaacaacactcaggcatggatcatatacacctcctctccaatctacttgaaccatgttccttctgaggttacatccaagccattttctggcatcattcgtatagcggctttgcctgattctgattccaagtatgtggaaactcttgacaagttcagttcttgttaccctgtgtctggtgatgcagcactcaagaaaccattcagtgttgagtataaatggcaaaagaaacgttctggggacttgctcatgctggctcaccctcttcatgctaagcttctgtcatatgatcgtgatgttactgtgctgaatgattttaagtatagaagcattgatggtgaccttgttggtgttgttggagattcatgggtgttggaaaccaatcctattcctgtgacatggaattctaacaaaggtgtggagaaagagtcttatggcgagattgtcacggcgcttgttaaggatgttcaagcgctgaattcttcagcaataggaacaaattcatcttatttctatgggaagcaggttggaagggctgcgaggttggcgttgatagcggaagaagtgtcttaccctaaagtgattccaaaggttaagaaatttctgaaggagactattgagccctggttggatggaactttcaaagggaatgcttttctctatgaaagaaaatggcgtggacttgttactaaacatggctctacagattcaactgctgattttgggtttggaatttacaatgatcaccatttccatttggggtacttcatttatggaattgcagttcttgcaaagattgatcctcaatggggacaaaagtacaagccacaagtttattcacttgtgacagattttatgaacttgggccaaagatataactcagattatacacgcctaaggtgttttgatctttataagttacactcttgggctgcagggttgactgaatttgaagatggaaggaatcaagaaagtacaagtgaagcagtgaatgcatactatgcagcagcattgctgggtctagcatatggtgactcaagtcttgttgacactggatcaacgctggtggcgttggagattcttgctgcacaaacctggtggcatgtgaaagcagaagacaacttgtatgaagaagaatttgcaaaagataacagaatagtgggtgttctgtgggctaacaagagggatagtaaactatggtgggcccctgctacgtgtagagagtgtaggcttggaatccaagtgctacccttgttgcctattactgagacattgttctctgatgctgattatgtgaaggagcttgtggaatggacagtgccctttttaagtagtcaagggtggaaggggatgacctatgccttgcaaggaatttatgataagaaaacagcattgcagaatattagaaagttgacaggttttgatgatgggaattcgttcactaatctcttgtggtggattcacagcagatgaggaggaggagtgtttgcacacaagcttctggacaagttttttatttttgcaatattatttttaaatttgattcttgtcaacatattttattttctgttatttatgaaattctacatcttgtatcagtgattgttaatgtgatgggggtaaatttgagctttgggaattttcaagaatttaacaaaatttgcagtatagcagatttttctactgtattagcagttcagtttcctgtaattttcaacagtgtttctagtgcaaaaaaacacactttgcttatgttgtcaagtggtgttaagagacaattgaatcaaatcaacaaatgatgttcaagccgaaaaaaaaaaaaaaaaaa

SEQ ID NO: 3908 - DNA, 2157 bp, Glycine max
ggaaaaaagaaaaatatcgcatttgcacaaaagattagattatcaaaacattatgtgaactaggcactcaagcttgcatttccatatacagcttaaggaaactagttcccttccctgattactcattactcaggcataataaaaatgacaactctatacgatatcaaagtaccttaatataaaattcaggcttcgaaaagacactagcaaaatgtgacagccgaaaactaaaagtatacaaaagtacagaacaagaaatccacttttagcacaacaggcacaacagcgaccttgtacgaaaattgggaggattgcaaagaaatcaccaatgcatgaagtggcctgtcacccattcctggagatagataatgctttttataagtcactactcaaccgatcggctttcattatgaattattaaagataattcagtgaacttaaagaagctgtccctggtgtggcattccacttctcatcattgcacagaattcctcatagtttattctcccatcattatctgcatccacctcagagattatttcctttattgttgcttcatcacccattccattttgagtcatagcaatctccaattcatctcttgtaatatacccactgttatccttatcaaaatactggaatgctttgtaaagatgttcatcacgttcaagtctgtgcctatgcattgtagccgaaatgaattcaagatagtcaatcgacccatttccgtcaacatcagccgcatccatgagttgcttcacttcagcctcagacagttttgatccgattcgagccaagccagtctttaattcttcataggtgatagtgccactattgtcagtgtccatgttggcaaacattgctttgagacctttaatctcctcttctgatagattttcagcgataaccttcaatgctagcttcttgagcttattcattgccctgaattgtttcattctggatagaactgcactatcgattggtttatcagatgcgtctccaccttctctcatccatgggtgttcaagaacttgagcagaagtaatccgcttctttggatcctgtgtcagcatcttcctgactagatctttagcactgtctgatatcgatggccatggttcacttacaaaatcaatttcaccttccaatatggcgttaaatattcccttttcagtttcagcccaaaaaggcggtacaccactcagaagaatatacaatatgatgcctgcgctccaaatatctatttcctttccataactacgacgcaatacctcaggagcaacatagtaagcactgccaaccatatcatggtaaaccttcccttgttcaatgaagacagagagaccaaaatcagtagccttgagggtggcgtggtcgtccttggtagagagcaagaaattctcgggcttgagatcgcggtgcatgacgcccatgaagtggcaaatgtggacaacgttgacgatggagcggcagagagaggcagcggctctctcggagtagtgaccctgggcgatgatacgatcgaagagctccccgccggagcagagttccatgacgaggtgaacggagaagcggtcctcgaaggcgcccttgaactcgacaatgttgggttgccccgacaaatgctgcatgatctgaatctccctcttcatgtcctccctgtccgccttcgagaccagcttcctcttcagtatcgacttgcacgcgtacgtccccccgctcgaattctccgtgcacagatacgttatcccgaattggccccttcccaattccttccctatactgtagtatttctttatgtcgtcaaagggtttccccacgatgcttgtgtctgctttcttctgcactgtaggagaagcttttcggttttctggagtctgtgctgatgcttgaacctgatcggtagtaggtggtgatggctgaacagtgttgtaaccaccaccactgccactaccactaccactaccagtggctgctgatccataggaagtgtttgattttttctccttgctaccatgacaacccattttgtcttgtgaatgaagatttgggagaatgagaatgagatggaggaggaacggagctagctgaagaagcagctagtgtccaagtccggggggggggcacacggcccggatatttgagaatccaataagg

SEQ ID NO: 3909 - DNA, 429 bp, Glycine max
ggaaagcatttaggggagattgtttttctgttccatttctacgaactcagacccttcaatcccaaccgagaaaaaaatcatgaagctgaagacatatgcgggtcttagtatcattgcaactctggctattatatatcatgcatttaacagtaggggccagttttatccggcaatggtgtatctgtcaacttccaagatcagtttggtgcttcttctcaacatgggtttggtctttatgtgtattctatggcaattaaccaagaagttgttcctgggttccctccgagaggcggaggttgagaggcttaacgagcaatcgtggagggaggtcatggaaatcctctttgcaataaccatttttaggcaggacttctcagtcacattccttgcaatggtcgcagcattgttgttgattaacgctttgcattg

SEQ ID NO: 3910 - DNA, 1590 bp, Glycine max
ctcgagccgaatcggctcgagtacggccgcctacgtaggccccccccccgaaggtatagtggcagtccaattgtaatttgcaacaagggcatctaaacccagaacccaatcatcttttattgcaaacttttgtgcattggaatttggaggccataaaaaagatgcgatgctacacgcaaacaagtagtacaagtccaataagaaaagcaagatagaaagattggctagttcacacacctcaattaatacaacaacaccctgttgctgatagttattatagagagagttcgatcaattcaagcttgcaagcttaaccatggaacggtatgagataattaaagatattgggtcaggaaactttggtgtggcaaagctggtcaaggaaaaatggagtggtgaattatatgctatcaagttcattgagagaggcttcaagattgatgaacacgtgcaaagagagattataaatcataggtccttgaagcatcccaatatcattagatttaaagagttgttgcttactccaactcatcttgcaatagtcatggaatatgcttccgggggagaactgtttgaaagaatatgcagtgctgggagattcagtgaggacgaggcgagatatttctttcagcaactgatttctggagtcagctattgccattcaatggaaatttgccacagagatcttaagctggaaaacacacttctagatggaagctcagcaccacgacttaaaatctgtgactttggttactcaaagtcatctgttttgcactcccagccaaaatcaacggtaggaacccctgcctatattgcaccagaggttttgtcaagaagagaatatgatgggaaggtcgcggatgtttggtcttgtggggtgaccttatatgtgatgttggttggagcatatccttttgaagacccagaagacccaagaaacttcagaaaaacacttcagcgaattcttagtgtccactattcaattccagactatgtacgaatcagtaaagagtgtaggcaccttttgtctagaatatttgtggccaacccggaaaagagaattaccataccagagattaaaatgcacccttggttcctaaagaatttgccactagaatttatggacgagggcgaaggggtgttgcagaatgatgatcatgtgaatgaagagtcatctgaaatcactcaaagcattgaagaaatactggccatagttcaagaggctaggaaaccgggtgagggcccaaaagttggtgagcaatttgttgggggcagcatggacctcgatgatattgatgcggatgctgacatcgatgacattgagacaagcggtgattttgtctgtgcattgtgaatgatgatgcttgcactttgcacactatttctccctcaaaagcagtttaagataagatgttgttccttgacgagatagatagggaagaatcaaacaaaacctctctagcctttactgctttcttcgtttttttaatgcttagccaaaaaatcaagactgtatgcatatgtaatgattaataatatagtagtagcttggctttctttcttccaaaaaaaaaaaaaaaaaaaaaaaaa

SEQ ID NO: 3911 - DNA, 2031 bp, Glycine max
  misc_feature (24)..(24): n is a, c, g, or t
ccacgcgtccggtgttactgtgtngctcccaacaacaagatgaagaggtagaagaagaacaagaagacgaacacactccacttcccccccgcgccccctttgagcttgcaactcctctttccctaaactctccttcatcactccatagctccttcttcttcttctgattctgattcttaaactaacagcacaagcacacaacctagttcagctcattcgttttcctccttgccccacttcagatcagtcccaaaatagctatgagaaatcacattttcttcttattcgttctcattgcacttgcccccactttctctctccacttgcaatctcacgccgctcctgcagggccgttgattaagcatatttcttcactcatcaaatggacaaggtctacctccaagacaccacactcagatgggaatgttcttcaatttgaaaatggctacgtggtggagactgttgtggaaggaaacgagattggggttgtcccttacaggatccgcgtctctgaggaggatggtgaactctttgctgttgatgcaattaacagcaacattgttcggataactccaccgctgtcccaatatagtagaggaagattggtggctgggtcatttcagggatacactggccatgtggatggaaaaccaagtgatgctcgtttcaatcatcccaaaggcataactgtggatgataaggggaatgtttatgttgctgatactcagaatctggccatcagaaagattggagatgctggtgtgacaaccattgctggaggaaagtcaaatgttgcaggctacagggatgggcctagtgaggatgctaaattctcaaatgatttcgatgtggtatatgttcggcccacctgttccttgttggtcattgatagaggaaatgctgctcttcgacaaatctctcttgaccaggaggactgtgattatcagtctaattcaatttccagtacagatatacttacagttgttggtgctgttatagtaggatatgctacatgtatgcttcagcagggatttggatcctcttttttctcaaaaacgcagcaaccatcacaaaaacagttcaaagggttagcaagcaatgagaaacacatgccaatcctggagagcagtaaagaggagccgggatggccgtctttcggacagctcattgttgatctttctaagctttcccttgaagcattagctagcacattcattcaattcataccctcacatttcagacctagcaactccaagagaggcctaacaccactgaaagatcgtcttgtgatgcctgaagatgatgtgccgcctccattggtcaacaggcaaaatgctcaaggacatactcctcttaccgaaaataggatggcatcacaggtccatactcctcttaccgaaaatcggatggcgtcacaggtccatactccaaccatagctgagaaatattcagaaatgaagcccccaaagataaaatcaagcagtttcaaggacccctctatgtcaagcaagcaccggtcgtcaagacgacctgagtatgctgaattctatggttcttctgagattcctccgtacaccaaatctaagagccagaaagaaaggccaagacacagacaacgagaaaagagtggagaagtcgttatgggggcagttggagctgaggctaaaccagttgagacaagggctgttgatcataatgatccaaagtttgaccattacagtatgagaactaagtatgcatctgaggagaccttccgattcaactctcagtaaacaagttttgcatgatttatttttcactagcattatgttctccattatactgaatatgtgcacctacattagtttgaagtgtgtctgtacctgacaagtatttgaagctatgttataagcaaacattcagtgcttagtgaatcatgcgggtgggaggatttccacccatgttctgaaaaattgtcacaaaattagcacctcaacatgcaacgttgttaagttccaaggagattgctccctcttaactacttcttcccaa

SEQ ID NO: 3912 - DNA, 1905 bp, Glycine max
gcggccgcggccggattcgataggtcggtggagaggtcgatgtttcttgagcttgccttggctgctatggatgagttggtgaagatagcgcagactggggagcctctttggatgaggaatgttgaaggagggagggaaattttgaacaatgaggagtacgtgaggaccttcactccttgcattggtttaagacccaatgggtttgtgtctgaggcctctagggaaaatggaatggtcatcattaacagcttggcacttgttgagactcttatggactcgaatcgatgggcagagatgtttccttgtatcattgcaagaacctccaccacggaagtgatatctagtggaataaacggaacaagaaatggggcacttcaattaatgcatgctgaacttcaagttctttcccctttggtgccggttcgtgaggtgaatttcctgcggttttgcaagcagcacgcagaaggggtgtgggctgtggtggatgtgtccatagatagcatccgagaaagttcgggagcacccacttttgtgaactgtaggaggcttccttctggttgcgtggtgcaagatatgcccaatggttactccaaggtgacatgggtggagcatgcagaatacgatgaaagccaagttcaccagctctataggcctttgttgagctcaggcatggggtttggtgcccaacgttgggtcgctacccttcaacgccaatgcgagtgccttgccattctaatgtcctcagcagcaccctctcgagaccattccgcaataacagcagggggaaggcggagcatggtgaagctggcgcagcggatgacgaacaacttctgcgcgggggtgtgcgcgtcgacggtgcacaagtggaacaagctcaacgccggcaacgtcgacgaggacgtcagggtcatgactcgcaagagcgtcgacgatcccggggagccaccggggatcgtcctcagcgccgccacctccgtctggctacccgtctccccccaccgcctcttcgatttcctccgcgacgagcgcctccgcagcgagtgggacatcctctccaacggtggccccatgcaggagatggcccacatcgccaagggccaagaccacggcaacgcagtctctctccttagagccagtgcgataaattccaaccagagtagcatgctgatactgcaggagacatgcatagacgcggcggggtcgcttgtggtgtacgcgccggtggatatcccagctttgcacgttgtaatgaacggtggcgattctgcttacgtggcgttgttaccttcagggttcgctatcgtccccgatgggcccgggtctcgtgggccaccgaacgggcccacttccacaacaaacggcggcgataacggcgtgacgcgcgtgagtgggtcccttctgacggtggcgtttcagatccttgtgaatagtctccctacggcgaagctcacggtagagtcggtggaaaccgtgaacaacctcatctcgtgcacggttcagaagatcaaagccgcgctccactgcgaaagttaaacgtcacgtgatcggtcacgtgagtctggttttttttttgttattttgtatttattgaggttcttgttgaaaattttaacgttgttgacgatggatggatgggtggcgcgtgtgaaagacgcgtgggttggttgagtcaagaacgaaccgcgcgtggggaaaaaaagagaaaactccttgcatgggttatgttccttaacacaaggcaagggtcgtggttcgggtattgactcgggtcgaccttttttgtttgctcgagtacaagaaagcaatagaggaatggaaaaaaaaaaacaagaaaaaaaaaaggttttgttagcttttattaattaaagtgttataacttgtattgattggagctcgagccgaatt

SEQ ID NO: 3913 - DNA, 2293 bp, Glycine max
tgcaatgattggtgaaatttcactcgaagaacagcatcttagaattgagaatgctagattgaaggacgaactagaccgtgtttgtgcactcgctggcaagtttttaggtcgacccatttcatctctaacaggctcaattgggcctccattgccaaactcaagcttggagcttggtgttgggagcaatggttttggaggattaagcactgtgccttcaacaatgcctgattttggggttggaatatcaagccctttagctatggtgtcaccttcaagtactagaccaaccacaacagtaacaacaacattggtgactcctccttctggctttgacaacagatcaattgagaggtctattgttcttgaacttgctttggctgcaatggatgagttggtgaagatggctcagactgatgagcctctttggatcagaagcttggaaggtggaagagaaattctcaaccatgacgagtacacaaggactatcactccttgcattggcttgagacccaatggctttgtcactgaggcctctagacaaactggcatggtcatcataaacagcttggcccttgttgaaacattaatggactcaaatcgttggtcagagaatgtccccttgtatgattgctagaacctcaaccgctgaagttatatctaatggaataaatggaactagaaatgggtgcccttcagctaatgcatgctgagcttcaagttctttctcccttggttcctgttcgtgaggtcaattttctacgcttttgcaagcagcacgcagaggggttatgggcagtggtagatgtgtccatagataccatccgagacacttctggtgcacccacttttgtgaactgtaggaggcttccttctggttgcgtggtgcaagatatgccaaatggttactctaaggtgacatgggtggaacatgcagaatacgacgaaagccaaattcaccagctctatagacccttattgagctcaggcacggggtttggtgcacaacgttgggttgccactcttcaacgccaatgcgagtgcctagctattctaatatcctcagcagttccctctagagaaccagcaataagttcaggtggaaggagaagcatgttgaagctggcacagcgcatgacgaacaacttctgtgctggtgtgtgtgcctcaacagtgcacaagtggaacaagctgaacgcgggaaacgtgggggaggacgtgagggtgatgacgaggaagagcgtggatgaccccggtgaaccgccggggatcgtcctcagtgccgccacctcggtgtggcttcccgtctcgccacagaggctcttcgacttcctccgtgacgagcggctccggagtgagtgggacatcctctccaacggtggaccaatgcaagagatggctcacattgccaagggacaagaccatgctaactgtgtctccctccttagagccagtgctataaatgcgaaccagagcagcatgttgattctgcaagagacgtgcacagacgcgtcggggtcgcttgtggtgtacgcgccggtggacattccggcaatgcacgtcgtgatgaacggcggcgactctgcttacgtggcgcttcttccgtcggggttcgccatcgtgcccgacgggtccgtcgaggagaacggtggcgcgtcgcagcagagggcggcgagtggcgggtgcctcctgacggtggcgtttcagattctggtgaacagcctccccacggcgaagctcacggtggagtcggtggagacggtgaacaacctcatctcctgcaccgtgcagaagatcaaatcagcgcttcactgcgaaagctgaaagtcacgtgactctggctttgtctattattattattattatttttgttttggagaatttaggttacattttgtagttaaaggtggcgcgtgtgaaggacgcgaggggtgggggtgttgagtcaagaacgaaccgcgcgtgggtgagagaactccttgcatggtgatatgaggatccgagaccttttccgggttgggttaggattttcaacacaaagcaagggtggtggttcgggtattgactcgggtcgacccctttgtttgctccatacagtagcagaagaaggaaaaaaaaaaatgaatagaaatgtgagaaacaaaaaggaacaaaattgtgtttctggttaggaatatttattgtaagttatcatcattttgatttgtattgacttggtgggagtatgctagaattggatctagtagtttgttgcatatgatcaaatcaataatttgtgttcattttttcaaaaaaa

SEQ ID NO: 3914 - DNA, 1287 bp, Glycine max
aattcggctcgaggttgctgtatttggtgtcgactgtgcatcaggagatacttttactgacggttcagttaaatacacaatgacttctatgaatgttcctgagccagtgatgtcattagctgtacagccagtctctaaagattctggagggcaattttcaaaagctttgaatcgcttccaaaaagaagatcctacttttcgtgttggcttggacccggagagtgggcagacaatcatttctggaatgggggaactgcatttagatatctatgttgaacgcattaggagagagtataaggttgatgcttcagttggaaagccccgtgttaacttcagagaaactgttactcaacgtgctgattttgactatttgcataagaagcaaagtggaggacaaggtcaatatggacgggtaattgggtatattgaaccacttcctgcagggtcatcaactaagtttgcatttgaaaacttgcttgtgggtcaagctattccatcaaattttatccctgcaattgagaaaggtttcaaagaagctgccaactctggtgccttaattggacatccagttgaaaatcttcgagttgtcttgacagatggtgctgcccatgctgttgattccagtgaacttgcgtttaagttggcttctatctatgcttttagacagtgttatgcagcttccagaccggttatattagaacctgttatgcttgttgagctgaaagtaccaacagaatttcagggagctgttgctggtgacatcaacaagagaaaaggtgtgattgttggaaatgatcaggaaggagatgattctgttattactgctcatgtccctcttaacaatatgtttggatactctacagctcttcgctcaatgacacagggcaaaggtgaattcaccatggaatacaaggaacatttaccagtttctcatgatgtacagacgcaactgataaacacgtacaagggaaataaggaaggtgaataatcagcttttgtcgaagtacatgataaaaaaattttatgacaatcacttactaaaagaaaaaaaagttgtgacaataatataggatataggcttgaattgattcattttttagagggtcaaccaattttggaaaacaaataaaagttactgtaattttgataatatggtgtacgaataatttatttatatctcaggtagttaaatggttatgggtcctaactcctgtgtaagttacacatgttcgtatttgtcgatgaagatgacttcttagattgttgattaagagctcttcgatatgt

SEQ ID NO: 3915 - DNA, 1828 bp, Glycine max
gtctcgtgagacttcactttattttttttccaattcccttcactcctaaacttttttttaggagggaagggaggggcaatggagatgcacacacaacctcataagaaacaccattttggtgtacaacattgttgtcttattagcctcttcatcttcaccttcttcactactacaaccacccaagcttttgattatgctgatgccctttcaaagagtcttctctactttgaagcacaacgctctgggaggataccttacaatcagcgtgtcacttggcgtgaccattctggcctcactgatggcctagaagaaggggtggacttggtgggaggatactatgatgcaggggatcatgtgaaatttggtttaccaatggcattcaccatcacaatgctctcatggagtgccatagagtataggcaacaaattgaagatgcaggtgaactagaacacacaatggaggcaatcaaatggggcactgattatttcatcaaagctcacactagcccaaatgtcctatgggctgaggtgggtgatggtgacactgaccattattgttggcaacggccagaggacatgacaacttcacggcgagcatttaagatagacgagaataaccctggttcagatctggccggagagactgcagcagccatggcagctgcttccattctgttcaggaaaacaaacccacattactctcacttgcttctacatcatgccctgcagttgtttgagttcggggacaagtataggggaaattatgatgctagtgtcggagtggtaaagagctactatgcgtcggtgagtggatacatggatgagttgctgtgggctgccacgtggctgtacaaggccaccgacaacaaaatgtatcttcagtacgttatttccaatgctcatacctttggtgggactggttggtccatttcagaattcatctgggatgttaagtatgctggccttcaactcatggtctctaagttattaagcgaagaaaaacacaagaagcatagggatatacttgaacaatacaaatcaaaagcagagtactatatttgttcatgtctcaacaaaaacaatgatagcaataacgtggaacgtaccccagctggattaatctatgtccggcagtggaacaacatgcagtacgtttcaacagcagcatttttgctctcaatatactctgatttccttcaaagcacaaatcaaaagctcaattgccatgggggcacagtggaccatgaagaaattcttaattttgctaagtcacaggctgattacattttggggtccaacccaatgaacatgagctatttagttgggtatggccctaactaccctaaaagggtgcaccatagaggggcatccattgtgtcatacaaaaagaataaagggttcatagggtgcactcaagggtatgataattggtatggtagccaggcacctaatcctaatgttctggttggggctttggttggagggcctgatgggaaagacaattttgaggacagaaggaacaattttatgcagactgaggcgtgcacatataatactgccccattagttggtgtttttgcaaagttcttgcatatagaaaaccaaaaactggttcatgattgtaattcacatttggttgcctccttcaaatgatatagtccttcaaataatatagtgaattaatacagtatatgtttctcataagccaaaagccaagtttttttcaatagttttttttatgtccttggtgagtgatttatggtttggctgaaattttctggcctcaaatgtactacttcaaatataaacaaatatatccattcagatt

SEQ ID NO: 3916 - DNA, 1472 bp, Glycine max
gaagaaactaaacaagcgtgtaattagcgtgacactatcactgcgtctctatcctctctcactcactcactcactcattcactgagtcaaattcaaacgaaaacgaaactcgctcgcactcatagttagttacgcatcgcaagcacactgccaaaaatggcggggcgcaagcacgcgccctcctccttcacgcgcctcgacgacgcgcgtcttgcgcattcctcctcctcctccgccgccgtggtccgcgccctcgaggagcgcgtcgaggcgcgccaccgcgagatccaggccctgctcagcgacaaccagcgcctcgccggcatccacgtggcgctcaagcaggacctcgccgccactcaggaggagctccgccgcctctccgccactgccgccgaggtcaaggccgagcgcgacgccgaggtgcgcgagatctacgagaagtcactcaaggtcgacgccgaggtccgcgccgtcgccgccatgagctccgagctggatcgcgtgcgggcggacgtgcaggagctcgtggcggagcggaaggagctcgcggcgcaactgcatgccgtggagagcgagcttgcaaaggcgcgtgcggaggcgcagtttgtgccggcgattaaggccgatatagaggccatgcgccatgagattcaacgaggaaggaatgctattgaatttgagaagaagacacacgctagaaaccttgagcacagacgggctatggacaacaatatgattattatggaccgcgaggttgaaaagttacgtgctgacttggctaatgcagaaaaaagggcaagggctgtgatggctgcagatgcaaaaacaaatcctggatatcctgctaactatgacaatcctgagatgggatatggaggaattacatgtcctcctgattcttatagcatgcatcagctgcaagctgtggttgacactcattctccacatgaagctggagcatcattacattatccgaatgacctgcaacatacacaagtgcctagatagtctttgggatgctttagtttttaaagagaatgtagcattgccatctccttcccctcccccaaaatgattttaaattcttaagcttgtatatatgctttactatttattttcgattgtaacatattcaggtagtttgcgcaggttcaattttcctgtatctcctttaattctttcatgagacttgttcaaatttagaaagctagtttttgtttcgtaaaaagcataaaaagtttcttagattctattctggcaagttgtggttaagttccgatgagttgtgatcgagttcctggtcttcgtagaatctttgatctcctactccagtgttggggagatacttacaaaaaggactctgacgatcaagtcagttgagcccaaggtgtttgtgtatgggatgataaaaaatgtatcttgttgtgttttctttgggtctatatgtacacgttcaaccttgagaagat

SEQ ID NO: 3917 - DNA, 1474 bp, Glycine max
ataatcgaaaaactctttacaaagaacatctcttgctcttcccactttctctctctaaagaatataatactcaaaattcatccatttttattttatttttcttaaaaaacaaagcgcgtatagtctcacgcgcccgacgatgggttttcccgtagggtacccggagctgctggttccgaaaatgttcctccacgcgctctccctcctcgcgtggctgcgctccctcgtcttcgccctcttccgcctcctccgcatctccgacctcctcgacaccgattccgccgcctctgacctccctccgccgcctccgccacgcgagccgactctctccgccctcctcatccgcgagttcctccccgtggcggcgttccgcgacctggcagccgccgacggggatcctccgccgtcgggctgcgccgtgtgcctgagcgaattctcctcggaagaagaaatccggtgtatggcgaactgcaagcacattttccaccggtggtgcgtggaccgttgggtcgatcacgatcagaagacgtgtccgctctgcagaactccgtttgtgccgcatcacaagctcgaagaatacaatcagcgactgtgggcagcttctggagtttcacagttttactaccaagacgattacacggcttctctctgattttttttttctctttctttttccacttatatatttataattatatagcactatatctttttttcatattattattatggtgggggacttgacagctagtgtagcgaaatgtatatagctaattaaaacaaaaacattgtatcaataaaaaaaatcagaattttttggattggtaaaaaaaaaaaaaaaaccccctcttctatcattctgtgtactacgtacaaattttcattatgtttttaggtttcataaaatgaaattgtgtcagtttttaacgtggaagtaggttggagtcaatcgatccatacttgcaatgatggttttttataacaattatgtatataattgataattaataaataatataaatgtgatattttttttattaattatgtatctaattgatatgaaatatgatattttttatattgattattcatttaattaatataaaaaaacaatgcacataaattcatatgtcttgaatcctattttgaaaaaagaatatattttaattttatgagaataaaaaatatactaaaatttttacactaataaattttaaatatttttatatttaagaaaaggaaaaacaaattttagttatttaataataaggtggatttggattaagtgtttttaatttgtattgttatgatatgtgatggcaatattcttgttatgttgctagtgatattgggtcttcctaaaccggggcatagaaattagagttattcttttttactagtaatatttatagtgtgaaatagtagtattattttaacgatgcttgttaacttgaaaaattaatgtgtggttgtt

SEQ ID NO: 3918 - DNA, 1391 bp, Glycine max
tcgcccacgcgtccgtacggctgcgagaagacgacagaaggggaccctcaacaacctaaaaaatattcactaagatttatttcccttattttattcatttattctttgttcctagtctttatcttataatttctcattgcttgcccggtaattcaagatcaacttggaaaatttgcaagatttgggatgaaatctggtcggatcttgctttgtgggatggggattttggtgggtcttatttcaatacaaagctcttcctctctcaatcccatctccctctcttcttcttcttcttcttcttcataacacaaacacaaaacataaacctttcttccaaccaaccttttttccaattcattctttgtttcttcaaaaatcttcaatccattttcaccttttcacaaatggggatggctgcagagtcacagtttcatgtcttggctgttgatgacagtctcatagataggaaactcattgagaggctcctcagaacctcttcttatgaagttactacagttgattctggtagcaaggctttagagtttctggggttgtgtgagaatgatgagagcaacccaagtacaccatatgtttgtcccaacaaccatcaggaggtggaggtgaatcttgttataacagattactgtatgcctggcatgacaggctatgacttgcttaagaaaatcaaggaatcttcatctttgagaaacataccggtggtgattatgtcatctgaaaatgtgccttcaaggattaacagatgtttggaggaaggagcagaagaatttttcttgaagcctgtgaggctgtcagatttaaacaagcttaaaccccatatgaagaaaaccaagttgaaagatcaaaaacaaggaacagtagaaaagcttgaagacttagaagttcaacagcaacagccacaacaacaaatcatcatccaaaatgagcagcaacaagcaccaaaatcccgagatcttcttcagccagagtcagagtcacatccacatgcacaaccaactattgaacaacagcaacaatcactacaacaagccaacaacaatagcaagaggaagaccatggaacagggcctttcacctgagactgacagaacaagaccaagatacagtggcatagccactgtggtatgatcataaatcattggcaaataattttcttgaatttcaaaaatgtaattctcataacttctttcttcttcttttaaaaaaaattaacttaagtgttggttaatataggctctataggagtgtagtagagttgtttcctgtacacattttcctggaaatatttccttccaattttgcttccccccaatataaatgaaaaagaaaaaagaaatattgaattgaaaaaaaaaaaaaaaatgataaaaaaaa

SEQ ID NO: 3919 - DNA, 1909 bp, Glycine max
agaatgtataaatatttgctttatggatgcttctaataaccggggggggcaacttacataggaaaacatagggggagacaattcccttaatcataagaaattagaatccaaaaataaaaaaggaatcccatgactcaggatttgactaatcttttccttaatcccaggttttatattcctattttatttaaataataaaatcttagcattcgtaatttattcaaaacgattaaagccaagcattcctaatttatcttttttttttttttttctttatttttttagtatttaaatttcatcataaatatgaccagaaagacgtggtgtaagaatgacttggagtggagaggccttaatgttggttagtccaatttgttcaagcatatcgacatgttccccatcactagttacaatgtcaaacccatgcaatagagtagcaagcgttagttgcattacttgaagaccgaaagaaagtccagggcacattcttctacctgcaccaaatggaattaattcaaaatgttgacctttgatgtctacatccttgtgggttgtcaagaatctctctggccaaaattctaatggattagggtataatgaagggtctcgttgaagttttgaaatattagtcaacagacgcgtgccagttggtacatgatatccacccacggtgcaatcttctaaggactcgtgtggcacattaagtggtgcagctgggtacaaacgtaatgtttccttgatgatagattggagatattctagcttttttaagtctgatatctctacaattttttcactcccaatttgtgtgtctaattcgtggattgccttatttaggacttcacgattattgagaagtaatgagagagcccaagacaatgttgttgttgtcgtatcagagccagctaaaattaagcccaggcaagtagctttgattgtggtgtcagcatcctggccgtcaaactcttgaccctcctcaacaaggctaagaagcacgtccatcaagtcctggttacttttgggttcagcttcactattccttttacttttgtgttcttccagccaaacttgaacaaacccatctaactctttcgccgtctttttcattttcttctctgcgccatccaaatccaaccatctcaaataaggaagagcatcagacacattgaacgcccccgtcaggtcaaaaaattctctcagcgcctttcggatccgttcgttctcttcattctcaccaacaaaacgttttcctaccaccgttctgaacataacgtttaacgttatgtccccgaaccacctcttcatttcagttgttgccttttcggaaccctttaggttcttgtaagtctctttcactgccgccttaacctcggccaccatcacgtgcttgagcatgtctatgcagtgagtagagagaagctccagcgtgataattttgcgcacgtgacgccaataagaaccgtaagggatgaacccaatcatggaatagttgtatcccaacaattcaaaggacactgatttaggacggctagcaaacgctttgtcgttgacggtaaagcactgtttggccatttcccaattgctcacaaccaacgttttgtgagcacccagacgcaaggtgaagacgggaccatatttgtccgccatgtggcccaacgtgacatggggtggttttgagccacctaagaggtggatgtgaccaattaaaggccacgcgcctcttgcttctggtggtgcttttcttgttgcagcaccgcggtttctgaatatggatgaaagaacaaagagaaataacaacagcccaaagaatgtgaaggtaattgagtttgttgactgcaggagggggttttccatgtgcaacatggtgtcggaggatgttgttgggtatgattgattttgataatggatt

SEQ ID NO: 3920 - DNA, 1501 bp, Glycine max
agatttaattcctttcaaccaaacacaccaaaataagccgggcgccaaaacaaataagccggaatcaaagagtacccccttccagccttccgtaccaaacaaaattgaatctctcttccgcacaaacaacctctcacgccccaaagccacacacaaaacatttaccttttccaacccttcaattccctaaacatttttcttttccttcgaactccaattccctcaccagaacacggtcaccattgttttccctttcaacaacattcgccatcctttcgcgacgaagagaaaaaaaaatggggtgttagggtttcgattctctgcgacgctctccgcattgcgctaccctgcaccttcctcaccatatcgcgcgcctctctcactcccctactgtttttccgctccccaccccctctctctgtgttgcgaaaattagggttcataggtttggggctaattcttcttccgatttcgaaccgagcgcaatcgtaaagagagaaaatgtacgctgatcgcgtggagggtggagcaaggaggccagtgaaggaacgccttaatgatgtgaatggtgtcagtggctctactcgccagcagcagcagcgtcaaatcactggcaagaggtcaaggcaagatgacaagtgggaacatgatctctttgacaatgacgaaccccggatcactaatcgcaaagttagtgctcaagatcttcgcctcaagcttcaaaggaagggtcttcaacctgcatctcagagtggaaagagttctgccccaaacgtgctggatctccgtgaaaggctatcagggacaatggcaccacaacctacaaattatgatctgcctaagacaaaagttattaaaccaagcagtaaaagtgttggtgttgaggctcctgcagtgcagatcaaaaggccagctgacccagctcctaaaaagtcatggaaggctggtccttcagttgatgaatttttgcggtccttgggtctcgaaaagtatctcataacttttcaggctgaagaagttgatatgacagctctcaatcatatgactgatgaagatctcaaggctatgggcataccaatgggaccaagaaagaagatacttttagcactggagtcgaaagtctaacatttagttatggaattgattttctaagctggatggtggtgggaggagatcaggatctaaaaaccaagtgtaatagcatagttctttgattattttcgtttttaatattttcccttactttttagacattaatcaagttaattttggtgtttattttgctaaaccccgtcaatctcctgaaactctcttataatgcaattaatggatttgagagtttaccttttgaatcaatctgttggatgcctcaagcgcaaatgatgtaatgctaggaacagaatggatgatacttttcaacaccgaggttgatatcaaaatgcaaagtcaaacatggatgaactaagttctttcaagtgatttaaattgaaatgcttgcggc

SEQ ID NO: 3921 - DNA, 1201 bp, Glycine max
tcgagtcagctacgtaggccccccccccccaaaacatatggtatatgctcaattgtgacatactgcaatggtgcagttcctggaggtagttcgaatagagggtcatgcattttctcctgaggacgtagcgatggcacgcgatatgtatctattgcagctgtgcagtggagttgatgaaagtgcagttggggcatgtgctcaacttgtgtttgcacctattgatgagtcatttgctgatgatgctctgttactgccatctggttttcgtgtcattccgttggatcctaaatcagatggtccagctccaactaggacattagatttggcatcaacgatggaagtaggttctggtaatgcccgtccagctggggaagcagacttgaatgggtacaaccttaggtcggtcctcactattgctttccaatttacctttgagaaccatacacgggacaatgtggctgctatggctcgccagtatgtgcgtagtgttgtgggatcagttcagagggttgccatggcaattgctccctccaggctcaatacccagttggctccaaagtctcttcctggttcgcctgaggcccttaccttagcccggtggatctttagaagctataggttgcacactggtacggagctttttaaagctgagtccacagctggtgatgcaatcttgaagcaactttggcaccatcccgatgcaatcatgtgctgttctgtgaaaacaaatgcatctccagtgtttacctttgcgaaccaagctgggttagacatgcttgaaactactcttgtcgcccttcaagatataatgcttgataaagttcttgatgaatctagcaggaagattctttgctgtgagttctccaagataatgcaacagggttttgcatatctcccagcaggaatatgtgcatcaagtatgaatcggccagtatcttatgagcaggctgttgcatggaaagtcctcaatgatgatgattctaatcactgcctagcattcatgttcatgaattggtcttttgtataatggatgaaccatctagaaactacttattttatctgctactaatttatattcagtacttaattatcagatgatactatcacagacaaatgtactaatgtcagcttttctttatgccctatgtatggagttacttattcgctattatataaaatatctagttaatttggtgaaaaa

SEQ ID NO: 3922 - DNA, 1005 bp, Glycine max
aactcatttcacccctccagttccaactttattgtgttttccagtagcctcatagcgccaataacctaagaaaacctaaacccctcgttggtggtagcggctgtgacagactcagaggcggagcaaggagaatgggaaggtcgagaagaaagtacaagcaatcgagaaccaaggtccgtgtgggactccctaagaagaaccctaggcttttcaaaccctctttctccgttccacccaagctcttgcgaaccctcgccgaagagccccaatgggacgaccaaggcaccgttaacagcaactactcctccttcggcgttctctccgaccctaactccctcaccgagccttctcccgatcctcaaaccttcgattccggcagcgatctcgaagaagacgacttgaaatcagccctaggaaagaagcgaagggatgggagaagcgcgccgcctcagcctctgactgcaatgcaacggattcatattagtcgccttgtcgataaatacggaaatgattatcagagtatgttgatggatataaagctgaatccgatgcagcattcaattgcaactttgcagaagctatgcatgaggtatcatatataccaaaacaagaaccctctccttaaggccaaatgaagtgggagcttaattaattaatccattgacggaacagttgcacgtggaggcccaaatttttgtcacagtgaggatgtgtttctctaccatgtgtcatcgttgagaaattttgttaatgcttttgaatctatgaattatattatgtggatttttggttgtggtagatgaggcattctggacttctggtcttcctacacctgctgccaccaagattatgtagcatttttacatgcatgcacttttggaattctaaagtaattattataaaattgacaaatttattaaaaaaaaaaaaaaaaaagaaaaaaaaaaaaaaaatagcttatcgatactgtttaaacacaataaagttggaacgggaggggggaaa

SEQ ID NO: 3923 - DNA, 1177 bp, Glycine max
  misc_feature (1173)..(1174): n is a, c, g, or t
cctcgtctaacacacaccccactaacaattccttcacttgcagcactgttgcatcatcatcttcattgcaaaaccctaaacttcaccttcaaccatgaccacacaagtaccaccacacagtgtccaagtccacacaacaacacaccgctacgaagctggcgtcgtcccccccggagcccgtttcgaaccgccgcgttatgaagccggcgtcaaagcgccctccatttaccattccgagagaggtccaacgacttcccaggtcctcgccgtcctcgccggcctcccggtcggtggcatcctgctcctcctggcgggattgaccctggcaggaaccctcaccggactggcagttgccacgccgctcttcgtcctcttcagcccggtgctggttccagccacggtcgccatcggcctggccgtggccgggttcctgacgtcgggggccttcgggctcacggcgctgtcttccttctcctggatcctgaactacatccgggagacccagccagcctcggagaacctcgccgccgccgcgaagcatcacctcgccgaggcggcggagtacgtggggcagaagacgaaggaagtggggcagaagaccaaggaggttgggcaggatattcagagcaaggcacaggatacaagggaggcagctgcaagggatgcaagggaggcagctgcaagggatgcaagggaagctgctgcaagggatgcaaaggtggaggcaagggatgtaaagagaacaacagtgacagcaacaaccgcaaccgcatgatgagtaattctgatattagagggagcattaatgtgttgttgtgatgtggtttatatggggaaattaaataaatgatgtatgtacctcttgcctatgtaggtttgtgtgttttgttttgttgtctagctttggttattaagtagtagggacgttcgttcgtgtctcaaaaaaaggggtactaccactctgtagtgtatatggatgctggaaatcaatgtgttttgtatttgttcacttccattgttgaattcaatgtcaaatgtgttttgcgttagttaagtgtaaaaaaaaaaaaaaagccccaatgtgttttgcgttggttatgtgtaaaaaaaaaaaaaaaaaaaaaaaaaaaaaaaaaaaaaaaaaaaaaaaaaaaaaaaaaaaaaaaaaaaaannagg

SEQ ID NO: 3924 - DNA, 1035 bp, Glycine max
ggtccggtctaacacacacatacccccaactaacaataattccttcacttgcagaacttagttctctgttgcatcatcatcatcttcattagtgttagccctaaacttcaccttcaaccatgaccacagtgccaccacacagtgtccaagtgcacacaacaacacaccgctacgaagccggcgtcgtcccgccggctcgttttgaggcgccgcgttacgaagccggcatcaaggcgccctcttccatttaccattccgagagaggtccgacgacctctcaggttctcgcagttgtcgccggccttccggtcggcggcatcctcctgctcctggcaggactgaccctggctggaactctcaccgggctggtggtggcaacaccgctcttcatcatcttcagcccggtgctgattccggccacggtcgcaattggcctggccgtggccgggttcctgacgtcgggagtctttgggctcacggcgctgtcgtccttctcctggatcctgaactacatccgggagacccagccggcgtcggagaatctggccgctgcggcgaagcaccatctggcggaggcggcggagtacgtggggcagaagaccaaagaagtagggcagaaaaccaaggaagttgggcaggatattcagagcaaggcacaagatacaagggaagcagctgcaagagatgcaagagatgcaagggaagcagctgcaagagatgcaagggatgcaaaggtggaggcgagagatgtaaagagaacaacagtgacagcaacaaccgcaaccgcatgaacgtgatgagtattaatgtgttgttatgaacttatgatgttggtttatgtggggaaataaatgatgtatgtacctcttcttgcctatgtagtaggtttgggtgttttgttgtctagctttgcttatttagtaattagtagaagggacgttcgttcgtgtctcataaaaaggggtactaccactctggcaatgtgatttgtatttgatgaattcaatgtgaaatgtgttttgcgttggtgtatgt

SEQ ID NO: 3925 - DNA, 793 bp, Glycine max
tcgagtcacgctacgtagccccccccccactattctcaccatgggcctcctcgatcacttgtgggatgacaccctcgccggtcctcgcccggagaacggcctcggcaagctccgaaagcaccactccttcgctttccgatctgcctccgccaaggaatcagacagcggaagcgtgaaatcgtacggtgaggattcgcccaagaatgcggtgagagtgacgcgaagtataatgatcgtgaaaccacctggtaaccagagtcccagtggatccgctccggcttcccccgccggttctactcctccggtgtctccgttttcgggagctagagaatccttccgttttcggagaaggtcaacatcagatgcgtacgagaagacaggccagaacagatcaagctcttcttctcctttcgatgtgtgagaaatgagcctgaccactatatatcctccatggatcgatgactgaaataaaatatatatagtagtttgtttttctctagcctttgcggatgatgctgtatccatttttgtttatgttaattttgtgcatatatatagtatatagtatatagcatatgtatgaatatgtttacgagttcatcagttgagcgattgaagtcctgaaacgatcgaggtagctgtgtgtggtttaacagcttggtcttgttttattgttgaactggtttatggttcggaagctgtaaataagtaataacgtagtataggtgtgtttttgttacgtgtactttgtatatatataaaagcctttccattccaaaaaaaaaaaaaaaag

SEQ ID NO: 3926 - DNA, 1166 bp, Glycine max
tcagctacgtaggccccccccccttggatctgatctgctgaaacacgccacactcttcttaccatgggcctcctcgatcacttgtgggatgacaccgtcgccggtcctcgcccggagaacggccttggcaagctccgaaagcaccacaccttcgctttccgatctgcctccggcaagggtacgcatgcgcatgcccttgctgaacttaatttcccaaattcattttagttattctaaaaataatgataataataataacaagaaccgcagcaagaattagttcttatgatctcacgcgatcataaaacgaagcaagatttgtgaggtttttaatttaactgaagtgataagtatgattattatatattaattctaaggtgaaggcgttttcgttgtgtggttttggtggattcagaatcagacagcggaagcgtgaaatcgtacggtgaagatttgccggaggatgcggtgagagtgacgcgaagtatcatgatcgtgaaaccacctggtggtaaccagagtccgagcggatccgctccggcttcccccgccggttctactcctccggtgtctcctttttcgggagctagagagtccttccgttttcggagaaggtcgacatcagatgcgtacgagaagacaggccagaacagaccaagctcttcttctcctttcgatgtgtgacaaatgagcccgaccactatctcctccatatatggatgactgaaaatacaaatatatagtttgttttcctctggcctttgctgatgatgctgtgtccatttttgtttatcttttgtgcatatagtatatagtatatagtatatatatgaatatgtttacgagttcatcagttgagcggtttaagtcctgagacgatcgaggtagctgtgtgtgtggtttaacagctcagtcttgttttactgttgaacttggttatggttctcaagctgtaaataagtaataacgtagtgtacgtaggtgtgttttggttatgtgtactttgtatataaaagcctttccaaggtttgttcttagtgttaatttgctttcaagctctcagcatccaaaataaaaaaaaaaaaactcgagactagttctctctctcaaaaaaaaaaaaaaaaaaaaaaaaaaaaaaaaaaaaaaaaaaaaaaaaaaaaaaaaaa

SEQ ID NO: 3927 - DNA, 1662 bp, Glycine max
atgtgaatagaatacgtgattctattcaattcatcatacattaaaatatcatcgttatcatatcattccagcgtcactctgattgagagtgaagaaggtgggagatggagaagccacaaaacggagaagaaaaggaagaaaccacggcctctttctgcggttacgattctcttcaccgtcttctcaaggataatcttaacccccatcacttccaggaagtcagccgtttgcttactgggcttaattgtggaaaagcacttgaagcagtttctctcccagaatctgcaacttccctctctgcggaacatggttttgacatccaggccttttccttttgtgctgacaaggaactattaagagaacctcggatagtgagagttggtttgattcagaactctattgtccttccaaccactgctcattttgcggaccaaaagaaggctatctttgagaaactaaagccaataattgaagctgctggttcttctggagtcaacgtattatgcttgcaagaagcatggatgatgccatttgccttctgcacaagagagaagagatggtgtgaatttgctgaacctgttgatggggaatcaacaaaatttttgcaaagctttgcactgaaatataacatggtgattgtaagtccaattcttgaaagggatattaaccatggagaggttatatggaacactgccgttgtaattggaaatcatggcaatataattgggaaacacaggaagaaccatataccaagagttggagacttcaatgagagcacatattatatggaaggaaacaccggccaccctgtatttgaaacagcatttggaaaaattgccattaatatatgttatggtaggcaccatcctttaaattggttagcctttggcttgaatggtgcagagattgttttcaacccttctgccactgttggtgaactaagtgaaccaatgtggccaatagaggcacgtaatgctgcaatagctaatagttactttgttgcttcaatcaaccgtgttggaactgagacattccccaatcaatttacttctggcgatggaaagccggcacatgcagatttcgggcacttctatggatccagttatgtttcagcacctgatgcatcgtgcacgccatctctatcccgcaatagggacggcttgttagtaacagacatggatcttaacctgtgcaggcaggtgaaagacaagtggggtttcagaatgacttcacggtacgagttatatgccgacacactcgcccgctatgtgaaaccagactttgagccacaagtcaccagtgaccccttgttgcataggaagtccttgtgaactatgctctcaagtgttggtgttaatatgtgttcattgcttgtggttcagattctggtctgtcgtgggatggccagtggaaacaaccttaaataaagttctttcatgttgagtacatgttcatgtattaaattctgttgtcaatggttcaccgtcatggttggttgatttggtcccattttacatgggagaaataattatttttgttttcaaaggctgtttaagaaaactgtaaaagtattcttttaaagaatgcagttaaaattacactgtgattctatcttataaattaaactcttttattttttttataaaaaaaaaaaaaaaaaaa

SEQ ID NO: 3928 - DNA, 1714 bp, Glycine max
cctcgagccgagccgaatcggctcgagctcaaacacacaagccaaacccaaacacaacaacacaaagaaaaaaagagcacaaacagaccaattccaacggttgaattttttggctgaagacaccccaccgacgttagtcaaataaaacatgtcttgctccgtcgcggtttccaattcgccggtgttctctccttcttcttccctcttctgctcgaagccctccatcatctcttcttcgccggaatccctctcgctctctctctcgcatctcaaaccttccaactcttctacgacgtcgtcttgttcttcaccctctgctgctgcttcttcatcttcttctccttcttctccgtttcggcttcgccttcccaagcctcccaccgtgttctctgcttcttcttctgcttcgtctacctctccgaacggcaccgttttgaagaggaagcgacccgctaggttggacatacccgtttcctctctcacctttgcggttccgcccacgccctccgcggcggcgcgtgacttggtcgaggctgaggaagatgggtttggggtgtactgcaagagaggcaggagggagtacatggaggatcgttacaccgctgggaataatcttcgcggagaacacaaactggctttttttggcatatttgatgggcacggtggtgcaaaagctgctgaatttgctgcaaataacttgcaaaagaatgtgttagatgaagttattgtgagagatgaagatgatgttgaggaggcagtgaagcgtgggtacctgaacaccgattcggatttcctaaaggaggatctccatggtggctcttgctgtgtgacagcattgattaggaatggtaacctcgttgtgtccaacgcgggtgattgccgtgctgtcattagcagagggggtgttgctgaggccctaacatctgatcacaggccttcaagggaagatgaaagggacagaattgagagcctgggtggctatgtcgatttatgccgcggtgtttggaggatccagggatctctggctgtgtcaaggggaattggagatagacacctgaaacaatgggtgacagcagaacctgagaccaaagttctccgaattgaacctgaacatgacttgttaattttagcttcagatggattatgggataaggttggtaatcaggaagcagtagatattgctcgttcttttctcgtaggcaacaacaaatcacaaccattgctgcaggcttgtaaaaagcttgtagatttgtctgtttcacgaggctctttggatgatacaagtgtcatgctaatcaaattggagcactatatttaaagttaccttagtacaactaaggtttcaagattattgcagttgagatcgcattgaggtcaagattgcgttgcagtttgtgatttttgaacaaccttggtggtgcctgatgatggatagagagtagctgattcttttctgtatatataaatctgactaccttattggaattttttgtacccgcgtaggggagggatattaacaataacatttagtaattatttttttcatagaataatttatgtaataagcataaagttaattaatttatacattatttatttagtaattcatttattttttacactgaagttttctaatttgtgatggattacagtttcccttttaagtacataaatgcaaaagttgttgtagaatgattcaatcaatgaatctctc

SEQ ID NO: 3929 - DNA, 1070 bp, Glycine max
ccctcggcccccgccccccccacagatcaattgcaacggttgaattttgactgaagacaaagttagaaaaaaaaaacatgtcttgctccgtcgcggtttccaattcgccggtgttctctccttcttcttccctcttctgctcgaagccctccatcatctcttcttcgccggaatccctctccctctctctgtcgcatctcaaaccttcgaactcttctacgtcgtcgtcttgttcttcgccttctgctgctgctgcttcttcttctccttcttctccgtttcgacttcgccttcccaagcctcccaccgcgttctccgcgtcttctgctgcttctgcttcgtctacctctccgaactgcaccgttttgaagaggaagcgacccgctaggttggacatacccgtttcctccctcacctttgcggttccgcccacgccctccgtggcggcgcgtgacgtggttgaggctgaggaagatgggtttggggtgtcctgcaagagagggaggagggagtatatggaggatcgttacacagctggggataatcttcgcggagaacacaaactggctttttttggcatatttgatgggcacggtggtgcaaaagctgctgaatttgctgcaagtaacttagaaaagaatgtgttagatgaagtaatcgtgagagatgaagataatgttgaggaggcagtgaagcgagggtacctaaacaccgattcggatttcctaacgggaggatcttcatggtggctcttgctgtgtgacagcattgattaggaatggtaacctcattgtgtccaacgctggtgattgccgcgctgtcattagcagagggggtgttgctgaggctctaacatctgatcacaggccttcaagggaagatgaaagggacagaattgagaacctggtaagcttctgagtgtgatagtacttaatcttttctctgtggttattgaaaccacatgaacctgtttgaatttggatttgttggttcttaagcattcgaatttgtcttgtagggcggctatgttgacttatgccgtggtgtttggaggatccagagatcttctg

SEQ ID NO: 3930 - DNA, 1136 bp, Glycine max
ctgcagaaatgcatatcaaatggcgtcaagtttcaccaagcaaaagttatcaaggttattcacgaggagaccaaatctttgctgatttgtaatgatggtgtcactattcaggccactgtggttcttgatgcaactggctcgtcaagatgccttgttcagtatgataaactgtataatccggggtaccaggttgcttatgggattttggccgaggttgatgaacacccgtttgatgtagataaaatgcttttcatggattggagagattctcatctgaacaatgacatggagctgaagcagagaaattgtaggatacccacctttttgtatgccatgcccttttcatccaccaagatatttcttgaagaaacttctcttgtggcacgccctgggttacgaatggatgatatacaagaaagaatggctgctaggttgaaacacttgggtattagagtgaaaagcattgaagaagatgagcattgtgtcattccaatgggtggccccctcccagttctcccccaaagagttgttggaattggcggtaccgcaggaatggtgcatccttcaacagggtatatggtagcaaggaccctagctgcggctcctattgttgctaattctattgttcagtgccttggttctgatagaggtttttcaggagatgaaatatctgcacaagtgtggaaagatttatggcctatccaaaggaggcgacaaagggagttcttctgttttggtatggacatcttactcaagcttgatttaccaggcacaaagagattttttgatgcgttttttgatctggaacctcattactggcatggattcttatcatcaagactgtttcttcatgagctcttattttttggactctctctattttcttatgcttctaatacatctagggtagagattatggcaaagggaactcttcctttggtaaacatgatcaacaacttggtaaaagatacagaataatagacttcattctattctgttgtgtatgctacctatggtaaaagatacagaataagacgacttccttctactcatgttatagatttctgataatgtataattgtgtatatttatttattctttgctcaccttaattcactttggagaaaaaaaaaaaa

SEQ ID NO: 3931 - DNA, 1161 bp, Glycine max
ggattcccttattgctgttcagttgaccgttgaccttaagccaaatcttccaagggaagaagagaggatcaagcttcgtagaggaagggttttttcccttcagaatgaacctgatgtggctcgagtttggctgcctaactctgatttccctggtcttgctatggctcgggcatttggagatttttgccttaaggactttggattgattgctgttccagatatctcatatcaccgccttaccgagaaggatgaatttgttgtgttagcaacagatgggatttgggatgttctgtcaaatgaagaagttgtggacattgtggcatctgcttcacagtctactgctgctagagcactggttgagtcagctgttcgggcatggaagacaaaatttcctttttgtaaggttgatgattgtgccgcagtttgcctcttctttgattctgattcagatttcaagtcaacagatacaaaagacaagttaataccggaggcatctattgaccaatctgagcagttagctttacttggtgaaaagggagttggaattgaagctgaaaaaaagcagcaatagcgcaagttttgtaccatgtctctcccaagccttgctggttttatcgaaaaggttgggtaaattgtgccgcaacagtcaaaagagaaaggatcattattttgatgatttttcggtagttttctgccaatattcttttcattatttatctttcatttccttcgacagcatttgaggggagaggggggttatatatatatatatatttcttatctggaggaaaagtggtaccgggcttttttttttgttgctggaggtcattttccttctctgtatatttggtagatttggagtttttgtaaatccaactctctagattcatattatatagtctgttctgaagtctgccgtttttcatttgcatcattcttaggttatagtttccaatttagtctgtgaaaacatgagagaactggaaagaattggatttatttcttatggactttcgagtcaggtttttgtacctccatgttgtgttgccgtcagggattaatgatattgtctgtgtgatcctattatgggttttgtgtggaaaatttactctgacggaaatgtgtcttttagctatacgagtaaaactgtatttacctttt

SEQ ID NO: 3932 - DNA, 1216 bp, Glycine max
cggccgctcgaggcggcgggccgcttcttcggttaaacctttttcaccttccccctttgtttctcaacatcattctcctcattcccctacctacccccaattttcccttctgtatttctctttttcaattctcgatttcccttctcccttttgtgtcttcataatccagatcctctcttcgatctagggtttctggcttaattaacaatcaaatgtttaaggaagaatttctatgacgattcgcaaccccatgcgacgaatccgtctcctccactccttctccgtcgtcttcctctactggttctacgtcttctcatgaactaactccctctcaatcccctaccctaattcctccaatttccccattttttttctaattaatcagatttgcaaaatcctaatttctctatcctaacaaaacccccaaattcaaacaaatccaatggcttcgattccgcgtccggcgagttcgggatcttcggagggaggaggagatccggctgcgatggacgagagaaagaggaagcggatggagtcgaaccgcgagtccgcacggcgatcgcggatgaagaagcagaagctgctcgaagacctatccgacgtagcgagtcgccttcaaggcgagaacgtgcgcttagcgcagagcataaaggcgaaggaggaagcgtacgttgagatcgaagccgcgaacgacatcctcagagcacagaccatggaactcgccgaccggttaaggtttctgaactccattctcgagatcgccgatgaggtcggcggcggtggtgaatccttcgagattccgcagattccagaccctctcttcatgccctggcagatcccccaccctatgatggcgtcacctgacatgctcctccatggaaatcaaggcctgtttgcttgatagtacttcaattaggctaggtttattgttgatgttccctagtgttttggtgaataaagaaagggaatggtgttagatgtttatgagttatatcgtgtgttggtgtgctgttttttttttttaagatctgtgtttatgttttgtgtgtgcactatcgtcgttatatagttgaattgaatgtatctgctttgtcgtagtgactggcattgtgtatcgatataaaattatgtttctgtttaaaattaaaaaaaagagaaaaaaaaaggccgccgcttgtgtctcgtcatacaaatagaaaaaaatttggagctatgg

SEQ ID NO: 3933 - DNA, 2391 bp, Glycine max
ataactttgcataggtaggcgcttacatcacagaaatactttatcaaaatgatagcattttaataaacaagagcatttgagaattgaaaatagtgtctgttattcgaccaatctaaatccaaatggcatcccaagaacctcagcttcactttgttctgtttcctctcatgtccccaggccacttgctccccatgacagaccttgcaacaatattagcacagcataacatcattgttaccgtagtcacaaccccacataacgcttctcgtttatcagaaacctttagtcgtgcttcagactcagggcttaacctcagattagttcaactccaatttccatcccaagatgctggatttccagaagggtgtgagaattttgacatgcttccttcaatgggtatgggtttgaatttcttccttgctgcaaacaactttctacatgaaccagcagagaaagtgtttgaagagttaacaccaaaaccaaactgcataatctctgatgtgggtttggcatacacagcccacatcgccaccaaattcaacatccccagaatttctttctacggagttagctgcttctgtctctcgtggcagcaaaagttggtcacttctaatcttctcgagagcatagaaacagattcagagtactttctgatacctgacatccctgacaaaattgagatcaccaaagaacagacgtcaagaccaatgcatgaaaactggagcgagtttgtcgacaaaatggcggcggcggaagcggttacttatggcgtggtcgtgaattcttttgaggagttggagccagcatatgcaggggatttcaagaagatcagaaacgataaagtgtggtgtgttggccctgtttcactcagaaacaggaatcaattggacaaggctcagagagggaacaaggcctcaagtgatgcgcacagttgcatgaagtggcttgatttacaaaagccaaattcagtagtttacgtgtgccttggaagtatatgcaatttaattccgttgcagttgatagagcttggtttggccttagaagcatctgaaaaaccattcatttgggttatcagggagagaaatcaaacagaagagttgaacaagcggattaacgaatcagggtttgaagagaggacaaagggagtgggtcttttgattcggggttgggctcctcaggtactaatactatcacaccctgcaattggagggttcttaacacactgtggttggaactctaccatcgaagcaatatgtgctggaatgccaatgcttacgtggccgttgtttggggatcaattcttcaatgagaagttcattgtgcaggtactaagaattggagtgagagttggggtggaaactcctgtgaactggggcaatgaagagaaaagtggggtcttggtgaagaaacaacatgttttgaaggctatacaagtcttaatggatgagggaaatgaaagggaagagagaagaaaaagggctagagagcttgcggagatggctaagaaagctgtagaaggaggatcttctcacttcaacgtaacccagctaatacaagatatcatgcaacagtccaacaaagactagtactaacgatcatcttcggttatcaaaggcatattaatatatatacactatttcagaagaagttcctaattagcttgcagagggttgtaacatatactgtgtggcaagcctgtgaaggctcgaggaagaagagtatcctgtgtaaactcgagtgattactgtaataaattaatcctactggaaacaaagaatggatataatcatatagactaaggatttgagggtgaaatataccttgagctaattgaagttttaattttatatgtttgatatcaagtttaagcaaggccaccttgaaggactagggaggcaagaaacaaatttaatattttctgtgttagatgtggcatctgaatcagcaattggttgttgctaaaatggtgttgctttcttgtgaaatatacatatcctctatccatgggagaatgatcaacaattgatactggtggagcatggtatatgactttccctatgctaatgctcaaaagaatcaacatatattggctcaagttgaactaatactcctacaaccatatgagcatctgatctagcatcttgttcattatccaaagaagcttcaaccgctaccactttccttgttttgagttgatacgtcttcatcttctatgattttaaaatctcagtttcccagagcgtgtggataaacttttatttagaagtagtattaagagtagggattgcatgactaccttgtctgttagttaacattagatcttccctttgtgcttataatattaaaatgtattttatattacatcgagtaatatttagcaacgcattaccc

SEQ ID NO: 3934 - DNA, 1875 bp, Glycine max
gcctcgcggtcgggactaggaaagttttcaaagccaagcaaatacgagctttacccaattttcttgctgttgaattttccactgttcaatcttcaaaatcacatttttctcgatcttcaccttctgggttgcttttttttttcttcttcttcttcttcttcttttgttttcgctatggaatcgaaaaaccctgcgaggtttacgctggggaagcagtcgtcgcttgccccagaacgccataacaaagaagcagagctccaaaaagatggggaagctgttgatcagggtgtgaggttgatgtattcggcattcgaaggcgatgtggatggaattcgcgaggcgttggagtctggtgtgagtgtgaattacaaggatattgataatcgcactgctcttcatgttgcggcgtgtgagggcttcactgatgttgttgatttattgctccaaaaaggtgctgaagttgaccccaaagatcgatgggggagcacgccacttgcagatgctattttttataaaaagaatgacgtgatcaaactattggagaagcatggagcaaagcctttgatggcccctatgcatgttaatcatgcgcgtgaagtcccagagtatgaaatcaatcctaaagagcttgattttaccaacagtgtggagataacgaaggggactttctgtagtgcattgtggcgtggaacaaaggttgcagtaaaaaagcttggggaggatgtaattagtgatgaggagaaagtgaaggctttcagagatgagcttgctctggtccagaagatccggcatccaaatgtcctcccatttctgggtgctggctccgcaggtagtccacccatgatggtgacggaatatcttcccaagggagatcttcgtgatttcttgaaaagaaaaggagctttgaaaccatcaacagctgtgagatttgcacttgacattgctaggggagtgggttatttgcatgaaaataagccatcgcccattattcaccgtgatctcgagccttctaatatattgcgggatgattctgggcacctaaaagttgcagactttggggttagcaagttgctggcagttaaagaagacaagcctctaacttgccaagatacttcctgccgctatgtggctcctgaagttttcagacaagaagaatatgacactaaagtggatgtattttcatttgcactaattctgcaagagatgattgaaggctgccctcctttttctgcaaagcaagacgatgaagttcccaaggtatatgctgcaaaagagcgtccacctttccaagcaccagccaagcgttactcccatggaattcgagaattgattgaagagtgctggaatgagaatccagcaaagcggccaacatttaggcaaataataacaaagctggagtccatctacaacacaattggtcacaaaagacattggaaggttaggccattgaaatgcttccaaaatctggaggccttgttgaagagagatcattcaaatggaagtagtcgtggcggttcatctcgctccacatcaagcagaatatgaaggagaacattggtcttatcctgtaactaaaatattggtataaagataaaagatagcaaccaaatttgacttcttgagttggagctttgcaacgttttctcgtgtgtattcattcacaggttcatggttgttttcgtctttcaagattctttatactcgatgatttatttccaattacatttatgtctggtgacagaattagtatttgtatgtaacatatacacgtattctaaggaatttgctccctgtcatgtacattattatgtaacaagacatttttgttgggtatatatcatgcaatagatttttagctgaagaacttccccaatt

SEQ ID NO: 3935 - DNA, 603 bp, Glycine max
tcagctacgtaggccccccccccgatatatatcacgaacagaagaatatattacattaagaaagcccaaagaaagaagaagatggcgtccgagtgcaaaggtaagagctcatggcctgagttggttggagtggaaggaacggtggcggtggctacaattgagagggagaatcctttggtggatgctaacactgtgcttaaaggatccatcgtcaccgctgattttcgatgtgatagggttcgggtttgggtcaccaaacatggaattgtttatcaggctccaagaattggataagaagtgtttacactaaagcacttcatatatatgttatgagtcatgaatataatagtatttaaataaggagttattcttccaattatgttatttgattgaaaataaaaacatgactataagaaatttgttttttcttatttttaattatgttatgcactgcaaataaatatacaaattgtgtgtttcattttctttttgtacgcaataattaaaccatttatatatctccatttgtaaaaaaaaaaaacaaggcctcccgctactcgtgccgaattcggcacgagggtaagagtgagcaacttccaacac

SEQ ID NO: 3936 - DNA, 1239 bp, Glycine max
  misc_feature (13)..(14): n is a, c, g, or t
  misc_feature (29)..(30): n is a, c, g, or t
  misc_feature (34)..(34): n is a, c, g, or t
ttgttgtcatagnntcaaaatatgggtgnncagntcagctccgtagcccccccccccaatggtgagctgatcaatattgccaatcatctgaattttaatgatgcatcaaatgatatgaatctggatctgttctgggatgccaacgagaatcttccgactgatggatcattcttggaatacaatgatattgcaattgggaatgggagtagatctactgaggctgatcctcctgcgaatgacattctagacgagtatcttacactccctgatgatgatatttacaagtatatatcttttgattctcctcagattcaagagagtgaaaattttattcccaaccaaggatcacctttcactcggcagaatgtggagggagaaactgctgataaatctgtggttagtaatcataattctgaatcacaaaccagaaatgaggcttcttcagtgcagaatacacatgaggcaaagtttgcaccaggaagtacaaatccacttgttaagcaggcctatggttggttagccagcatccctgctgcgcctgcacatgctatggagtttcctgctaaggagattgctcttgggcttcatcctgtagctcagtcttcccatccagctcatataactacaggtatgatcagcataacagacattactttaagaggcaatgcgatggattggacgatgggcaaaaatggagggtttagcactataatatccactgggttttgtcaaccggatgttaattcggatgctttgatacctgtttctggcaagactgcatttgtgttgtcgcatggctggattttcctgactggtttctctgttcttattctttcactgagttgcaagatcggaagcatcatgtatactggtaaatgactacaaataaggttgacggctactagagaataaggagcagtcagttaagtataatttagtgtttggtggtactcattgaatgagtaggatcccgtgactttgtagatatttttatggtaccttagtcaatctgatctatacattcttcatcgtaaaatatacaacatttttagggtgcctacagatagtaatagcaaatactgtcttcgataagattcgcgtaatatatattattagttcatactttcaatagtaatagatgcaaagttctgactgatagaggctgtccattatttattaggttccatatgtaatttgattcacttggtataagaacaagtcatcgggtttttgtcttgt

SEQ ID NO: 3937 - DNA, 1043 bp, Glycine max
gtcacagtgtctcaattgatgtcctctctcgtataacagttcattcatgtgattctatatttggtgatgctgagactagactcctgatgcacatcataggattactcccttggctctgtcttcaacttagcaaagacatagtgataggtccagcttctccactccaacatcaatatcaaaaggcttgctccgttgctgccaatgttgcaatctggtgtcgagcaaaatcttttgatgaattagctactgtatttatgatttactctcgtggtgagattaagagtgttgataattttctggcttgtgtttcaccacttttatgcaatgaatggtttccaaaacattcaactttggcttttggacacttattaaggcttctggaaaaaggaccggtggagtatcaacgtgtgattctacttatgctcaaagctctcctccagcacacaccaatggatgctacccagagtccacatatttatgcaattgtatcccaattggtagaaagcactttgtgttgggaggcactaagtgtcttagaagcccttctacaaagttgcagttcattgactggttctcatccatatgaacctggttcattggagaatggaattggtggaactgaagaaaagttgcttgctccacaaacctcattcaaggcccgcagtggccctctgcagtatggttttggatcaggactaggctcagtttctactcctggacacgttgggtcaactgagtctgggatgtcaccaagagaggttgctctgcagaatactcgcctgataattggtcgggtattggacagaagtgcgttaggtaagagaaaggaccagaaaaagctagtcccttttgtggccaatattggtaacccatgattgtataattcatttgctgtatatattctgtccaaagatgtagggtttgctacagggtagaggttgtacatactacataggctgggatgagagtttgtaacattctgtgtagttgtagacaaaaatcattttgatgtcaaatagcatgcacgatttaactttgttggt

SEQ ID NO: 3938 - DNA, 2244 bp, Glycine max
tactcgagccgaatcggctcgagtgagctttcacttcttccaacttcttcatctatctacttctcttctcttctcttcccttcttctgttgtaaccaacaacaaataacacttttatccctcagaaattaaccatttttcgtttctgggttttctataattttgttgattttccattccttctattttctgctgctgctaggtagcagtggtatgtctagcttatgagttatgagctatgagcatctttctattttgaagagaagattggaatttttttctctttagagaaaggcttcttcctagtggttggatttttatccatcaagttattgattgaggagggggtgatcacgcgatcttgtagatgatggagagggtttgtttttgtgctttgtgattctgagatgtagtggttggtgaagtgaagaatcaaaggcagagtttgtacgataaatttgacttttggatcgaggtgggtccatttttgtacacaattttgttgtttgattctgtttcgagctctctaaggggagagagaggtgggaggaagggtggaacatgtgattttgcttgtttgtgttgtacttttcgtatttcggaattcgcattccagaaaagaggagctttagttcttaggtgttgtgatctgattgtaaggagggaaacaaagttgagcaagtttgaaactgtaagaagaggcgggagaagatcttgattcttgacaagagattgtttcttctgcagctatggcgattcaagatcaaaatggatttttcagatcacagggtggtcctccagaaggaggtggtgtatctttgagttctgggcattctgtcacacatattcaacttaatgaccagttttcttgtgggaatgactatgctctgaaggtaaggaagccgtatactatcactaaacagagagagcgatggacagatgaagaacataagaagttccttgaagctttaaagctgtatggacgggcttggcgacgtattgaagaacatgttggcacaaagactgctgttcagattcgaagtcatgctcagaagtttttttctaaggttcttcacgatcctactgggaacaatacaaacacagtggagtcaattgaaattcctcctccaagaccgaaacgaaagccgatgcatccttaccctcgtaaactagttgagaccccaaataaggaaatttcgatcccagaacaacctatgaagtctaattctctgaagtcgtcagactttgatcaagaaaaccaatctccaaaatcagtattatcaggagttggttcagacagccttggctcctctgattcagacacaccaaatggaagtttgtcgcccatgtcatccattagtggcttccatacaagcagttttacacgtgccaaacccaaaacaacaacatctgaggaagaagctgggatggacactgattcaactcatgatgagaaacctcttatgaaattcaagcttcctccaaatggatgtgtttccatcaaagaagacaacacagcagaagaatcttccggtcggactttcaaactctttggaatgactctatttgtaacagacacctgcaaaccatctccaacaatcgaggaatgctaaagatacctctaaacattcgcgcgcaacgcctttcctcctccatggaggatggcaaattggaacttgttggacactctagagcaagtgaaacatcagcaatatccaagctaaaggtgagagtggaacctgaagcatgtgggaaagggtttgtgccatataaaagatgcatatctgttgtgacagctgatgatagagaagagcaatgtatccatctttccttgtagcttataccccactggatttttccttcaaaaagtgttccctttgtcatgatgagctgtaatggttgttttggttgctgctggatgtgagttggtatgatataggaaggaaaaaggggtggctgaaaattttgatatttccgttgaattgcactgcactgcacattctccagctgttcaaatccgtaaacttgccttttctatttttttgacttccaagtttcaacacattctccgcgggtccaagccgtgtctgtgcgcggcacttaggagctgtgtccgtgcttcctagtttaactgtgaataactgtgaattatatctagtgccttttttttaaaaaaaaaaaaaactttttatgctccctaagagtatgcaaagtgtaagtcacgtactaaaaaaaaaaaaaaagg

SEQ ID NO: 3939 - DNA, 2128 bp, Glycine max
gtagtcacacactaaatatcgaaagagaagccttcagcttcctgaccattgacttctctcctcttcttccaccatgtccatcgcacgatccgcgttcacattaaaccctctcatcacacactaatcctctcacaccgtgctttgttccttcattcacaaaacttcatcccctttctcacaattaattcagcttcaaataatctaatctaaaaccgaaacccttatattatcaccaatgcatttgctttcgcaatatttgcgatcggtataattggagatcaccgtacggaaaaaaggaacacacgcggtaggtgaagcgaaagcgaaagaggtaagttagtttgttagggtttcgacgagatggaatcgtcaccgtcgtcttcgtcatcgtcgatgtcgtcgtcgtctggaagcgataccagcggtggtggtggtggtggcgctgtcacgtggttcgggatgagtttcccattccgttctccgctatctctcgtcatggattactgcgcgcgcgaggattccgcggagcctgtgattatcattccccgcacgcgccctcggtttcaggcgcatgccgcttccgccgccccccccccctctgattccgatgagaatgcctgcaacggcgctgctgaggaggttgcgatacgcataattggggccggcgagcaggagagcggttcgtcgccatcgtcgtcgtcgaggggccggggaggggagccgggttgtgaggaggcggtggttgggaggagtgggatgctttcgtcggaggctcgccggcgaatggcggaggaaagggtgcctttggtgtctttggatgatgggattggtggcgttagggaatcttcctcttcttcttcttcttcttcttcctcttcttcatcgtcctctacttaccagaggtatgatattcagcaggttgcgaagtggattgagcagattctaccgttttctctcttgttgctgattgttttcatccgccaacatttgcaaggtttctttgtcacaatttgtatatcagctgtgatgttcaagtcaaatgaaattgttaagaagcagactgccctgaagggagatcggaaagtctctgttcttcttggtatctcttttgcctttgtgctgcatgtgataagcatttactggtggtatcaaaatgatgatcttttatacccactggccatgcttccaccaaaaacaccgccacctttctggcatacaatattcatcattttggtgaatgatacattggtgcggcaagcagcaatggctttcaaatgtttgttgcttatttactacaaaaatggaagaggccataacttccgtcggcagggtcaaatgttaactctggtcgagtatactctgctgctgtatcgtgccttgttgccaacaccagtttggtaccgatttttcttgaacaaggattatggaagtctcttttcctcactgaccacaggattgtatctaactttcaagctaacatcagtagttgagaaggtccagtgcttcgtttctgccttaaaagcattatcaaaaaaggaagttcattatggggttcatgccacaacggaacaggtgaatgctgctggtgacatgtgtgctatatgccaggagaagatgcaggctcccatattgttgagctgtaaacacatgttctgtgaggagtgtgtatctgaatggtttgagagagaacgaacttgtccattatgcagggcattggtaaaaccagctgatctgcggaccttcggagatggatcaacaagtctattttttcagttgttttaagttcattttctttgacttgttgggtcatgtttttgagccaaaatcttcctggaaaatgtcaccatctatggtttggtaaaattttccattaatgaaattgagattgaaaaaagaataaagagatatttatatgtatggttaaagtatataagttcattctagagtaatgaggtcagatgtacaaagggatatagatagctggcattatactgaaatccgcgtggatctcttaacctgatattcgtcacgtcacacaatggaaacttttgtttataatgttacatttcaaattaaaaaaaaaaaaaaaaaaaaaaaaaaaaaaaaaaaaaaaaaaaaaaaaaaaaaa

SEQ ID NO: 3940 - DNA, 920 bp, Glycine max
  misc_feature (852)..(854): n is a, c, g, or t
  misc_feature (857)..(858): n is a, c, g, or t
  misc_feature (860)..(864): n is a, c, g, or t
  misc_feature (866)..(866): n is a, c, g, or t
  misc_feature (868)..(868): n is a, c, g, or t
  misc_feature (872)..(874): n is a, c, g, or t
  misc_feature (876)..(880): n is a, c, g, or t
  misc_feature (882)..(883): n is a, c, g, or t
  misc_feature (885)..(890): n is a, c, g, or t
  misc_feature (892)..(892): n is a, c, g, or t
  misc_feature (894)..(894): n is a, c, g, or t
  misc_feature (896)..(897): n is a, c, g, or t
  misc_feature (899)..(906): n is a, c, g, or t
  misc_feature (908)..(910): n is a, c, g, or t
  misc_feature (912)..(915): n is a, c, g, or t
  misc_feature (920)..(920): n is a, c, g, or t
tcgcgtcagctacgtaggccccccccccgatttgagttgcggcacaaagcattcactgtgtcggaaaaagaagaagagaaaaaagatgagcgacggaggaaaacgacaaggtggaagagcgttgccgccgccgccaagaggccctccgcctcctcccccctctcgccctcgcctcgaacccgtcgatcgcgaaaagacatgtccgttactgctgcgagtgttcactaagattgggagtcaccattccatggaagactttgccgtcagaggcaaagagcccaaagacgaggttcagatttacacctggaaggacgctactctccgagaactcaccgatcttgtcaaagaagttgctccggctgcaaggagaagaaacgccaaactctccttcgcctttgtattccccgacaaaaacggccgtttcaaagttcaagaggtgggcaagacattatcttatggaaatggaagattagatgatggcaaggctttagccgaacttggttttgaaatcggtgactacttggatgtggctattctgtagtttattatggatacttgcatgtggctggttatgtttgaaggccttgaaacacttattttagagttaagaagactgtaatcgtggaaatgtttagctgttaatgtttacatgaactaaaaagaggtccagtttctctggttgcaaaaatgatagattgaagatttctaatgcctatattttttatcacggtcccttcctggttcttttgttcacctcaaagataaaaggaaaggatgatgtttatgggtgagaatcattggtttcgtgattcaatggtaccaaatctaataagcaaaaaaatgaacccaaannnttnntnnnnncngngggnnncnnnnntnntnnnnnngncncnncnnnnnnnngnnntnnnnttttn

SEQ ID NO: 3941 - DNA, 1016 bp, Glycine max
tatttcggccgctccagccggcgggcaactcaaacaacaaaaataagacattgtttggtttggttacttgctcgaatttcctcgaatcgcttaatttgtatttgattagttaaaccgcaacgcggaatctcttttctcgaactggctaactctcaggcaagtggttcggacgctgattccagcaacaagcggctggtgctcgcactgtatgacgccctaaactccggcgactccgacgccgtcgtcaagatcgtcgccgccgacctcgagtggtggttccatggtccgccctcacaccagtttttgatgcgcatgctcaccggcgactccgctgccgacaactccttccgcttccttccgcagtccatcgccgccttcggctccaccgtcatcgtcgagggctgcgacaccgcccgcaacattgcctgggtccacgcctgcaccgtcacggatgggataattactcagatcagagagtacttcaacaccgccctcaccgtcacccgcatccacgattccggcgagattgttccggctagctccggcgccggccgtttgccctgtgtctgggaaagcagcgtctccggtcgggtcgggaaatccgtacccggtttggttcttgcaatataaaataattattaacaagtaattagggaagaacgcggtcacgtgtgaataataattaaataaggaggttgtgcacgtggcggtgactgggtcgaacggtttcagggaacattgatatattttcgtagtattggtgtgttctagaggttagagagatgtgagaccctattggtggggtttcttatttctttaattttctcaggtttggtttgtttttgttttgtttgcttgtgtgttttgggaaccactatgggcctatccaggtggctgtatctttcttttgtaatgcggtttgttgatgatgatgatgatgcaataagaatatctatggattatggttttaaaaacaaaaaaaaaaaaaaaacggccgctccccttctagaacctag

SEQ ID NO: 3942 - DNA, 898 bp, Glycine max
cctcggacacaactccaacaaggcattgtttggtttggtttggttacttgaaaatctcgaatcgcttaattttgatttagttttccaccgcaacgcggaacctctttctcgaactggctaactctcaggcaagtggctcggacgctgattccagcaacacgcggctggtggttgcactgtatgacgccctaaactccggcgactccaacgccgtcgtcaagatcgtcgccgccgatctcgagtggtggttccatggtccgccctctcaccagtttttgatgcgcatgctcaccggcgactccgccgccgacaactccttccgattcgttccgcagtccatcgccgccttcggctccaccgtcatcgtcgagggctgcgactccgcccgcaacattgcctgggtccacgcctggaccgtcactgatgggatgatcactcaaatcagagagtacttcaacaccgccctcaccgtcactcgcatccacgattccggcgagattgttccggccagatccggcgccggccgtttgccctgcgtctgggagagcagcgtctccggtcgggtcgggaaatccgtccccggtttggttctcgcaatataaaatataaaataagtaattagggaaggacgaggtcacgtgttgccgttgctataataattaaataagggacttgtgcacgtggcggtgactggatcgatcggtttcagggaacattgatactttgtgttagtattggaggttagggagatgtgagagctttgttgttattggtgtggtttgttttgtttgcttgtgtgtttttcaccactatgggcgtattcaggtggttgtatctttcttttgttatttggagtgttgatgatgatgcaataagaatatctatggactatgctttt

SEQ ID NO: 3943 - DNA, 851 bp, Glycine max
  misc_feature (19)..(20): n is a, c, g, or t
  misc_feature (30)..(30): n is a, c, g, or t
agctccacgcgggtggcgnncgctctaganctagtgatccccggggctgcaggttcattttttttttttttttttttttagaatctagaaaacgactttggaacttagtagtagcagtagcctacatccaacataaagtgtttaaacacattcaacactgattatctttaactacatggtgtcacttcaatgtagcaacttattagttgtcttaaaccattattaaaagatagcacaagcagattattactctcatacactttagcctggaggccagttcatctgtcttcccccgaggaggtgcacatgaatgtggtaaactgattggcatcctttcggcccatcgttaattacaatcctgaagccgtcgtcgagtccttcttgcttcgcaaccagcttggcagtgtacagaaggcggccaagaatctcaaagtgcctctcctcagccttggatagaccacttaacccgtctttgaatttaggaatgataagaatatgtgtaggagcttgaggagttatgtccctgaaggcaagcaccttgtcatcctcataaaccacagtagaaggaatctccttattgatgatcttgtcaaatatggtaggagcatcagcatcagagggagtgacggcaagagccgcttgcttctctgaagccatgatggggctggatctagcgaagtgtgatgacaacacagagattcttttacttatattgttgttgttgctgctattgccactcattcataataaaataatggtgtgcttagggaaccccaaatccagtgaatgaactttgggctgaatcccggggggcctacggaactactcgagggggggcccggtcccaattg

SEQ ID NO: 3944 - DNA, 858 bp, Glycine max
  misc_feature (797)..(797): n is a, c, g, or t
  misc_feature (799)..(799): n is a, c, g, or t
  misc_feature (801)..(801): n is a, c, g, or t
aatttaattttcttatcaggcccatccaccaaattattgacaagaagaaaaaagccttcttaccgaacatgacttgagctttccatggaagaagaacacgccgcaaaggcgccactgccggacgctttccttcagttcctggagaccaacgggctcgacccttccatttacactgctattgattccaccccacgatacattcggttgaaacccggtttcgaatcatgtattgaagaggttgaagcagaggtgaaatgcaaactcgaaaaattagagtggttaccgggattttactctcttccacctcacgttcaaattgctggttctagggcataccgagaagggaagatatatggaattgatgcagcttctggagctgcagttatggctttaaatatatcacctggggatcatgttctcgacctgtgtgctgctcctggtgccaaactttgtatgattttggaccttcttggtgattcaggctctgtggctggagtggatgttgcaaggcatcgtttggcagcgtgtaggacaatgctgcagaaatatatgattggtggtcggtgccggctttttgttgctgatggaacagcattttcagttattcctagcggattttgttctgactgcaaatcatgtgagtctggattggaaggaagagtggatgtgttcaaggagtggacatctagaagaccatggaaagagaggaaaaagggcaataaaagtgggactgcacaatttggtgtctaggtctcagcctcctgagctcatttattatggacaacatttctggagtngntnggtcttactaaaggagaattatataggactttatctgacaatgagattgcaaatcat

SEQ ID NO: 3945 - DNA, 1455 bp, Glycine max
atacggcggcaggaggaaaacgtggtgtggggatagagaagcgaaagaaaccaaaccacaatgaaataaaaagccccttttgtagaacagtgatacattcgctttctatttcttcctcatctcgtacgtttcgtggatccttactcaacgcaacacaacacaacacagtagaaaaattatgagttccaaaggtgttggtgaagattgcctgggatgggcagcaagagatgcatccggagttctatcaccttacaaattcagtcgcaggactcctgggaatgaagatgttcttattaaaattacacactgtggtgtttgcttcgccgatgtagtttggacaaggaataaacatggtgactcaaagtatcctgttgtgcctggtcacgagattgctgggattgtgacaaaggttggctccaatgtccaccgttttaaggttggtgaccatgttggagtggggacttatgtcaactcatgtagggattgtgaacattgtaatgacagagaagaagttcattgtaccaagggatctgttttcacttttaatggtgttgattttgatggtacaattacaaaaggaggatactccagttacatagtagtccatgagaggtactgcttcacgataccaaaatcctatgcattggcttcagcagctcctttgctttgtgctggaattacagtttattcaccgatggtgcgccacaagatgaatcaacctggtaaatctcttggagtgattggtcttggtggcctcggtcatatggcagtgaaatttggaaaggcatttggtttgagtgtgacagttttcagcactagcatatccaagaaagaggaggcactgagcctgcttggtgcagacaaatttgttgtttcatctaatcaagaggaaatgacggcattggctaaatcgttggactttataatcgacacagcatctggtgatcacccgtttgatccttacatgtcactgttgaagacatatggtgtttttgtcctagttggtttcccaagtcaagtcaaattcagccctgcaagccttaatataggatcaaagactgtagccggaagtgttacaggtggtacaaaagatatacaggagatgattgacttctgtgctgcaaacgagattcacccaaatatagaggtaattccaatcgagtatgccaatgaagctcttgagaggctcatcaatagggacgtcaagtaccggtttgtgatagatattgagaactccctgaaagaaaaataagttgtacttgttgcctcctaaattgggcatgattggacttcaccttgttcgataaacaagatgttcatagttcataattacttacatagaggtgatttcaatggagtatgcgatgtaaatgttgaattttccttaattattttgggaactaatattatttgactattataatattttggattatgaaataataataattatgg

SEQ ID NO: 3946 - DNA, 1307 bp, Glycine max
attttttgtaagataataggttaaaatattaataagcgaatgttgaaccctaactgaggatacactcgcaccggtagctgctgcagccccttgtgagtgagtgttctgaaagatgagaccaattttgatgaaaggtcatgagaggccattgacgttcctgaaatacaacagggacggcgatctcctcttctcctgcgccaaggaccacaacccaaccgtctggtttgccgacaacggcgaacgcttgggcacttatcgcggccacaacggcgccgtttggacctgcgacgtctcaagagattcggttcgtctgatcacgggtagtgccgatcagaccgccaagctatgggacgtgcaaagcggtctgcaattgtacaccttcaatttcgattcccctgccaggtccgtcgatttctccgtcggtgataggctggccgttatcaccaccgaccccttcatggagttatcctctgcaatccatgtcaaacgcattgctgacgatccaaccgagcagagtggggagtctctgcttctcattaagggtcctctgggaaggataaacagagctatttggggacccctcaacagtaccattattagtgccggggaagatgctgttattcgtatttgggattccgagaccggaaaactgcttaaagagtccgacaaggaatctggccataaaaagactgtaacttcgcttgccaagtctgccgatggttcacatttccttactggttcccttgataagtctgccaggctttgggatactaggtcattgactcttatcaagacctatgtcacagaacgcccagtcaatgcagttaccatgtcacctcttcttgatcatgtggttattggaggtggtcaggatgcctcagctgttacaactactgatcatcgtgctggcaaattcgaagccaaattctttgacaagattcttcaagaagaaattgggggtgtgaaaggccactttggaccaattaatgcattggcttttaaccctgatggaaaaagtttttcaagtggaggtgaagatggttatgtacggttgcaccacttcgacccagattatttcaacatcaaaatttagtgcctgatggtttgtggttaaaattaggtggttcctagaagttagcttttaattattctcaaccaacatttttgtaatgcgatgctccctatattggtaatatggaagaattttttttaatgaatttatgcatttttggtttatgttgtatcgacatggtcaattttggttggagtggcactcttaattaaggagttttacttcccacggcaaa

SEQ ID NO: 3947 - DNA, 1094 bp, Glycine max
tacggctgcgagaagacgacagaaggggagcattgcatagggagggattattttattccctccattggccgtagtagcagccgttgtgtggcggtgacaaccatggccgactcatctcaagaccttgaccaacttctcgatagtgctttggatgattttcagtccttcaacctcaatcctccccctccaagtggggaagcaactgcgaatagcaagaaggagagtccttctttgccgtcgggggttcaaggattgggcatgggtttacccgatttgagaacgaagaaaaaggggaaacagaaggcttccaaagacagccacgtgtcggaggcgctcaacaagctcagggagcagaccaaagaggctgtgaaggggctggagtctatatccccacccactgccgatgatttaggtaaggatgccttgatggaagattgggtcaaacaatttgagcagcttgctggctctcaggacatggaatctattgtggagaccatgatgcatcaacttctgtccaaggagattcttcatgaaccaatgaaggaaatagcagaaaagtatcctaagtggttggaagagcacaaatccagcttaagcaaagaagaacatgaacgctattcactccaatatgaactgatacgaaatcttaatgaagtttacgaaaatgatcccggaaacttcaacaagattgttgagctcatgcagaaaatgcaagaatgtgggcagccaccaaatgatatcgtccaggagcttgctcccgatttcgatttagccagtcttggccagctatctccagagatgcttgaaactcagccaaattgttccataatgtgaagctatttcttcccttttactatgttgcagctgttggtttacaggtttttaggaatatttaattttcacttgtcagaataaaatagttttatgcgctacaatgttttttcctactttttataaggttatgaggaacccacaagtaaagcctctttttaaggttgtatatgatgagggcttgtctatcaatattttctctggaagctaatagattacgagttgccaccggcaaacaaaaaaaactttctgattttttgaca

SEQ ID NO: 3948 - DNA, 1361 bp, Glycine max
  misc_feature (68)..(68): n is a, c, g, or t
tcagctacgtaggccccccccccccaattcttttggaaccagtactttgggttctttaggcttgaatngctcaggcagcattgatgcacatcaaaaggaggatggccaaggaaattccaagcgtggaaagttgcctgtactttttgatggatcatccaatgatgtgcgtgataattgcgttaatgtaggaaatggtgagtctactagctctggattgttgtctaaccccagtagacctgatcttttgcactcaaaaggagaggaagtgggtggaagcagtacttcaaaagacaagcttccccattggttacgagaagctgtgagctccccagccaaacttcctgatcctgaactgccacccacagtatcagccattgctcaatcagttcgcctgttatacggggaagataagcctacaattcccccgtttgtgattcctggaccacctccctccctaccaaaggacccgaggtgtagtgtcaaaaagaaaaagaagagaagatcacacaagttcagtcggggtcttccagattttgctggaaacagcagggatttgcacagaagccaccatgttgataacggtgcttcaagctcactcccattgggcccatcattgcctctactttctcatacaggagctctaggaactcagcagattgaatctgaccttaacttgcctcctctaaatttgaaagtggcaagctcgtcacactcttcaaaaaaagcaagttcgggactgtctccatctcctgaagtgctccagttggttgcatcatgtgttgctcctggcccccatcttccatcgatcgccggtgcttcaaactttctcgacagcaagcttccattgccaaggcctgttggcagagccaaattcaaagactcagaaggtgccttcagaaataagaatcctagacagctctcacaaaaaaattggtgttcacctcaagaacaagaagtacatgaccttgatagtggagattccagcaagactcagtcagatccctctcgggttgaacggccctatgaagtggaagtgtcatctgagggaactgtctcagaccatgctgtgagagatcaggaaacataactttagtgttttggataaaaaaaaatgaaaccatattctttcttgatgctgaagccttttcaccaatgcgctagaatttttgtaggtatgacgagtgaactagcaaaaatataggattgttgagaacatgtaaagttttttttttctccaagtgaaatgaaatatagtgttgcttgttggatattgtttgttgtcctctttgtctggcattttttgaaattggaaccagatataataattcattattatatgcatggtacgtgtattagtatgg

SEQ ID NO: 3949 - DNA, 1005 bp, Glycine max
aaaaaaccttgccatttatcaactactagtagtatttataggcctctttgtatatcagtttgtttgccccttgaaaacttgtggctgctataagtattgtagtgaggtgcttcctcatcttgtcgtgtgtgtgagagagttagagaatgggaaattgccaagccgttgacactgcaactctagtgattcagcaacccaatgggaaagtagaaaggttgtattggcctgtgagtgctagtgaagtgatgaagaccaaccctgatcactatgttgctcttcttatctccaccacattgtgctcatccaaggacaatgaaaattgctcgagtaagagtgacaataccaccaaccctgttcgccttacccgcatcaagcttctcaaaccaactgatacccttatgcttggccaagtttatagactaatctcagctcaagaggttatgaagggtctttgggaaaagaaacaagcaaagatgaagagaaacttgtcggaatcagcacaaaagccaaatctgatgaaggaaaggacagacaaatcaacaaggaggtccgagccggaggacaaccaggaaaccaaagctgaaagacacgggtcaaggacagcatcaactaataatgcttctagtgccacagctaagtcaagaacatggcaaccctctttacaaagcatctcagaggcagccagctgatctgtgttttcaatctttaccacatgtgatgtgagggacagaggagcattgagagacactcaaaccaccaaatacaaattaatcccgctccatgattgcttagatctgtggaaattaaaattaaattaaatatatagtacattcagggaagccagaaaaaaaacttagagagatgaaaacattcccttcggttgaacaactgggttcatgcataataattgtgtatagtaaaggttgacatattgaacattaattaatgtattcagatattactttttagtgaaatcagtcttcatcatcaaaaaaaaaaaaaaaa

SEQ ID NO: 3950 - DNA, 2018 bp, Glycine max
ccacgcgtccgctcctttcttcttcttcactctctaatagaccagatcgtcccattccattatttccccctcttcaaaattccaatagcataatcccccatctctctctctctctctctctctctccatatccaacaattttcaaaatattcttattctctctctctctcttcacatcagaattcacacccaatccacaccctgcctcactcccctccccacccaccaattgtcccgatctcccggcccggcccctcccctccccatcaccaaaaatcttgttcctctccacctcctccatctgggtacatttcattatttaccttcttgttcctctcttcacgtcacatttctcactcttccctccacacccaccagttttttctttcaaagttccaatctttctcaccccccatcaccaaaaaaactcgtttttctccctctcccccatctgggtgcatttcatcatccacctcttcattcctctctctccggcttcatattctggggatccgtgagagagggaaatgtgggatgttttcgtggctggcaaggatagtgtcggcgtgcttgagaccggtgcggcgatatgcgcgtatgagcaaggatggtgatgtcgatgacgtgtccaccatcggcgacgcgctcgtgtgggggaaggacctcgaaaaacactcgtgcggcgaattctcctacgcggtggttcaggccaacgaggtcatcgaggatcacagccaggtcgagaccggctccgatgccgtcttcgtcggcgtctacgacggacacggcggcgccgaagcctcgcgcttcatcaacgatcatctcttccttaatctcatcagggttgctcaagaaaatggttctatgtctgaagatattatcagaagtgctgtttctgctactgaggacgggtttctgactcttgttcgaaggagttatggaataaagccattgatagcagcaatgggttcctgttgtctggttggtgttgtctggaaagggacgctatatattgcgaatcttggagactctcgcgctgtaattggttctgtaggtagatctaacaagatcattgctgagcagttgaccaaagagcacaacgctagcaaagaggaggttagacgagaactcaggtctttgcatccagaagattcacaaattgtagttatgaagcaaggaacctggcgcattaaaggcatcatccaggtatccagatctataggagatgcatatttgaagcggccagagttctcatttgatccgtcattcccacggttccacctgcctgaacctatccgccgacctgtgctaaccgcagaaccttctatatgttcaagagtgttaaaacctaatgataagttcattatctttgcatctgatggactctgggaacacttgacaaaccaggaagctgctgagattgttcataacaatccacgaatcggtattgcaagaagacttcttaaagcagctttaaacgaggcagctaggaaaagggaaatgagatataaagaccttcagaagattggaaaggggattaggcgtttcttccatgatgatatcactgtggttgttgtcttcattgaccacgagttgcgcggcaagaatgttacagttcctgatttgtccatcaaagggtttattgacacagttggaccatcaaattttagaaatttgcggggattggaatgatcacaaggttcatttgtagccaacaaacttgactggctgcttcattggtccaaaaggaagctaaaagaaattcaatacttcattagacatttttgcaacatctaattgttgtttatcttgaacatttcttctcacttttcaagggttttccttgcttaacttttttaagttttaaactataccttgtctactggaaacacgtttgctggtggtgataaattagggaagtcatgtttttctcttcattgtttacataccgttatagcttgtttgattgaataatgtcgataacgtgaaccatggtcccctcgcttacaactaaaaaa

SEQ ID NO: 3951 - DNA, 1276 bp, Glycine max
tacggctgcgtcggcgacggaggccccctcctcatttccattttcaattttaatttcctctcaaaccctaaccctaaccctaaccctccccgtcacaaaagaaaaccctctttgtccgatcatcgtcgtcaagatgttggaactccgtctcgtgcaaggctccctcctgaagaaggttttggaatccgtcaaggagctcgtgaacgacgcgaacttcgactgctcctccaccgggttctccctccaggccatggactccagccacgtcgccctcgtcgctctcctcctccgatccgagggcttcgagcactaccgctgcgaccgcaacatctccatgggcatgaacctcaacaacatggccaagatgcttaagtgtgctggtaatgacgacatcatcaccatcaaggccgacgacggcagcgacactgtcactttcatgttcgaaagccctacacaagacaagatttctgattttgaaatgaagctgatggacattgatagtgaacaccttgggattccggaggcagagtatcatgctattgttaagatgccatcctctgagtttgctaggatctgcaaggatctcagtagtattggtgacactgttgtcatttcggttactaaggagggtgtgaagttttccaccaaaggagatattggaactgccaatatagtttgtaggcagaatacttctgtggacaagcctgaagaagcaactgtcattgagatgaatgagcccgtgtccttgacatttgctttgcgatatatgaactcttttacaaaggcaacgccattgtctaacacagttaccattagtctttcaaatgagttgccagttgttgttgagtacaagattgctgagatgggttatgtgcggttctatttggctcccaagatagaagaggatgaagaagatacgaaacctcaagtttaatctacctattagatggttgggttaggatattaggattttaatgtctttgaacttgtagctttcgtcatacatcttctgttgaagatattttaaccgtgtgagcaatgaattcacattttgtggatttcttagatgtgtattggttacctaccaccttattttccctcgatttgattgttaagaacaattcgaaacaattggtgtgtatttttcatgttgatgcgtttttatttgtgaactggaacagcttcataacaaaatactgcatcaaagacaagaaaccttgagttaaccaaataacaatactgcttctactgtcttacaaaaaaaaaaaaaaaaaag

SEQ ID NO: 3952 - DNA, 860 bp, Glycine max
tcgcccactcgtccgtacggctgcgagaagacgacagattggcggacgcgtttgggttttgacgacatcataaccatcaaggccgacgacggcagcgacaccgtcactttcatgttcgaaagccctacacaagataagatttctgattttgagatgaagctgatggacattgacagtgagcaccttgggattccagaggcagagtatcatgccattgttaagatgccatcctctgagtttgctaggatctgcaaggatctcagtagtattggtgacactgttgtcatttcaattactaaggagggtgttaagttttccaccaaaggagacattggaactgccaatatagtttgcaggcagaatacttctgtggacaagcctgaagaagctactgtcattgagatgaatgagcctgtgtccttgacatttgctttgcgatatatgaactcttttacaaaggcaacgccattgtccaacacagttaccattagtctgtcaaatgagctgccagttgtagtcgagtataagattgctgagatgggttatgtgcggttctatttggctcccaagatagaagaggatgaagaagatacgaaacctcaagtttaatctacctattagatgttgggttaggatattaggattttaatgccttttgaacttgtttttgttatacatctttgaagatattttaaccttgtgagcaacgaattggcattttgtggatttcttatgtgtattagtttcctgccaccttattttctcctgaatttattgtttattgtttagaacaatgtgaaacaattggtgtgcaaaaaaaaaaaaaaaaaaaaaaaaaaaaaaaaaaaaaaagaaaaaaa

SEQ ID NO: 3953 - DNA, 1390 bp, Glycine max
gcaaacacaaacacgtctctctccaaaagccttacgtttcagtaatttggttcatttcttacagcctctcacttaaactcccaccgcaatcacattcaaaagtcagattgatttgttttaaattgtgtacaagggcaggagggttgttaaaatgtctgcaactgaagtcacaagctctaggatatcatacgagtcctttgcaataaagcctcctgagcacccaacttatgatttgaagggcattatcaagctagctcttgaagaagatgctggggatcgaggtgatgtaacatgcttggccaccattccatttgacatggaagtggaagcttattttttggcaaaggaggatggcatcattgctggaatagctcttgcagagatgatatttcatgaggttgatccttctctgaaggtggagtggagtaaaaatgatggagattttgtccataaagggctacagtttggaagagttcatggacgggctcataacattgttgtagctgaaagagtagtgctaaactttatgcagaggatgagtggcactgcaactttaactaaggcaatggcaaatgcagcataccctgcatatatgttggagactagaaaaactgctccaggtcttcgtttagtggataagtgggcggtattaattggtggaggtcggaaccataggatgggtttgtttgatatggtgatgataaaagataatcatatatcagcagctggaggtgttgctgatgctcttaaagctgttgacctgtatctggagcaaaacaatcttcaaatggaggttgaggtggagaccaggactcttgaggaagtggaagaagttttacattattcatctcaaacaaagacttctttgactcgaataatgttggacaatatggttgtacctctaccaaatggggatgtggacatatctatgctaaaagaagctgtgcagttgataaatgggagatatgagactgaggcatcaggcaatgtcacactagatactgtacataaaattgggcaaagcggagtgacctacatttctagtggttcgttgactcattctgtgaaagcactagacatctccctcaaaattgataccgaattagcactcaaagttggaaggcgcactggacgagcttgattggccttcttaagatattactattatctatcaatattttgtatcgggtttttttccccctattttgtcacttttgtgtgactttttttttttcataggcaaataaaacaaatatatattatggagcacaagaagtgccatgatacacaaacagagttacccctatgctgatcaagacaggaatcttgttattcgtgaaataatatattgctaccatataaaataatatataagtggttaccgcacctg

SEQ ID NO: 3954 - DNA, 2294 bp, Glycine max
actacgtctccctttgaccatagacattacattatcaaacaacccattccaattctcgtgaactccattccattgcttctcttcttcacaaattccattcctagagagagagagaagcaacaacatcataatcggaatttgattgaattcgatttgggtgatgagcgcgtgaaaaaagaagaagaggaagaagatggcagggaagaaaggggtggcggcagaagacgcaataagggccattggtttaggttacgatctcacaaacgatctcaagctcaaattctgcaagaaccactccagattgatcgctatcgacgatgacaaccttcgaactgtcgaactccctcctcgtatttctatccctaatgtccccaaatccatcaagtgcgataaaggtgaccgcatgagattgtgctccgatgtcctctcttttcagcagatgtcagagcagttcaaccaggacttgtcactgtctggtaagattccaacgggccatttcaacactgcctttgggtttacaggagtttggcaaaaagatgctgccaataccaagactcttgcttttgatggtgtatccatcacactctacgacattgcatttgagaaaacccaggtagttcttcatgatcatgtcaaacaagctgttccttcgtcctgggatccagctgcattgaccagattcattgagaagtatggaactcatgttatagttggggtgaaaatgggaggaactgatataatctatgcaaagcaacagtactcatctactgtcccacctgctgaagtacagaaaaaattaaaggacatggcagacgaattcttcattgacaaagccggacagtataacagtattggtgggaggtttaatgcaaaggaaaagtttatgaaggacaatgtgctgaatttcatggatattcaagcccgttcctactatgaatcagaggcgcaggatatcaagttcatgtgcaggaggaaaggtggaaatgggaaaagatttttgtcccatagtgagtggtgccaaactgttctgtctcaacctgatgtgatatcaatgtcatttgtaccaattacatctctacttggtggaataaatgggagtggatatttaactcatgccatgaatctctatttacgctataaaccacgaattgaagaactgcatcaatttttggagttccagcttccaaggcaatgggcccctgtatttggtgagcttgcccttggtcctgaaaggaagccacaaaatactgcttctttacagttcagtttcatgggtcccaagctctatgtaaacacaacaccggttgatgtgggaaagaagcccgtgacaggccttcgattgtatttggaaggaaagagaagcaactgcttggcaatccatttacagcacctctcttccctgcccaaaactttccaactccaggatgagcctaacgggaatgcgtctaatgactcttcagaacgcaagtactatgagaaggtccagtggaagagtttctctcacgtttgcacagctcctgttgattcagatgatgacaatgctgtcgtgactggtgctcactttgaagttggagatactggccttaagaaagttctattcctaagacttcatttctgtaaagttgttggtgcaacccgtgtgaaagtacccgaatgggagggttctcctggcttgacccagaaatctggaataatctcaacattgatcagcactaccttctcaggtccacaaaagccaccaccaccacggccatctgatgtaaacatcaactctgctttataccctggggggcctcctgtgcctactcagtcacccaaacttctaaggtttgttgacacaactgaaatgacaagaggacctcaagattctcctggctactgggttgtgtctggggcaaggcttttggtggagaaggctaaaatatcacttaaagtaaaatattctcttttgactgtgatacctgatgaagagggggcaagtttttgaaattatcaaatgagggtcgttggaagataatctcatcaggtaaagttcaatgagataggcgtgtgtatatataatattctctgattctgatctctttgtacatttgccattaccattatttgtgtatacctgcactgcggacacttttggggaattccttattgtagttttggaaaaggcttgtgtagtcatgcccgttacatttttttactgtatgtttgaatgttctcttatgttagtgaccacttctatgcagtagttccatttaaattttactctcaagacaatgagagaatattcattttaa

SEQ ID NO: 3955 - DNA, 2094 bp, Glycine max
tccatttatcattcccttcaactacttcacttctccccttcctcaatattccaatccttcatcaccccttcaattatatccatccttatcgctttgattagttgatttttaaatttttgacgacctcaatcataagaagaatcaattcttgtagctttgattcgttttcttttaattagatttgcaaacactactgaaaccgaaaccctaaacccttgtgaataagacgaatttgttctttcctttgattagataagaaagagttagatttagattcagttcgtttacgcttttatttgttgtcttctaattagatttgggagtataagtgaaaccctaggtcttatgggaagttagtgaattttgttgaagaagaagaagaaaatgtctgtggaaaggtcgtttgaggcatgggaagaggtgcagcgtcacgggcaggacctggctgaccggcttgcccagggtttcagcggtttgattcatacgcatatgagccctccgcagttcgcgtggccgaaccctccgacatcgaagctcttcgatctggagttcccttcgcagagctttgggaagagggatttcgctttggcgacccaggagtatgggattaatggcgtgtcagcgatttttgacatcgggaatcggatcggtcaggccggggcggatttcggtgccagcttgaacgggctggttcagcagtttttccggtcgttgccggtgccgatgccattcaagcacgaggagagttcagtgagggtggagggtggggataaggggtggcagagaggaggggttgtggttgctgtgcaggaggatttgggattgcttagtgagaggttgaagaatcgtgggtttgctgagagtgttagtggcagtggtggtggaagcgcggaggaagagggtggtggagggtttaaccttgggtctattggtcttctgggcaggcgacagggaatcataaattttacatcaacttatgatagtagaactcaagaagtggaaggttctttagttgcaaggggagatttgtggagagtagaggcatcacatggcggttctgcgtctggaaatgaaaattcatctcttttcctggttcagcttggacctcttctctttatccgtgattcaactctcctcttgcctgttcatttgtcaaagcagcacttgctgtggtatggctatgatagaaagaatggaatgcattctctttgtccagcagtgtggtcaaaacacagaaggtggctgttaatgtccatgctttgcctgaatcccgtagcttgttcatttgtggatcttcaattccctaatgggcaactaacctacgtatctggtgagggtctaagtaccagtgctttcctacctgtttgtggaggtcttcttcaagctcagggtcaatatcctggggaaatgagattcagcttttcatgcaagaataagtggggaacaagaatcacaccaatggtgcaatggcctgacaaatcgttttctttgggtcttgctcaagccttggcctggaagcgatctggtctcatggtgaggccatccgttcaattcagtgtgtgtcctactgttggtggaagcaatccagggttgcgggcagaacttattcattcagttaaagagaaacttaatctaatttgtggatgcgctttcatgacatatccttctgcatttgcttctgtatctattggcagatcaaagtggaatggaaatgttgggaactcgggtctggttctaagagttgatgttcctctctccaccgttgggcgcccttccttctccattcagataaatagtggcattgagttttgatagcattctagtgtttggtatcatcagttttatattttgcatgaagtgtacataggtttggtaccttgacagtacttgcaggaaattaaaaaaaaaaaaaaaacccctcctaacagcaaagcttagtctttttatgtgaatcagcaatcctattctggtagtggattagttttaagtctgtcattttctatggtacatcccaaaatcatttttgagcccggtgtacctattggaattttaattatttttgaaaggcctaatttggtaaaaaagtaggaattc

SEQ ID NO: 3956 - DNA, 1439 bp, Glycine max
cgaacattgttccgcaaagtaggcgattcttcctccctcaagttgaaagtcgccataggtcaccataactacatgaacgaactgaaactgttggactttcaattcgaactaaggcaaaaccaaaactcatttcatgtaattcattttctctctccccccgaacactcaagttttatctctcagcctcagtttgctgctagaggttgcatatttggggtttcacacgtgcgcaatttgaaggtattattggaggagagagtgtaaatgaagaaaccaacaaccgacgcaattagtatgggaaaaaggagcctggagggtggagaagatgaccagcctgaacgaaagaggcctgctcttgccagtgtaattgtggaagctctgaaggtggacagtttgcagaagctttgctcatctttagaacccattcttcgtagagttgtcagtgaagaagtggagcgtgctttggcaaagttaggtcctgcaagacttagtggaaggtctcctcctaaaatgattgaaggccctgatggtagaagcttgcagctgaaatttaggtcccggttgtctcttcccctattcacaggaggaaaagtggaaggcgagcagggggctccaatacatgttgttctgattgatgccaatagtggaagcattgtaacatctggacctgaatcctgtgttaaacttgatgttgttgtccttgaaggtgattttaacaatgaagatgatgaagattggactcaggaggattttgaaagccatgtggtaaaagaacgtgaaggaaagagacctttgttaactggggacctgcaagtgacactcaaggaaggagttgggacattaggggaactgacgtttacagataattccagctggataaggagtcggaaattcaggcttggcttgaaggttgcatcaggtttttgcgagtccttacgcattcgtgaagctaagacagtggctttcacagttaaagatcatagaggagaactatataagaagcattatccaccagcattgactgatgaagtgtggagattggagaagataggcaaggatgggtcattccataagaagctgaataatgcaggaatagtcacagttgaagaatttcttcggcttgtggttaaagatcaacaaaaattgcggaatatccttgggagtggtatgtcaaacaagatgtgggaggctcttttagaccatgcaaaaacatgtgttctaagtgggaagctctatgtttattatccagaagatgcaagaaatgttggcattatttttaacaacatctatgagctgcgtggccttatatcaggagaccaattctattctgctgattctctcactgatagccagaaggttataatgataataatatagtaatacgatatccaacccagtcattgattcccaactccagctcccggactcagttcgatagc

SEQ ID NO: 3957 - DNA, 1553 bp, Glycine max
  misc_feature (17)..(17): n is a, c, g, or t
ggtccggaattcccggngtcgacccacgccgtccgaagataggcaaggatgggtcattccataagaagctgaataatgcaggaatagtcacagttgaagaatttctccgcctcgtgggcccccccccccaaagattgcggaatatccttgggagtggtatgtcaaacaagatgtgggaggctcttttagaccatgcaaaaacatgtgttctaagtgggaagctctatgtttattatccagaagatgcaagaaatgttggcgttatttttaacaacatctatgagctgcgtggccttatatcaggagaccaattctattctgctgattctctcactgatagccagaaggtttatgtagattcattggtgaagaaagcatatgaaaattgggatcaggttgtggattatgatggcaaatcactcgtgaatgctaaaattgcttctgaaaatgaacttcgggtggagtcaattgattatggtagtggtttagatcatcaactgcaactgccggcacttcccgtgtctgttccttctgagcagcaaatcaattcagggatgcctgttggaggttataatgataataatatagtaatacgatatccaacccagtcattgattccaaactccagctcccggactcagttcgatagctcattatatgtgtctaatgaccaattaattagcaatgctcaccaaacccaaagcactagtaatgatcgtggcccaattgggttagctcttggtcctcctcaatcatcgacatcagggttccatgctggtagctcttctattcagccatctactataaatccttttgatgattggtcacacaacagggacaagggggctgatgaattcttttcggaagaagaaatccgcttcagaagtcatgagatgctagagaatgaagatatgcagcagttgcttcgcctcttcagcatgggaggtaatggctccatgagtgctgaggatggctattcattcccatcattcatgccatctcccagtataccaaactatgatgaggatcgctctcgcccaggcagagctgttgtgggatggctgaagatcaaggcagcaatgaggtggggcttctttatcaggaagatagcagctgagaggcgggctcagatagaggagttagatgaataggttgttcggacaatggttgcaggcttaacagttagccttaagataatactgatattctgcagatttagttgtctttatcagtgccaaccaaattgtgcagtccatggtgttaatattcttgatttatgcatctctgtatctgatttgacagcacgtttgccccagtatcctgtacagtttgttgaagcttaggaaaaactgtgattgtcaatttgtttttcactttcacgtttatgctcctcactttccattggctttgggtttttagggatgatgtgtttacgcaacctccctcatatttgagacgataactaagattggtcatctcactgtatattttgagctacttgattttctatttatattacgagttattatcttgttatcacaaaaaaaaaaaaa

SEQ ID NO: 3958 - DNA, 798 bp, Glycine max
gcacgaggggacaacagaaaaaaagacacatcaaagttcaactcttgatacttaatttaactggtttcatgcttatggaggttgctgtggaactggaagatgacctattttttgcagacttgagcaagcaaatttctcaactaattatggatgaagatgaagacccccttcctacttgtcctcctgattctcttcagacttttcctggatcaatctatcctcctccacagtctggtttcctctacgagcaggctttgataagacaaagcaaagggacaggggtgtttatcccccaatctacacagcctagaaggaagcacaggaaaggaagatcaagctcaaacgctaagtatcaaaagcagactcaagatacaaaaacggtttctcaagttcctataacaagttctttcaaacccaaaaatggttgaggatatatatattttcccacaaattaaactgcataagttctattgattaattactttgccaagtttaattacttacgggtctaattctttagtctttaggcaataatgtgtggttatatagtttgaaggattgatgtataggtcaatatgcgttgactaatgaagtggacaaattaatgtacataattaagtgggggataacccctatcttgtgaaatagttttcggaattgccatatatacttgctagtctttatagcaaggtttagtcaaggtcttgtaacccttcaccgtgtgcacaagcacaagcgtgatttattgttatctggtttgatgaaattatcttagttttctaaactaaaaaaaaaaaa

SEQ ID NO: 3959 - DNA, 1348 bp, Glycine max
tcgagtagctacgtaggccccccccccgaccatatttcatgtctgttgctcttttcttctcttcttcttcttcttctacccttcaatattaatattccgtgcaaaaaccaccaacaacaacatcaccaccaacaagaagaacaagattggcgttatgggtctcttcctttctaggaatttggcttgcaaattcatatacccttttcttttctccaagaaggtttccaaggatttgtttcccaagcagttggagaacatgatgtctctgatctctcctcgtactggcaggcatttgcagcgctatgacaatggctgtcgccaagttgtgggatgcattccttatagatacaagaacaatggtacacaggataaggaattggaggttcttgtgattagtgctcagaagggtcatggaatgcagttcccaaagggtggttgggaaactgatgaatccatggaacaagctgctttaagggagaccatagaagaagctggagttgttggcagtgttgaaagtaaactgggaaaatggtattacaagagcaaacgccaacccataatgcatgagggatacatgttccctttgcttgttaagaaggaattggataactggccagaaatgaacacaagaaaacgaagatggatgactgtggatgaggcaaaagtaatatgcccttatgcttggatgaaggaggctttggatgaattggtcagaagacaaactcaactgcactccaaaaaggatggggatatgagtaggttgtaaatttgtaatagcgtgtttggttccacatcacagatttgttttttcacgcttagtcagaaactaatgcttacagctttttcacatcccaaacgtgatttctcacttctcaaaaaaattccaaacatgcacttagtgtcttgcttttggaatctacaaagtggtagaacaaaagcactcataagctgttgttagggcaagagaaattaagtctagtcattaagaggagggaaagtgcagttcaaggtgtgcccacaatttgttcctcccttgagtttgtttgttcctctcttcaaattggctatagtctgaaagttctgcagcagattacggatttgtaggggcgtagttgagatctagccatagagatcagttgtagattgtacaaaatcaattcattctttcattcatttgattcttttgtaatgaaatgtatgtaggccatgtgtagaatacattattcttcctgtactcataaaattattaaaataaataaaatcttccattgagactgaaaaaaaaaaaaaaaaaaaaaaaaaaaaaaaaaaaaaaaaaaaaaaaaaaaaaaaaaaaaaaaaaaaaaaa

SEQ ID NO: 3960 - DNA, 1307 bp, Glycine max
tcggcgaggcgaccgacagccccgccccatatttcatgtctgttactcatttcttctcatcttctttttcttccctttaaaattattattccgtgcaaacacaacaacaacttcatcaccaacacgaagaacaagattagcgttatgggtctcttcctttctaggaatttggcttgcaaattcatatacccttttcttttttccaataaggtttcaaaggatttgttccccaagcagttggagaacatgatgtctctggtctctcctcgtactggcaggcatttgcagcgctatgacaaaggctgtcgccaagttgtgggatgcattccttacagatacaagaacaatggaacacaggataaggaattagaggttcttgtgattagtgctcagaagggtcatggaatgcagttcccaaagggtggttgggaaactgatgaatccatggaacaagctgctttaagggaaaccatagaagaagctggggttgttggcagtgttgaaggtaaattgggaaaatggtattacaagagcaaacgccaacccataatgcatgagggatacatgttccctttgcttgttaagaaggaattggataactggccagagatgaacacaagaaaacgaagatggatgactgtggatgaggcaaaagaaatatgcccttatgcttggatgaaggaggctttggatgaattggtcagaagacaaactcaactgcattccaaaaaggatggggatatgagtaggttgtaaaaaaaaaattgtatagcgtgtttggttccaagtcacagacgtgatttttacacgcttagtcagaaactaatagttatagttttcacatcctaaatgcgatttcttacttctcaaaaaatttccaaaaatgcacttggtctcttgcttttggaatctacaaagtggtagaacagaagcactcacgcggtgttgttagggcagagaaattaggacaagtcatgaagaggagggaaagtgcagttcaaggggtgtgctcacaatttgttcctctcttcaaattggctatagtttgaaagttctgcagcagatctagtcatagaaatcagttgtagattgtagaaatcaattcattctttcattcatttgattcttttgtactgtaatgtaatgtatgtaggccatgtgtagaatacattattcttcgggtacccaaaaaatcataaaaaaatcttccattttgtgactgaaaaaaaaaaaaaaaaacaaaaaaaaaaaaaaaaaaaaaaaaaaaaaaaaaaaaaaaaaaaaaaaaaaaaaaaaaaaaaaaaaaa

SEQ ID NO: 3961 - DNA, 949 bp, Glycine max
  misc_feature (1)..(1): n is a, c, g, or t
  misc_feature (642)..(642): n is a, c, g, or t
  misc_feature (654)..(654): n is a, c, g, or t
  misc_feature (657)..(657): n is a, c, g, or t
  misc_feature (679)..(679): n is a, c, g, or t
  misc_feature (688)..(688): n is a, c, g, or t
  misc_feature (698)..(698): n is a, c, g, or t
  misc_feature (702)..(702): n is a, c, g, or t
  misc_feature (718)..(719): n is a, c, g, or t
  misc_feature (721)..(721): n is a, c, g, or t
  misc_feature (730)..(730): n is a, c, g, or t
  misc_feature (734)..(735): n is a, c, g, or t
  misc_feature (737)..(738): n is a, c, g, or t
  misc_feature (740)..(741): n is a, c, g, or t
  misc_feature (744)..(745): n is a, c, g, or t
  misc_feature (753)..(755): n is a, c, g, or t
  misc_feature (758)..(758): n is a, c, g, or t
  misc_feature (760)..(760): n is a, c, g, or t
  misc_feature (765)..(765): n is a, c, g, or t
  misc_feature (767)..(767): n is a, c, g, or t
  misc_feature (769)..(769): n is a, c, g, or t
  misc_feature (773)..(775): n is a, c, g, or t
  misc_feature (779)..(780): n is a, c, g, or t
  misc_feature (783)..(783): n is a, c, g, or t
  misc_feature (787)..(790): n is a, c, g, or t
  misc_feature (792)..(792): n is a, c, g, or t
  misc_feature (797)..(797): n is a, c, g, or t
  misc_feature (800)..(807): n is a, c, g, or t
  misc_feature (816)..(816): n is a, c, g, or t
  misc_feature (821)..(831): n is a, c, g, or t
  misc_feature (833)..(833): n is a, c, g, or t
  misc_feature (836)..(836): n is a, c, g, or t
  misc_feature (838)..(852): n is a, c, g, or t
  misc_feature (854)..(855): n is a, c, g, or t
  misc_feature (857)..(863): n is a, c, g, or t
  misc_feature (865)..(865): n is a, c, g, or t
  misc_feature (867)..(867): n is a, c, g, or t
  misc_feature (869)..(869): n is a, c, g, or t
  misc_feature (871)..(873): n is a, c, g, or t
  misc_feature (875)..(876): n is a, c, g, or t
  misc_feature (879)..(882): n is a, c, g, or t
  misc_feature (886)..(886): n is a, c, g, or t
  misc_feature (890)..(890): n is a, c, g, or t
  misc_feature (892)..(893): n is a, c, g, or t
  misc_feature (895)..(902): n is a, c, g, or t
  misc_feature (905)..(907): n is a, c, g, or t
  misc_feature (909)..(913): n is a, c, g, or t
  misc_feature (915)..(919): n is a, c, g, or t
  misc_feature (921)..(932): n is a, c, g, or t
  misc_feature (934)..(935): n is a, c, g, or t
  misc_feature (937)..(938): n is a, c, g, or t
  misc_feature (940)..(940): n is a, c, g, or t
  misc_feature (943)..(943): n is a, c, g, or t
  misc_feature (945)..(949): n is a, c, g, or t
ncgattgggttccgaaaaaccaatataaatatggtgaagaagggtttaggtgggttttgagcacttggcacagaagagcacgctgagagaaaggaagatgatcatccccgttcgttgtttcacctgcggaaaggtcattggaaacaaatgggatacctatttggaccttctgcagtcagattacagtgaaggagatgcactggatgctttgggactggttcgatattgctgtaggcgcatgcttatgacccatgtcgatctcattgagaagttactgaattacaacactctggacaagtctgatcccagttaagaaggcttaaggagcaaagaatgaccaagatgtttcagttgcattccatgctatctggccaatgaacaatcttttttccttttctgaattgttttgctacaagctggtcatggttgtgtgctgattcatgtgaattatggttatccgttctttaaaggggctatatgacaaagcgcagcttatgttaattacttcatttctagtcagtgtgatgcgaagctgtcttttgatattaatatctcatacacaattatatgtctaccatactttagaagactgacccgtacttttaaaaatctgattatttaacaaaaaaaaaaaaaaaaaanaattcctgcagnccngggggatccacttaattgttanaaccggccncccccgcggngggngctaccagctattgtnncntttaagggngggnnanntnnggnngcttgggnnnggngnggggngnanagtnnngggnnggngggnnnngnggtgnggnnnnnnnngggcggggngtggnnnnnnnnnnngnggngnnnnnnnnnnnnnnnanngnnnnnnnangngnannnannggnnnngagnagcngnncnnnnnnnngannngnnnnngnnnnncnnnnnnnnnnnnannanngnaanannnnn

SEQ ID NO: 3962 - DNA, 723 bp, Glycine max
cctcgagcccgttcaaattggctatagtttgaaagttctgcagcagatctagtcatagaaatcagccggggtttgtacggtgaagaaggactcaggcgtggtttgagactgtgagcacttagcagagaggaagaaagatgatcatccctgttcgttgtttcacctgcggaaaggtcattggaaacaaatgggatacctatttagaccttctgcagtcagattacagtgaaggagatgccctggatgctttgggactggttcgatattgctgtaggcgcatgcttatgacccatgtcgatctcattgagaagttattgaattacaacactctggacaagtctgatcccagttaagaaggccttagggagcaaaggatgaccaagatgtttcagttgaattccatgctatctggccaatgaacaatcttttttccttttctgaattgttttgctacaagctggtcatggttgtgtgctggttcatgcgaattatggttatccgttcgttaaaggggctatgacaaggcccaacttatgttaattactctttttttagtctttctgatgcaaagttgtcttttgatattaatatctcatacacaattatatgtctgaccaaacattaggagactgactcgaagatctgattatttaagaatgtccaaattgatacaaatgcatgtcctaaatttatatgcttacgaataaaaaaaaaaaaaaaaaa

SEQ ID NO: 3963 - DNA, 1850 bp, Glycine max
cttttcaatcgcattcacttccagagccaaaattcagccaatcgcgtcgcccactgggccccccccccccctcaacttcaaatggatcctcagtggaaactttgtctggggccacagttcctatggggaagcccaactctctactcggagcataccaaaccttcagcttggccaagatcatctgtggggcatccatttgcatcgaatggaaagagccatgccttcccatattcaactcagaatagttcttttgttggttcatcacagcatcttcaccaccatcatgtcggctccgccccatcaggtttgccttttgagaggcactttggtttccatcccgagtcatctgaaacttcattcatgaataatgttggctatggaggcattggtccagggcataatgatggaaatcacatggttaatgtgggtggatctgttaatcctaacattactatcccgagaaatatatctgataatggttcatcaaacttcagaatgagatcttctcctaggcttagccctgtctttttgggaaatggcccttttccaggactgccacctaccactttggagggtttggctgaccgtgctcggagtagatggatagagaacaatgggagccaagttgatagcaagaaacaatttcagctcaacttggataagattaaaagtggtgaagatacaaggactacattaatgataaagaatatcccgaacaaatacacctctaaaatgttattagctgccattgatgaaaatcacaggggtacttatgattttctctacttgccaattgactttaagaataaatgcaatgtgggctatgcatttatcaacatgctgtctccctctcttattattccattcttcgagacattcaatgggaagaaatgggagaaatttaatagtgaaaaagttgcttctttggcatatgctagaattcaaggaaagtctgccctcgtgagccattttcaaaattcaagtctgatgaatgaagataagcgatgtcgtcctattctcttccactccgagggttctgaagtttgtgatctgattgtacaagaccaccaccttccctccaactccaacaatctaaacattcaggcaccaaggccaagtgagttctattcaagtgattttgctgggagtcctccaaaggcaggcccttctgcaagcttggatgcaaattaacatttatattagacgcagagttgcttagccaaaaccggtcactgttaatgttaacattttgcaaatatgtctctctctctggtggtgctgcatatatttaggaaggataacagaaggatgtagattttgtaccatagccattttcccaagtattttgccagcaagctttagaagcttggagcattttgattgaattgctgcacaggtaactgatctgattatgtacacaaggtggttgtggtggtgatggtgggagcaaaggctgaagagttgattgagcaaaggtgtttgtttctcttcaatttttgctcatttttgcattttggtgtcttgtcattgagcattttttttttcctttctgaaaaatgttaatatgggggtagagttcagtttggttggagggttggaagttggtaagttcatcacgtgggggtacaaattgtatagagagaaaataaagacttatttctttctatgttttcctctaatgtactagtactactctggaaaaccaaaagtgtaaaacgcttatttaaatatgatggtgtacaagttgctcactatcttaatcaagacattgtttgttttggttggatgattgtagcctttgaaagtgcagctttgacacgtcaagtgaaaactcacgcctcattaaagtt
